United States Patent Application Publication US 2008/0274467 A1 - sequence listing, part 4

SEQ ID NO: 394 - DNA, 553396 bp, Homo sapiens
  misc_feature (1)...(553396): n = A,T,C or G
gctttggattagggataaggacacctgagtcctattaaggtctctgtctggatttgtgaatgcacctgttaagtgagttgtatagactaaaatgttttccagactacatgagcctttttgagtattgcacaagtggtattttataaacgagaaatagaataaaaaatattgtgcattgagtacctaagaggtaagtattgctctgtgaatcattgtttcagttatatgtatagggtactgggttacaatgtaaaaaatgtatttttaattaaaaaaatataaatgtagaaaaatataatagagatgaggtctcactatgttgcccaggctggtcttgaactcctaagctcaagtgatcctcccgcctcagcctcccaaaatgttaggattacaggcgtgagccactgtgtctggccaaaaaatgtatttttcacacagtttggttttctattccaaaatttggtggcttaaaataactactttattagatgtcatgatttttggattaggaattcagacacagcttggcctgttgattctgttctatatggtgaataagatcacttggaggtgtttagctgacaacaggtctggtctggagggtccatcttatctttattcactcaccttatgccttagggtaactggaggcttggctcaactgggcttctcttagtgtagtttgagatcctctctgtggtttcttcagctgggtagttggacttctcacgtggcagctccaagagaccaaagcaggagctggcagccctctcaaaggctagcttagaatctggcatagcatcaccttcactatacactattggtcagaggagttccaggctagcccagatttaagagaagggaacatagacttcttgtctctaagatattgttcccattttaagtctgccacaattatgtaaaataatttagaaaaacatgactgaattatatatccaagcttttaattctgttattgccctttgaaggatgatcacttttaaagtgttttttcctccattgggaaatttgtctgcttttggtaaattttcatagttcaatttgagtatgtatattatttttccatggaatactgagggttttatgcttttgaagaaatgatttaaagtttaaaatttctttctctacattgatctgctggttttaattctttgaatagcacttatgatcatttgatgctgttcttttttgttacttgattattcatctttctctccttagaatgtaagttctaaaagggcagcacatgttcttgatctttgccaaatctgtagtgtctcctgtagtagaacagatgctcgataaatatttgttgagttaatgaatgaacaatttaaaagattgtgagctgggcgcggtggcttacgcctgtaatcccagcactttgggaggccgaggcgggcagatcatgaggtcaggagatcgagaccatcctgtctaacacagtgaaaccccatctctactaaaaatactaaaaaattagcggggcatggtggcatgcgctgtagttccagctacttgggagcctgaggcaggagaatggcatgaacccgggaggcggaggcttgcagatgagctcgtagtatcgcgcgcactgagactctcgaggccgtgggcgacagtagtcgagtagctgtgctcacactaaacataagaaaagcgaaagcaaggtaagaaggaaggatgtgtgcaagacatctgtagcactgcagtatgctcagcagctaggacatatggaggcagaggaatcagcggacagagatgctctagttttagcaccgtgaaggttctgctgcttgagctagaatagcagcccatgacacaaggtgatcgcgcatatggcacacagagagcatactacgctcgagtaagagtatcgcgtggcactgtgatcactgacgatgatgactctgggaagtctaccaactccttgttgcgctaggaaaactatttcctagctactaatttctgtccctctattatatctaggtttgcataaattcaggaatatggcagtagtaaaaccaaatggatcccactggaaacatnnnnnnnnnnnnnnnnnnnntgctgtacagcggtacttccacccgtggtgtaagagtcgcccaggctgtagtgcagtggcatgacctcggcccactgcaacctccacctcccgggttcaagcgattctcctgcctcagcctcctgaatagctggaattacaggcatgtgccaccacacccggctaatttgtgtatttttagtagtgatggggtttctccacgttggtcaggctggtctcaaactcctgacctcgtgatcctcccgccttgtccttccaaactgctgtgattacagacgtgagccaccgtgccttgccaaaataaggaaaatcttttagatagaaaatataggaccggtgtggtggctcatgcctgtaatcccagcactttgggaggctgaggcaggtggatcccttgagctcaggagtttgataccagcctgggcaacatcgtgagaccacatctctaccaaaaaattagctgggcatggtggcgtgcatatgtggtcccagccgctcaggaagctggggtgggaggattgctcgagcctgggaggcggaagttgcagtgaaccaagattgtgccagtacacttcagcctgcgtgacagtgggaccctgtcttaaaaaaaaaggaaaaagaaaatatatttcataaggttagcaacaagcttttgagaagggctattctttatttctgtgatgtactttctatatttttgtattaaaatcccttttctgttgtgaaatgatagtgatattcacttctatagtttaaaaatatgttctgtgcagcataaataattgataagcagtgttatcttgtactttcagattggagttgcctttgagagtcaaagatttgtagctcacagaaaataaagaagtactgtgtgggtgtgcctgggagggagttttgctaagaattcttactaaataaagttcaatcagtcaaatgttattgtactcttcaaattctccagggaaataaattgccagcttccatttaaagattgtattttgtttgaatatgtgatgttaaagtgaaatgtgacatataagaatctaaagatgattattaaaagcaaacaacataatagcattcttacaatgtcttttgcaggagagaattaatagatttagcagtgtttctttgaataaacttgtccataatgaaagctaactaaaattgcattaaaatttatcaactcctttaaaaaaattcaatatgttttgagatacaagtatgcacaagtattttctttcattgtctaataagaacttaaaggaacctgagatgtcacctataacaaactcctttgtgtttcagaaaaggaaactgatggtcaaagaggtaatgatttgtcaaaagtaataaagttattggtaagtccaggattcgaatcccttctcattcccaggcccctgacctttacatggctgcacactattttagggagacaagttttaagaagtttctctttttggatatgatatagattctttaaataatattattttactgatttttgaattcatattaaatgagggtttgtatttttaagtaacatgcagggaaaacattccacattcatgttatgacagctgggctcgtcaaggctttgcaaagctctaaaagtaggatacacacttttaacttttgtcaagttgtgatttaaaattaatcaaaaaaatcatgaggacaccttatttttgttattcctgtcttaaagaatctttatacatgaaaaaatgaaacatttataaaattagcccaatttgtctaaaaataagggtagttttgacggttgtgaatttctttttttaaaaaaactcaggaacaaggttatgattttaaaaatgcaagttttcaaaaagggcaggagtaagttttgtatttttaagccatttaaaaaagatagtaaggccgggcacggtggctcacgcctgtaatcctagcactttgggaggccgaggcaggcggatcacgaggtcaggagatcgagaccatcctggctaacacggtgaaaccctgtctctactaaaaatacaaaaaaaatttgccgggcgtggtggcgggcacctgtagtcccagctactcgggaggctgaggcaggagaatggcgtgaatctgggaggctgagcctgcagtgagccgagatcgcgccactgcactccagcctgggcgacagagcaagactccatctcaaaaaaaaaaaaaaaagaaaaaagatagttgatatttaataataattataaaaattataactataaaaccagtattagaaaattaatgatggatgaatgtaaataaagtaaaattatgcataatcctactttccagagataactaataacatttaggtgtatttctttccaatcatttttttctatgcatatatggtgtgtatttttttaaacacagtcaagttcatactctacttccttttgttttgcttttttcatttaacattatatcatgagcattttcttatgtccctaaaaagtctgtggaaacattttataatagttccataacattctgtaattatttaactattaccctatttctggttatttgggatataataaatttttgctattgttaataaggctgaaatgaataactgggtatacaaatctttatacacatttgtctctcttttaatgatagttgcctaaaagttggaattactgacacatattgccaaaattctttatagtagaaatgtactaatttatactcccattaattttatatgagagtgcttgttttatcgcacccttaacaaactggttgtgtttgaagagaactttgctattattttggggcttgaagcatttgttgaagagattagtggatgggtccacatttttggtatgctatttggaggcacttagctattttgggttatgtatctgattgcttttatagggccagaccacaagattagataaagtatatggaatatttacatatcagtcttacgaagagcaaactattcagacccacttatcttgattcagctattctaattgtaaaaagactactgaaggttaaaaatttcagttgactattttctcctaaagtaggataagctaggcttttaggaaaaaaatagggttgaaataaattgtttagaaaattgatcaaaagtagtagttactcagtactctctctctcagcgctcactctctttctgtctctctctgtctctctgtgtgtgtgtgtgtgtgtgtgtgtgtgtgtgtatttagaaaaagagtagaatggaaagattagaaatagagcatgaaaggctggggaagggaagttgctgtgaataacagaacttctgcctttacctgggaaaatatatctttacttttgtcgctacattattgactctgaaagatcacatgagtcctctttcttgaaataatatttttgtgtttgtaactgctgacacgactggtacttaaattttgagagaataaactttttgaaaatttttttgaccattaataaaaaacttttttttcatttcctacagtacatggattttcttttttttttttttttttaagacagggtcttgttctatctctcaggctagattgcagcggcgcaaacacagcttgctgtagccttgaactcttgggctcaagccatccttccatctgagcctcccaggtagctcggactacaggtgtgtggtctccctatgttgcccaagctggttttgaacccctaggctcaagtggtcttcctgccttggtctccctcagtcgctcgggcatgtacccagagtgtcgaacgtccatagtgacacccatgagcctacgaccacccctgcatttgcgcctggcagccaccgctgcgcctccaccccctgttaattccccagccattttgggaggccgaggtgggcggatcacctgaggttgggagtttgagaccagcctgaccaacatggagaaaccccatctcttattaaaaatacaaaatcagccgggtatggtggcacatgcctataatcccagctgctagggaggttgaggcaggagaattacttgaacctgggaggcagaggttgcagtgagccgagatcgcgccattgcaccccagcctgggcaacaagagtgaaactccatctcaaaaaaaaaaaaaaaaaaaagcggatcacgaggtcaggatatcaagaccatcctggccaacatggtgaaaccccatctctactaaaatacaaaaaatttgccaggcctggtggcgcacgcctaggggattgcttgaacccgggaggcagaggttgcagtgagccaagagtgcaccactgccctccagcttggtgacagagtgggactccatgtcaaaaaaaaaaaaaaacggttagatgcaaatatcaaaaatgagttaaaaaatatctttggtgtggcttcaattttattaactattttaatattgcagacccatatcttcccttaattatactgaatttagtatatttgttaaaaaataaagttttaagactacctgttttggtatcaaaattagttttttttttttctttttttttgagatggagtcttgctctgtcacctaggctggagtgcagtggcatgatctctgctcactgcaagctccaccttgggttcacaccattctcctgcctcagcctcccaagtggctgggactacaggcacccgccaccacgcccggctaattttttttttaatttttagtagagatggggtttcactgtgttagccaggatggtctcgatctcctgacctcgtgatccacccgccttggcctcccaaagtgctgggattacaggtgtgagccactgcgcccggctaggttttttcaaattgaaaattttttttctttttctttctttttttttttcttttgagatggagtcttgctcttgttgcccaggctggagtgcagtggagcaatctcagctcactgcaacctctgcctcccaggttcaagtgattctcctgcctcagcctcccaagtagctgggactataggtgtgtgccaccgcgcccaactaattcttgtatttttagtaaagatggggtttcaccatattggccaggctggtctcgaactcctgaccttgtggtcctcctgcctcagcctcccaaagtgctgggattacaggcgtgagccactgtgcctggctttaatttgaaaattttaatgttacaaatcaaaggtaggtgttaccaaagtatgttaagcatgagcaaaagtgcatttgattgttcagagggccaagttcatgttagctttgggatcatgcctccagagatgtaagtttaactattatgataataacaaagtaataattatgccatgtgccaaggattctattagactctttactatagttaattaaattttaatcttcacagtgccctgaacagcatataatgggtaaaccgagggacagacagtttaagaaccagtttaaaggctgggtgtggtggctcatgcctgtattcccagcattttgggaggctgaggtgggcggatcacttgaggtcaggagttcaagcccagcctggccaacacggtgaaaccttgtctctactaaaaacacgaaaaaaaaattagctaggcatggtggtgcgtgcctttagtcccagctactcgggaggctgaggtgggagaattgcttgaaccccggggatgggggcggaggttgcagtgaaccgagatcatgctactgcactccagcctgggtgatagactgagactccatctcaaaaaaaaaaaaaaaaaaaaaaaaagaaccagcttaaagtcatacaggtaataggaagtcaagcagaagttgcaaaccagataccttttgctacctttacaggcttgctactcagcctggcccacagaccagaagcaattagtgagacctgggaacataaagaaatgcaaaattttggtcactgatacctgcagtgccaaacctgcattttaacaagatccacgagatttgtatgcatgttaaagtttgaaaagcactgatggtgtgaaatgtggattatctatcaacattttccacaagagaaggtgggtaactctagccagtgtctccaccactgtgaattgctaatccagctgctgctttgcttcagatcctgtttaatccagaggaacaattgactaattctgcttgtggaccttcggtcaaagtcttaaccacgccaagtatagctcagtgttttaacagcttttactcatggactgaacacatcagttttatagaccatggcttcattctggataggcatttcccaggttaaagagaacagtgctaaaaatagcattttctaaagaaacttgaaatcttctggaatatttgatgtgttttatggctagcaagaaaacagatttgtataaactggcttccttactaatttcattttgtgaacttaattattctatcacagggacagtgataggtaaagctaacttagactagagcagcactgttctgtagaaatataatgcaagattcctgtaattttaaattttctagtagccacattaaaaaaggtaaaaaagaggccaggagtgttggctcacgcctggaaggctgaggcgggcagatcgcttgaggccaggagtttgagaccagcctggccaacatggtgaaactccgtttctaccaaaaatacaaaaaaatttagccaggtacggtggcgcatgcctgtagtcccagctactcgggagcctgaggcacaagaatcgcttgaacccaggaggcagaggttggagatcgcaccactgcactccaacctgggcgacagaacaagactccagctcaaaaaaaaaaaaaaagtgaaatgtagtccaactaaaacaatacaattgtgtttagtggaaaaatatattgcttcagttataaaatttaaatgaattaaaattaaataaattaaaaattaagttcttcagtcccatcagccacatttcaatatcggatggtattggttgcttctgatataactgatttcagacatatgaaattgatcaccatcctagatggtcagtaagttaatgccacaggatattgtagtctattaataacattgtagaacagggcccagtcgttcacacctatattcccagtgctttgggaggccaaggtgggagggttgcttgaggctaggagttcaagaccagcctgggcaacatagtgagaccctgtctctacaaaaataaaaaaatgaaaattaaaaaaattattgcacagagaataaaggaataaaagcaatttggatcataaagcatttactgattccccccttttcatagttggagttaattttccttttattggttcacaatttcttaactcttcaactgcattaaactgtaagattagagccaggagttagggtgccatccacttttcccctctatggtcttagattctttttttttatagcccgcatgcttctttggaaagtgaggtaattgtgtcaaataggatagccttgagtggggcccagaggttgtaaaattttatgtctgtacctgattcacctggtaacttgctaaaaataccgatgtccaggcctacctttctagattcggatacataaagtgacactttccatattaaataagctgctctaagtgtttctgaagttcaggaacgtttgggaccatcagatccagcaattgactctcaaaggctgcggactggaattagtacgtcgtgctgccgttgccaggcattttatattttcctaggctgaggcttcccaggctgttgctttttttccccccacctttgcagatggattttgcaggctgttaaatcccactcccgaagacctgccctgacagcgcctctttcctaagtgctgttacagggagctgagcttgccgaggtagacagtggccacgtgactgctaaaccggttgccagaggcgcggccatttttggggcgggcacccaatctctcgccctgtaaactgcggggtgacgggacgctgttactaggactcaagatggccaccgcgcccgctagtcatctcgctagcccgcgcgccagtgagctggcacgagacacgcggtggcccacggcgtctggggacgatctccagcccttcgcacggggcggagcgcccgccttccctccaatcagcacgccgggccggctagccaggggccgcccgcgcgcggggtgtgtgaggacgcgctcccagtcgctgagtgcctgagccgggaagcagttgctgtggtacctgctgctgcccgagcggacgtagagcatcggacgcgggcgccgtggcgctgggcaggagggcgaagccatgacgtcagtcaggtaacgagcgggcggctgccttgactgctccgagctgggcgttagcctcccgagcgcgtgagcactgtcgctccttctcgcgggtggtctggagcctgcctccgcctctggtccccctcgtgttgggggttccctccgcacttttcatttgggcatttctgctttcctcagaagttttcgggtctgtggcacattgcggagttctgtgtgtcgctgcttggtcgaggtgaccctcgcccaaattccagggttgcaagcgttcttgggtgtgtagtggatttcccatgaaaaatgtgccccacccgcgcccccgggggcggcccagggccggagggagcgtggcgtgcacagtgtgtgtcatgcctgcgtgtcatgccctctgacagaacttcattgttggccgggagcagacctgcaaagttggcccttctctgatgcaggtatattgccctcaagttgtgaaattgtgtgtctctaaaatgtttgctcatgactggaattaggaccctggttcccgaaggtaccatcttgtttctttactccttttatctcagagtcacaagtgaaatgagttgagagatactgggcatgtagcgaaatccatgaaactggagactttcccccaattgctcttccagtttggaaggttctttttttgttaatgaggacaggataatgggcttgtccactttctcccagtagccttgactgaatgtttaatttacgctagttcaactatttataaaaagagataaattgccttatatacccagtgttctgactggcctttttaaaagcagaacttgggctttgttgtcccagagaaagggaggccccagcacaaaaatgtgaagagaaataaaataagctcatttatggtctatgagctttccaggctccacccgtcctggtgatttgagggcttctcaatgccaatttttactacattgtgtttaagagacagcttgggaacctaaccctcagtaagatctaactgtgctgaactcggacatagtctgtctcttaaattgcataattatatatatatatatatatatatatttttttttttttgagacagagtttcgctcttgttgcccaggctggagtgcaatggcgcgctctctgctcactgcaatctccgcctcccgggttcaaacgattctcctgcctcagccatccaagtagctggaattataggcgccagccaccacacccagctaattttgtagttttagtagagatgggggtttcaccatattggccaggctggtctcgaactcctgacctcaagtgatccacctgccttagcctcccaaagtgttgggattacaggagtgagccaccgctactggtctaaattgcttcattctgtactaacatagacaaagtacttatctcattatgcagaaggagattcaggtgctgaaacatggagacccacatggaaggatttcacagtaaattatattggggcatataaatctagcttttaaagctaacagtattttaggatgaattagaattaggctattatacccagagttaattccccttcttcccattcccactcttattatcacagaatgctactaattaggtgtaggggtcaaatactttctgtgttaagaatcagttgttatgtggattcagttttaattgactatcatcttcctgaccgtgcctcattggagaaacatccaaatctaaagcttctgctgtttaataagtgacagcaggatgtatcttttactgtaggggttgatagttttttttaaaagactgatgtaaaggttgacaccagccttacttgacatgttttgaaaggatggataactgataataaaatttatttatgcttgtttcttcagatgtcagtctgtattttacataatcttgaactatggtaacatggctcgagaaagctcttttagatgttatttaaaccagctattacattttacacctgaggaaactgagacaaaagttgagtgccttgtgcaaaatcagcggcaaaattaggaattgaatccagatttccatgatttagtgctctgcatggtgcctttgtagaaacaatatactatttaaacttcctgaaaaagctgtttctgtggacagaaattgtaaagtatcatgagagacaactatagtaactcttttgctttcttcttatcctgcaacgaacttgataactggggtttagaagtaggcagggttagccaagagaacacaactactgggtgttgggaagtgcagggaggccattgaaagtgaagtgactctgtatggtgatagttttgaatgagttggtcatcctacagataccagccatttcctggtgaacactacatttaatacaattatgtcatatctttagtttttgcaataatgatgtcagacatgttcctatcagaggcatttgagccagagcgactccatcttgaatagggtctgggtaaaataaggctgagacctaccagggtgcattcctaggaggttaggcattcttagtcacaggatgagataggagatagtcagaagatacaggtcacaaagaccctacaacaggatgcagtaaagaagccagcaaaaactcaccaaaaccaagatggtgatgagagtgacttctggtcatcctcactgcttattatacactaattataatgtattagcatgctaaaatacactcccaccagtgccattgacagtttacaaatgccatggcaacgttcagaccttaccctatatagtctaaaaaggtgagagaccttcagttctgagatatcagaactgatttcttcctttcctggaaaactcatgattaatccaccccttgtttagcatacaatcaagaaataacaagatacttagttgagcagcccatacccgtgctctgtctttggaatcgtcatccttttgtttctttatttctctaataaacttgctttcactttatggacttgccttgaattctttcttgcatgatgtctaagaaccctcttggggtctagatcgggacccctttctgttaacattcccattttgtgctcagtctaacagtagcctaaaaggtaggtattattgacccccttttactgataagctgaatgattacaagatatccaactctgactttgtgtccaatgttcttgttttataccacccttaattgttgctaaatatagtagtatgtgactcttttcatagcaatggctatgaaagaatacaggattggaaatcaatgaggaccaatggtcagaatatcttgggccccactgagggccttttctgagttactgagcttccatttctcttttctttttattattattattattattattattgttattattaattattattttgagacagtgtcttgctctgtcgcccaggctggagtgcagtggcgcgatctcggctcattgcaacctccacctcctgggttgaagccattctcctgcctcagcctcccgagtagctgggtttacagacgcctgcctcacgcccagctaatttttttctatttttggtagagacggagtttcatcatgttggccaggctagtctttttttttttttttttttttgagacggagtctcgctctgtcacccaggctggagtgcagtggtgcgatccggctcacttgaagctccgcctcctgggttcatgccattctcctgcctcagcctctctagtagctgggactacaggcgcccgccaccacgcccagctaattttttgtatttttagtagagacggggtttcaccgtgttagccaggatggtctcgatctcctgacctcatgatctgcccgcctcagcctcccaaagtactgggattacaggcgtgagcaaccgtgcccggctggccatgctagtcttgaattcctgacgtcgtgatccccccacttcggcctcccaaagtgctgggattacaggcgtgagccaccgcccccagccccatttctcttttctattctggacatttgtttaatgaaataactcagtagcagagatactaatatgcatcctaccagtgttgttggataagtgtaaaagtgcttttaaattttaaagcattttaaaaatagaataaaagcactttgagccctctagagaatggtgtcatctgaggaaaaaaatgtttaaatcttaaatttttagacaggaaacaaatttacctatctaattttctcattttacagttgaattaaagcccagagatagtgtgacatgttcaagttcacacagttacatatcttgaactagatatgagatctctagataccttgttcagttccctttctagtatagcattcaactctgaggaattcctaaataatgatttttttttggggggggtctctttaggaattcctaaataataattttaaatgaaaacttttctttttttttaacttaagatctttgaatttggctggagttagtatttcatcatttgtattctattctacttaattactgattaagagtctaaatttacagcctctgaaaccagatatccttggggaacaacttatatcctttgttatgtatatcagattcctactggtcttcatttgggaaatgatagaacatatttgataaattgatgcttttgtcattttaaattggcccaatagttaagttggcgcctgagttaagttcaggagacagaggaagatgcagaatgtcaggattcaaagaggatcttagcattttactttttttccttttctatactggatcttgtgtccaaagtaaagtgaaatgtcctacttagacctagtggtagagcctaagatagaatttagaccttctgactcctaatttatgtatttttcactgagcaacactatttcaaaattcccctctgaatattgccttgttttcctaacatcagtgtctagtctggttttgggcatcgcttacagcttgggtttgcgccagggaagactaggaaatggagttggggaatatttgttgtagagctaatgagccctattctttggtctgcccagataggtcaggtttggtctaaaactattctgggactctggacatcactgtgccctacatgatgattctggaacccacttttgtgggttaagcctacattggaaaatttatgtgggcagtgggtggggtcgtggggtattttccttctaacactcgaaactttttgaggtatgtccaatagaatctgccaagccactcagaacattcatatggagactaaaatctggctaagattgaaactgtctttgttgagttggtttctttagagccttaaagttttcaaactcatttttacctgtgtttttaaaatacgaattgtaaattcacattactgcacaattttttttatgctgtgggatgtttttagagaggtaagtgagcttttaaactaaaattgtttcatttatggaatattttgaagaagtaaaacagaaatctttttatttatttatttatttatttatttatttatttatttatttatttttgagacacagttatactcttattgcccaggctggagtgcaatggcacaatatctgctcactgcaacctccgcctcccgggttcaagcaattatcctctctcagcctcctgagtagctggaattacaggcacatgccaccatgcccggctaatttttgtatttttagtagagatggggtttcatcgtattggtcaggctggcctcgaacttctgacctcaggtgattctcctgccttggcctcccaaagtgctcacaggcatgagctaccgtgccggccaggaatcttttatgtgcaacgttgtcagctgttaatgctcctatttatgaataggtcacctttgtttgaaaaaagcgtacaaggttttctaactccaaatctttccagccacaatattgctacgttaagcagaactgtcaaagataaaacttgaaccaaagtgattttctagactgtttgaatgttaaccctttcctgcaatattggttaacagtcacgtctccctacctcttcatacctccttggttttattttattatttttattttttgaggcacggtcttgccctgttgcccttgctggagtgtggtggtatgaacacagttcactgcaacgtcaacctctgggcttaagtgatcctaccacctcagcctcctgagcagctgggagtagtcccacttgtagtccctacagtcccacctgtagtcctgtagtcccacctttgtattttttgtagagatggggtttaaccatattgtccaggctggctttgaactcctgagctcaagtgatccacctgctttgacctcacaaagtgctgggcctcccaaaatgctgggattacaggcatgagccgctgtgcccagccacatccttggttttaaattgttatttaaaaaatactgttgctgggcacggtggcacatgcctataatctcagcactccgggaggccgaggtgggaggatcactttgaggccgggagttcatggccagcctgggcaatatgataaaaccccgtctctacaaaaaatacgaaaatttgcagggtatgatggtattgtgcctgtagtcccagctacttcagaagctgagtcaggaggatcccttgatcctgtaatgaaatatactatttttttttttttgagatggagttttgctcttgctgcccaggctggagtgcagtggcgccatcttggctcaccgcaacctccacttcccaggttcaagcaattcacctgacacagcctccctagtagctgggattacaagcgtgtgccaccacacctggctgattttgcatttttagtagagatggggtttctccatgttggtcaggctggtctcgaacccagcctcagcttacccacccacctcggcctcccaaagtgctgggattataggcacaagccaccacgcctggccatgaaatatactactaataaaataaaatactgtgataaaacataaataaacatttttattttttactttttacttttttagctggcattctggtctgagattattttattttatttttattttattcgagacagagtctcgctctgtcacccaggctggagtgcagtggcacaatctcagctcaccgcaacctccgcctcccggattcaagcaattctccctgcctcagcctcccgagtagctgggattacaggtgcccaccaccacgccctgccaatttttgtatttttagtagagacggggtttcacaatgttggcaaggctggtcttgaactcctgacctcaggtgatccacccaccttggcctcccaaaatgctgggactacaggtgtgagccactgtgcccggcagagatttttattttttaaatggcaaagctaggttatgaacaggatgaccatatgttccagtttgcccaggacaattctggatcatgcctgttatcctgacattattatttattattattttttcttttgtagacacagggtcttgctctgctgcccagctggagtgcagtagtgcaatcatggctcactgtaaccttgaaatcctgggctcaagtgatcctcccacctcagccctccagagaggctgggactataaacacacaccaccatgcctggctatattttgtgtgtgtgtgtgtgtgtgtgtgtgtgtgtgtgtgtgtcaggggggtgggtaaagatggggtcttgccatgttgcccaggctggtcttgaacctcctggcctcaaactcttggtcaagtgatcctcccgcctcagccacctaaagtgctgggattataggcatgagccattgtccccggctatcctgacacaattattaatagacacataaatgtgtctcatttactctcaaaagtgtcccatttggataataaattatctggtcacctacatatgcattacaatcattttgttgtactaggttttgtttgttgaaatgttatttgaactaggaccataagataatggaattttggcctattttgggtacatttggatgtttttcattggtcagacatttttattgtatggagagttctgagtgtacaaatgtatattaaatagtaatgcacatgatttgaaattagggattatttgttatcttacttttgggaggttacataaccttgaggaacctcttgtttcctcatccgttaaaaagagataatagcgatacctatcctacatgggtgttttgaagatattaaagaggtgacataccaaaaaatgcattttaagttgaaaattgttatataagtgttagtcatgtcacacatgtgcctttctgcaattgaatttaaaatgaataattttacctagtttggggaacttactatttgatagagcactggtagtgttttgctgtaaaggagagcagggaaataatggtagttggaagtacatgctgggctaaggttttctgcggggaggttttgaaattttcacatttgtgtgctgaaaagagtggtccaatagaaagcagaaaaaatagatgatgcttgacagaaggaagaaatcaatgttgagtaggaaagaaggatagaatctagaatacatatggaaggattggctttacgtaaccaagaaacacatttccctagtctgttcactttaaaaaaaaatgccaacaatataatttttttttttttttgaagcagagtcgtcggccggcgcggtggctcacgcctgtaatcccagcactttgggaggccgaggcgggtagatcacgaggtcaggagatcgagactatcctggctaacacagtgaaaccccgtctctactaaaaatacaaaaaaaaaattagccaggcgtggtagcgggcgcctgtagtcccagnnnnnnnnnnnnnnnnnnnnnnnnnnnnnnnnnnnnnnnnnnnnnnnnnnnnnnnnnnnnnnnnnnnnnnnnnnnnnnnnnnnnnnnnnnnnnnnnnnnnnnnnnnnnnnnnnnnnnnnnnnnnnnnnnnnnnnnnnnnnnnnnnnnnnnnnnnnnnnnnnnnnnnnnnnnnnnnnnnnnnnnnnnnnnnnnnnntgcaacctacctctcctggggtcaagggattcttctgcctcagccccctgattagctgggattacaggtgcgccccaccgtgccaggctaatttttgtatatttttgtagagatggagtttcaccatgtcggccaggctgctctggaactcctgacctcaagtgatctgcctacctcggcctcccaaagtgctgggattacaggcgttagccactgtgcctggctctctcagtataatttacctaaagtcaaatcagccttccctttccttcccttcccttcccttcccttcctttcccttccccttccgcctttcccctttcccttctcccttctcccctttcccttctcctttcctttccacagggtcttactttgtcgcccgggcttgagtgcaatggggcaaacacgtctcactgcaaccttgacctccccagcccaagccatctacttgcctcagtcccccaagtagctggggctacaggtgtgcaccaccacgcctggctattttttttgtattttttgtaacaatgccgggggagtggggtgggggtggggtcttgctatgttgcccagggtggtcttgaactcctgagcccaagtgatccacccacctcggccttccaaagtgctgggattacaggtgtgagccactgtgcctgatccagcctctttttaattaattctgtcccccttctcacccaggcaaccacttttggacttcttttactatagatgttagttctgcctgttctagaacttcacataaatggaatcatacagcaaggagtattttgtgtctgattacttttgttcaatataatattttttagattcacccattttggtgtgtgtatcagtagtttttcccttttattgtgaagtaatattccattatatgtatgtagcaacaagtcttctattgatgggctttgggttatttccagtttttggttactatgagtaaagttgctatgaacatttttgtatatatctttatgtggacttgggtaaatatctaggagtgaaattgctgtgtactagggtagatttatgtttaactttagaaaccactaaacttttccaaaatggaaaatttaacactttttacattcccaccagttttttttttatgagagttcagttttccacattcttcacaatgtttggcattttaaaatttaggcattctcctgagtgtgtacttgtatttcatcatggtttttgtttatatttccttgatggctaatatgtgattattggccatttgcttatcttttattttgaagtgtcaattcatttctgaaatattatcactgaataatatttcattgtatagatatgccacaatttatccatttatcacttgatagatatttggattattttcacttttgggctattatgaacaatggtgctataaacatttatgtacaagtttttattaaacttttatgtgcaaccctattttattgggttgtctttttgttgctgatttgtaggagttctctttatatctgaatgcaggttatttgccaggtttctcagattttacacgcacatacacacacacacacactctttctctctctctctctaaatattttctcctggtctgagctatgttgttgcattttcttaatgccttttgagagcagaacttttaagttttgagcaagttgaatttgttgatttattttattttatggtattaccttttctgttctaagaagtctttccttactctctgctaggcttgtgaaactattctctcatggtttttttctagaagctttatgtttttgtcttttgtatttaggcctatgatctatcttaaactactcttttgctatcatgtaagggtttctcaaaaggattttcaattaattgattagatagctgtgggtcttttcttggatttgttctattctgttgatttatttgtatcttcttatgtcaatgccacactgtcttaattattgtagctttataagattggtattgttactttaaattttgatagaattaatcagtgcagccgtgtgggcctggagtgtttttgtgggaaaaagcagaaggttttaaattagtgtaattacttttacaggtttaattactttagctgatatataagcattcaggttcttcactttttcctgtggcagttttaagaagttgaatttttaaatgaatttattctcaattgttgagttgttataaagttcataaaatttcctaatattctgttattgcctgtatgaactgctgtatgtctccatttgcattcttgatgttggtacttcttttgaatttttggatcagttttgctaggggtttagcaattaatcttttcaaaaacccagattttgttttgttgaatttctattttggacatgtatttttaatttttttttttttttttttttttgagacggggtcttgctttgtcacccaggctggagtgcagtggcgcgatcttggctcactgcaagctccgcctcccgggttcacaccattctcctgcctcagcctcccgagtagcagggactaccggcacccgccaccacacccggctaattttttttgtgtgtttttagcagagacggggtttcaccgtgttagccaggatggtctccatctcctgacctcgtgacctgcctgcctcggcctctcaaagtgctggtattaggggcatgagccactgcgcccggccaccttgctctcctcttgtggatttgatttgctctcttttttctaccttttttgagttagaagtttagattattgtttttaaacctttcttgttttctaatgtgcatttcatttcattcattcattcatacattcattcagagacggagtcttgctctgttgcccaggctggagtgcagtggtacgatcttcgtttactgcaaccttcgcctcccaggttcaagcgattcttctgcctcaggctcccgagtagctgggactataggcgtgcaccaccacgccaggctgatttttgtatttttagtagagacggggttttaccatgttggccaggctggtctctaactcctgacctcgtgatccgcccaccttggccccccaaagtgccaccgctcccagccacatttctttcattattattattttttctttgctaacccctagtagtcattctaatgtacatttcttatataattaacattttcttctaagtactcctttagctgcagcatacaatttcgatgtgttcaattcaaatttctatttccattgtgatttttctggtccacaggtcatttagaagtttattgtttcttaatatttggggattttttagctattttcaattttacatggtgttcagggaatgcgttgttgacatattgtgtacatatctgtaccatatatctgtaaatgataagttgtttatcattttaatcctttgatagctactgagattagttttaaggcctaccctgtggtggtctgttttggtgaatgttacctgtgtctctaattccgctctgcaatattttgaggttttcagtgtagatattttatgtatcttttattaaatacggtgtatactgcagttattgaatttagtgttctataatttatcaattaggtcagatagttttatgtgtttgttactatataactgagatataattcagctactgtaaaatgcaccacttaaaaattgcacagctcagtagttttcagtatattcacaaggttgtacagccatcggcactatttaattccagaacgtttttgtcccccaaaatgaaaacccatacccgttagcagttactcttcatgtctccctaacctctaacccctggcaaccactaatctaccttgtccctacaaatttgcctattctgaacatttcctaagtggaatcatataatatttggccttttgtagctggcttttttttttaactaagtatgttttcaaagttcatacatgttgtagcgtgtatcagtatttcattctttcttatgactgaaataatatttcattgtatagatatgccccaatttatccatttatcacttgagagatatatgggttattttcacttttgggctgctatgaataatggtgctataaacattcatctacaagtttttgtggtgttctatttttctatttcccctaagggtagaattgctggggcatgtggtaattttatgtttactttttgagcaactgccaaactattttccaaagtggctgaatcactttataatttgcaacagcaatgtatgaagattccagtttctccacattcttgtcaatacttgttactgttctagtcttcgctgagaggctctgtgtgcttgttggagcacactttcagcactcaaccaggctttcagttcatccatagccttgacttcctgttttgccgagcttcatgctcagtcagtggtgattgcttagggccttctcaggtctttcttgagtatgcccataggcctgggcacactgttttcatcttccagggtcttaggaatttcagaacttttcaaaactccctatggacatctcattctcctacttttccttttgtgttttttggttagcttgtttgccccagctgcttcagggagctgaaatgttaagcaattgtagctgattgtttttgacaaataaataccttgggggaaaagcctgttagcaatgggcaagctctgaatcaggttaaatattaggaagtcttgggagtggggtttttcagggaattgctagtcagctcaaataataactgtactctgaaaatgggactttgaaggaactctagccctgttctgtcacctccactggctgctaggctccaggattccacagattgtggtttgctgcttttcagggctagcctggagctgggaagaggggcatgggaataaggcatgttaaaatgccacaaagcttgctattcttactgagatgcagccatctttttttgaataaatgctccttggattgttgcaaactttttggttaatattcagagttctgaaaaaggctatttttgactttttttttttttttttgagatgcagtcttgcattgtcgcccaggctgaagtgcaatggtgtaattttggctcactgcaacctctgcctcccaggttcaaacgattcccctgcttcagcctctggagtatctgggattataggcacctgccaccatgcccagctaatttttgtatttttagtagcgacggggtttcaccaggttggccaggctggtctcgaactcctgaccttgtgatctgcccgccttggccttccaaagtgctgggattacaggtgtgagccactatgcccggcccaagtcttgacatttttttgccagtgttcttgttggttttatggaagagaggatttttggaggtccttactctgccattcccaatgatgtcacccaatttgttttttaagcattaaaaaaaattattttaaaatataaagacagggtctcactatgtcaattaaaaagacagggtctcgcccaggctggtctcgaactcttgggctcaagtgattgtcctgccttggcctcccaaagtgctgagactacaggtgtgagccaccacacctggcctaaacatttttaatatatctgtttttatatcctgttcctcccttttcttttgaaatacaactcacagaaattgcaaaaatagtacagaaagttcctgtgcaccattcactcaacttcccccaatgatatatcttttataactatagtgtgttaccaaaaccaggaagctgatttcggtgttatacaatagtattaaattaactatagacgttattagaatttcacgggtttttgtatatactgtttttaattgaggaggtggtggtgtatagttctataaagttttatcatgtccagattcatgtagctattaccacattcagggtattaaactattctgttaccacaaagaaatttcttcatattatttctttatggttatgcttttctctgaaccctaacccctggcaactactgatctgatttccatcactgtaattttgtaacttcgagagtgttatataaatggaatcatatagtaggtaacccgtagatacggcttttttctcacttagcacaatgcctttgagatccgtttaagttgttgtgtgtgtcatagttcattcctttttattgtttctcttttatgggtgtaccatagtttgtttacctatttacttgttgaaggacatttattatgtttccagatttttaccatttttttttctttttctttcttttatttgttttttttgagacagagtcttgctctgtcacccaggctggagtgcagtgccgcgatcttggctcaccacaacctccgcctcccgggttcaagtgatttttctgcctcagcctcctgagtagctgggattacaggcgcacactaccacacccagctaatttttctgtttttagtagaagcaagttttcactatgttggtcaggctagtctcgaactcctgaccttgtgatccgcccgcctcggcctcccaaagtgctgggattacaggcgtgagccactgcacctggcccattttttttttttttcaaacagatatggttttgctctctctgtcactcaggccagagtgtattggcatgatcattgcacactacagtcctcctgggcttaaagaattctcccacctcagcttcctgaggaactaggagtagagacatgcacaactgcacccagctagtaattttaatttttgtagagatgaggtcttactatgttgcccaggctggtcttgagctctggcctcaagtgatcctcctacctcagcctcccaaagtgctgggattacaggtgtgagccaccatggctggcctagtgttttacaaataaatctgttaggaacatttgtgtacagatttctctgtgtacttaagtttttcttcctctgggataaatgctgtgtagtgtgattctttaatttttggtgtgtctgcctgttttactaattactgaaagaagggtgctaaactaagattatgtatttgcctatttcttttgtttctaagtttttaaaaaagtattttgaagccattttatttggtgtgtacatattttgtattgttacctttagcatttcttttcttgatgatttgacctattttcatgaaatccctttgtatctggtgatactctgtattttaaagcttaccttgtctgtgtcttaatatagccactgtatagtgtctatatagtgtcttaatatagccactgtaatttatgattagtgttttctttttttttcttttttttattatactttaagttttaaggtacatgtgcacaacatgcaggtttgttacatatgtatacatgtgccatgttggtgtgctgcacccattaactcgtcatttaacattaggtatatctcctaatgctatccctccctcctcccgcctccccccaccccagtgtgattagtgttttcatggtgtgtctttttgctaactttttattttcaaaacttctttgtctttataaaagtgtatcttgtgctaggcatgctggctcatgcctgtaatcctagaacctagggaggctgaggcagaagtatagcttgagcccaagagtttgagatgagcctgggcaacagagggagacccagtctctattaaaaagaaaaaaattaactgggtatggtggctatagtcccaacttattgggaggctgaggtgggagagcttgggaggttgagcctgcagtgagctgtgattgcaccactgccctccagcctgggcaacagaacaggagcctgtctcaaaaaaagaaagaaacaaaagatcagaacctataatcacagaatcactgaaaacccatggaattatcatatgctagccattgggaatacaaatgtaaatgagatttcaaaaaaatctttaccctttgttgtctaggtggttaagatcagttgattgagataaagttcaaagcaacccctaaaatcaactaaaaagttcatcaaaggacttttagaactgagcaggagggaatgaataaatctttgggagggagggatgcagtgccttgatatacagtaccaggagccattttctacattgttaacagcactcttgagtgatgttggtggcagcttgtatatcttatgtggaagcccttgggtaggagtcgatcaggaaaaacttcccaagacaggtagcatacagggaattttaaaaagatgaatgggagtttgccaggcaaaggaagcaggagaagaactttacaagcagagtcttattcaaagaacagtaaggcattatgattaaaatagtttgtatatattagaatggtgagaggtaaggttaaagaattactgaattttgattatcttagtgtgcacatttcttcccattttaacaactctgaaattggcatacatcttacaactgattgtgttttgcatcaccattggaaattgggattattttatgaataatggcatcttagatatgatgaaatatggtaagtttgagtagattcaatgtcctttaagttatgcttttggattttatcctattaataatcagaagctaggtagattttaagtagaaaaatattatgtctagaattgtttaaaataatatgattttggtgatattgtgcaggatttattgtggctaaaacaattgctaacaatgtagaaattcaggcaatgtctgcagagggcctagtgctagtgggtgtattgtgggaaatccaggtacaggaagcgtttgataaaaccaagatgatgtcgttactagtaagatggggctagttgacgtagagagaagagtcatataaagctgaggtttctggatttaaagagaagatgactggtgtaacagttaaaggcagtcattgttagtgtttattctggcatcataattaaatgtttctattactgagagggctaatcaacattcaaacattaatatatcaatagccaagaaaagattttctcaggaactcttactgtaaaatatatgtcagtataaaatttgttgactgtccaataaaataataattatagtgtaggtttatgttggctgcaagcctaaattatgagacatttataaaattactgaccgctcccccccccaaaaaaaaaagattgttcagaatctctcatcctagcatccattccaagaaaaagatattgctaacatttggaataaaaagtaatcccagtacgggttagtcatagtttttggctatagactaaacctcatcttgttcacattctagtagaacaagataaaaacaaatgcttattcatatagtatgttcatcatttaagaaggtcatagtatttactggcctggacactagtttatatgtgtttgtatttaagaaactagccattataatctcaattatgtgcagtgaaggagagagaaacgtgacatgagcaaagttttatttgcttttgaaaataattgtatcttttttacttaacttactatttcaagatatcttttatatgctactttatttaattaatttgtttttaagacagggtcttattctgtcacccagggctggagtgcaatggtgcaattacagcttactgcaacctcgaccttccaggcttaagcgatcctcccacctcagcctccctggtagctgggattatgggtgtgcaccaccatgcctggctcaattttttatatttttctttttctttctttctttctttctttctttttcttttctttcttttttttttttttttttttgaggtagtagcatactcatggctcactgtagcctcaacctcctgggctcaaggattcttccacctcagcttccctagtaactggggctataggcacatgccaccacacgcggctaatttttgtattttttgtagagatggagtctcgccatgttgcccaggctggtcttgaactcctgtgcagaggcaatgcgcccgcctcagcctcccaaagtgctgagattacaggtgtgagccactgtgcccagccaattttttgtagagatggagttttggcatgttgccctggctggccttgannnnnnnnnnnnnnnnnnnnnnnnnnnnnnnnnnnnnnnnnnnnnnnnnnnnnnnnnnnnnnnnnnnnnnnnnnnnnnnnnnnnnnnnnnnnnnnnnnnnnnnnnnnnnnnnnnnnnnnnnnnnnnnnnnnnnnnnnnnnnnnnnnnnnnnnnnnnnnnnnnnnnnnnnnnnnnnnnnnnnnnnnnnnnnnnnngtagcaggttcacttcaggccagagctcaagtccagcctgggcaacatagtaagtcctcatctctacaaaaattaaaattactagctgggtgcagttgtgcatgtctctactcctagttcctcaggaagctgaggtgggagaattctttaagcccaggaggactgtagtgtgcaatgatcatgccaatacactttggccccaccgacagagagaacaaaaccatatctgtttgaaaaaaaaaaaaaatgggctgggtgcggtggctcacacctgtaatcccagcactttgggaggccaaggagggcagatcacgaggtcaagagatggagaccatcctggccaacatggtaaaaccccatctctactaaaaatacagaaattagctgggcatagtggtgcgtgcctgtaatcccagctacttgggaggctgaggcaggagaatcgcttgaacctgggaggcggagtttgcagtgaaccgagattgcgctactgcattccagcctggtgacagagcgagattctgtctcaaaaaaaagaaaatgagcactaataatcttttctatattacagttttataataaaaatgcattacatattaaacagattcacaaagtgaactaatgacaatttacgtctgtccctatactttcagttgtaagtaactaaaaaccagcctcaaatggaaataaacaaaactaccgacatatgtaattgaaaagtccagatacctgggtgatgaaataacctgtacaacaaacccccatgacacaagtttacctatgtaacagacctgcacttgtacccctttacttaaaaaagcaaaacaaaacaacagaaaagttcagatggagtataggtttcaggtaaagctttattaggtggtccaacaacttcattaatgacctggtttctttcagttttcgcactctgctttctgtggtgttaaatttatcccaaggcagccacattgaagccattaggtttttaaggcttctagcaccttcttcatttatatctattagggaaaaatatgttctgtatctgagcatcatagaaaaaaatcttgggttcattctgattttcctggcttaggttacatgccagtctctgaactgattactaaggctagagaaatatattgtgctgattggcttaggtttgccccagggatcaattccacccaaattccattcttgagtgaggaaatttggggtaaaagagggaggatagcaaggaaaagatgacagacacacaattccagtttattataagaatgacttcaaatgaccttaactgaattgtaatattatttgggaacaagtcaaacattattaacatttaggcccagagatggtagatggcttgcttaagtctcccagcaagctacctcaagaactgagacttgggctgggcgtggtagctcacacctgtaatcccagcactttgggaggcccaaggcgggtggatcatttgaagccaggggttcgaaaccagcctggccaacatggtgaaaccccatttctactacaaatataaaaattagccaggcgtggtggtgggcacctgtaatcccagctactcagcaggctgaggaaggaattgcttgagcccatgaggcagaggttgcagtgagcagagatcatgccattgcactccagcctgggtgacagagagagactccgtctaaaaaaaaaaaaaagaaaaaaaaaaagaactgagactcagaagtgaattatttgactcttgaattgtacttcattcttagaatcaattattggcctctctgtaagactgtctttactgagtttttaaacggagtataataaactcttttgggaatgcggtagatgttcaaaggtttgacttcttaaaaagaggtgtaacaattatattccttaaaactgagaggggaccaattgagggtagagggattgatgtgggggcaggaggatacttttttgttgttattgtgatgaaaatgttccatagttttgtggttatatgactgtatacattgaactggatgcttacaaacggtgataaaaagggtgaaggaaaataaaaaaccaagtagcccaataacactgctcatccttgtttttttgttttgttttgttttttaaataacaagttctaggagtttttgtttgaataagaatatataaatcaggcagagtagtcccagtgaaatcatggttagattttactgtatttgtctgttgatccttcaccttctaagcacttaaaatacttttttattagacttgctttgatcacatatgcaatttaagtgtgaataagtaagtgtattatctttccctcctccactcagctttctttaaatagaaaagggacaaatatctctttattgcatattcagccatagttgctcaatctatggtgttaataagagactgtaattttatcttctaaaaatcattacagattataattataggctgtacctcattctcttaaagaaatattggcatgttagtccattgatattactgatagttgccaaatggtgagaatggtaactggtttggaggcaactgaaagggagggggaatcatcagtaaactggagaccaataaaaaattacacagaaacaaatctttttggataaactagatgaatgtctcttattgagactgatccaacagtattcactggcccatttcttgctgctagatgagcttctgtttaaggcatcacttgtggtggagttctttcttttatttggattggaaccatactgtgatctcttatggaaaacagacttcctccaagtctgttaaatataatttaaaattatatcgtttcttgttgatttgtttgtttttgttttgctttatttcatgttataggcatctgaaatgaatccttatatatataacatacaagtatatgtatgagaagacatgaatataagaagtataggaaacataagacatgaataaaagttttagctagacatttttagatgaaaagatgtgcatttaaatttgtaaaagttacaaatcgttctataaaaagttagcatatatttaaattttttggatacataataagagaattatatcacttctgatatccattgtgaagaccctaccacagtcatttttttgtgaagggtagatagggctcttgcttgtactcttccaggatgtgccacgggctccctaataacattcaggggagtgcatgtgcaggtttgttacatgggtatatcatatgatactgaagtttgggtttgtaatgatccccatcgtctaagtagtgaacatagtaaccaataggtagtttttgagcccttgctttcctgtctccctccctgattttggaatctccagtgtcttttgtcccgacatctttgtgtctctgcgtacccagtgtttagcttccacttataagtgaaaacatgtgatatttggctttctgtttctatgttaattcacttaggataattcagctgcatccatattgctgtaaaggacatgatttcgttctttttttatggctgcatagtattccatggtgtatatgtattgaattttctttatccattctaccattgatgggcacctaagttgattccatgtctttgctattgtgaagagtgctgtaataaacatatccctttttggtagaatgattcattttttttcattttttttattttttaggcagagtctcgctctgtcgcccaggctggagcgcagtggcacgatctcgactcactgcaacctccacctcctgggttcaagtgattctcctgcatcagcctcctgagtagctgggactacaggtgctcgccactacacctggctaattttgtattttttatacagatggggtttcaccttgttggtcaggatggtcttgatctgctgacctcatgatccacccacctcggcctcccaaagtgctgggattacaggtgtgaaccaccgtgcccagcctagaatgattcatttttctttgggtatatacccataatgagattgctgggtcggatggtaattatattttaagttttttgagagatctttaaacttcttttcacaggggctaacctaatttgcattcccatcagcagtttataagtattaccttttctctgcaaccttgacaccatctgtttttttttttttttttttttgactctttagtaatagttattctgggctgggcacagtggctcacacctgtaatcccagcattttgggaggctaaggcaggtggatgtgctgaggtcaggagttcgagaccagcctggccaacatggtgaaaccccatctctactaaaaatacaaaaattagccaggcatggtggcaggcacctttaatcccagctactcaggaggctgaggcaggagaatcacttgaacctgggaggtggaggttgcagtgagctgagattgcaccattgcactccggcctgggcgacaagagcgaaactccgtgtccaaaaaaaaaaaaaaaaaataggtattctcattggtgtgagatggtgtctcattgtagttttgatttgcatctttctctgataatcatctttttttctaaatgtctttatgctacctctaaaatgttctacgtataataggcaaatcaaatgtttaataaactggtgtgttaggtttattttcaggttgaaatgaagatagttatttttattttgtgtaccttttacatatcaacttacttttagaagtatttctaacttgtgttttgtgtttttttagagaaaatattctctttggaatgggaaatcctctgcttgacatctctgctgtagtggacaaagatttccttgataagtaagtattaaactcttcatatgcactatgtggaacttacatttgaagaagaatggatgaaaactttagaagtgaatttaccaccgaatgtcttcaattaaaggaaaactcaggaaatttaagtttggtgatagcaagtgtgctatcattaactattgaataactgagtacagttttccttgggaaaacttatatacattgctatttttacttaaaacttttttgcttattatttggaaggagaaaagtttatataatttacctaattatttaattccccaacttttaaactactgtcagtgagctacgtctataatggtatcataatctacagacattctaccccgaatgtgcccagtctggtttcctctcagaagctataatgggagaagaaagatgattagagaagacaagagaacgtgcaggatataattcagaggatatgaagctctgctgtttccgctttattagtaacttccaatgtttcaacttagctgagaaatcagtttgtttatttacctaagtatttgaggccatttcgtacaatagtccccacttgtgtccttgttttcagtttctgaggtctcagttacccataggacagtgtaataagacattttgagagagagacatgcaccacgtccacataacttttattacagtatattttaatagttgttctatttttagttagttgttgttaatctcttattgtgcctaatttataaatgaaactttatcatagtatgatgtgtaggtatgtatgtgtaggaaaaacagtgtgtgtgtgtttgtgtgtgtgtgtatatgtatgtatgtatgtatgtatgtatgctatctatctatctatctatctatctatctatctatctatctatctatctatatatggttcagtactatccatggtttcagatacccactggtcatcttacaatgcatctacctcggataacgggggcactactatatggcaaatttaagtagtaaaaaagattaatgatgagaaagcaagatcccccctctcctcacacaccctgatttctgtacccaagagtaattactttttaaaaaattgaggcaaaatttatatcgcataaaattgatcgttttaaccattataaagtatacaattcagtgactgccagtatattcacaaagttgtacaaccatcaccactatctaattcaggacattttcatcaccccaaaatgaaatcccatacccagtaagtagtcattcgctattccctcctctaacccagtctcctgggaactactagtatacttagtttttctatgaatttgtctattctgagcattttatagaaatggaatcatataataatatatgatcttttgtgtttatatatatgaccttttgtgtttgggcttattttacttatgtaatgctttcaaggttcatccatgttgtagcatgtatcagtccttcattccttttaatagtggactattccattgtgtggatagaccacattttgtttatccattcattggttgatggacacttatgttgtttttattttttgtctattaggaacaatgcttcttatgaatattcatgtataagcttttgtgtaggaatgtgttttcatttctcttgggtatacacataggagtggaactgctgggtcacatggtaattctgtgtttaacttctagagaaaccaccaaactgttttccaaagcagctgcactgttttgcattcctaccggcagtgcataagtgttccagtttctctacgtctttgccaaagcttattttttattttttaaattatagccatatgagtgggtgtgaaatgatgtctcattgtgattttgatttgcatttttctattgaaaacttttgatgttagcatcttttcatatgcttattggatatttgtatatctttgggaaaatgttgaagctctttgcccattttttaattgggtcgttgtctttttgttaagttgtaaaagttctttttatattctggatactagaccctatcagctagcatatgatttgcaaacattttctcccattctggggatttactttaattttttgatagtatcctttgatgcacaaaagttttaaattttgatgatgtccattttatttttcttttgttgcttatgcttttgctgtcatatgtaagaatctattgttaaatccaggatcacaaagatttgtgcctgtgttttcttctaagagttttgtagtttaaggtcttagatttaggcatttgatcaattttgagttaatttttgtataaggtatgaaataagggttcaactttattcttttgtgtgtggaaatccaattgtctcaacatcatttgttgaagagactattcttttccccactgaatgatcttgatactcttgacaaaatcaggtgaccatagatatatgggtaaatttctggactccattctattccattgatacatatgtctgtccttatgccagtatgacattggtgtttttgtgtatgtgtgttttgttttttgttttttttttggagacagggtcttgctctgtcacccaggatggggtgcagtgatgcaatcatagctcactgaaaccttgaactcctgggttcaagtgatccttctatttcagcctcccaagtaactgagactatatgcaggtaccaccatccctagctattttaaatttttttttgtataaacagggtctccttatgatgcccaggctggtctcaaactcaagtctggcttgatcctaggcccaagttgtcttcccaccttggcctcccaaagtgctgggattataggcattagccaccatacctggcctgtacgacactgttttgattactgtagctttgtagtaaattttgaagtcaggaagtgtcagtcctccaactttgtttttcaagattattattattattattattaatttttaatttgagatccctcacaattccatatgaatttttggggatagctttttcatttctgtaaaaaaggcagttggaattttgattggaattacattgaatgtatagataaatacatgattaagtcttccgagttatgaagacagaatgtctttccatttatttaggtcttttttttttttttttttttttggagacagaatcttgctctgttgtccaggctggagtgcagtggcatgatctcagctcactgcaatctccatttcccgggttgaagcgattctactgcctcagcctcctgagtagctgggattacaggtgtgtgccatcatgcctggctaatttttgtatttttagtagagacagggtttcaccatgttggtcaggcttgtctcaaactcctgaccttgtgatccacccgtcttggcctcccaaagttatgggattataggtgtaagccactgtgcctagccttaggtctttttaaaataattttagcagtgtttagtaggttttcagtgcataagtcttatacttctttggttaaatttaattttattatttttgatgccattgtaaattgggattgttttattttcttattgttcattgatagtatgtagaaatataagtaattatgggggacaataatttttttgaaacttttttttatatcctggggattacccctgtaagtatatttggctaaactcaaatgtcaaagggtaaggcaagaatttataaatgtgtaaatttgacttacggtaatataataggaaatgtgctgggggtctaggataaactgggagatgtgttttatcctaagacattcagatagaaactttaaaacacactttcccagtcagaaaatactactatatacagttactttaatgattttagttcttttggttaccttgtacttttaaataatatactatacttacatttcttaaaatttctttttctgtcaaatttcaggctgggcgtggtggctcacgcctgtaattccagcacttttggaggctgaggcaggtgaatcacttgaggtcaggagttcaagtcatgccaacatggcaaaaccctgtgtctactaaaaataccaaaaattagccaggtgtgatggcacgcacctgtagtcccagttactcgggtggctgaggcaggagaattgcttgaacccgggaggcagaggttgcagtgagctgaaattgcaccattgcactccaacctgggtgacagagttgacactctgtctcaaaaaaaaaaaaaaaaaaaaaaaaaaaattaaaccaagccaaaccacaccaaaacaaaaaaacccaaatttcaatggaatccattgacttctcattatggagaacgagattactggtgcccctattctttcctatgctacttcttctatctttctattctattaactgtgtttttaaggttgatgttttcattctgttatctatctataattgttttcccaactttgaatacaaattcataatgaaagttgaaaatgacttacccacattatcactctgtgtatcatttattgcagaattaagtagtgtaccaggaatgtagagcaggttaacatttgaaatgtaattagaagactgggcgtggtggctcacgcctgtaatcccagcactttgggaggctgaggtggatggatcacttgaggtcaggagtttgagaccagcctggccaatagggcaaaattccgtctctattaaaaatacaaaaattaactgggcatggtggtgtgtgcctgtaatcccagatactcgggaggctgaggcaggagaatcgggtgaacctgggaggcggaggttgcagtaagctgagattgcaccactgcactccagccagtgtgacagcctgagaatctgtctcaaaaaaaaaaaaaaaaaaaagaaatgtaattagagtaattcactatagtaagaaactaacataacagtctaagaaaactccatataattatctcaatagacaaagaaaaaccttttgacaaaatctaatatctattcctgatgaaaaaaaataacttaaagcaacctaggtaactatgtcgataactttcttaaccctataaaggttacgttaggggaaaactggtagtgtgatgcttatatgggtatataacgtatcaaattgtatactttaaatgtctacagtttattgtatgtcagttatatatcaaaggctgtaataaacagaaaataaaatcagttggacatgaattcatgggtttaaaattagatctcttttgtttgtgtagtgtgagatattttgttcaggaagtcaactaattcatggtcactattttaaaaaaatcatgatgtataaaagtaaagagcaacttaaaaatttgaaattttatcgtgtatttcaaaagtaaaataaagtatagagacaaacccataaatgtagaacattttatatgggaagcaagaattgaaatttgggatatacacacagaccaggtggtctttgctatgtctgaagaagaaagataagattggaagttttataaaaaggtgaaatgttttgtattgttttgaaagaaagctcattggcactagttttggggaggtggcaagctttgattggtgagtgactgcagtgagtagaactagtcttttagagtcacagctcattgtttcagtagctactggataaaactgttttcagatgacaacaggcagtttcagcagccaggcttgcagagaattaccttcttggagcaatgttatgtgtgctgagtgctcttccccccagcctgtcacctgttttagtcagatatgacaagaatgacccaatttatatgattagctttcacacatatataatcagtgttgttattttggtgaacatgcctccagatgtttgttaggcatatataacctgaagatgaatgtttatgggctaatactatgtgtagtctttgttagtatgctgtttttcactcaacattatgtttttggatcactgtttttaaaatttcaggcaaatgtgatcagagtgattatgacttggcagctgtgtgatgatgtcacaggatccttagggtgtcgcttttccagccagaagccactgtggttggtggagcctttgcctgaggtttgcttgtgcctgccaggcttgttctgcttgtttggcctggcaggctgcgttcggctcatgctaccagcctggatcccacacctgccaagggcgagccaggtgcagagtggcgtggcaaagagtgtgtgagcaagcgaatatgggatctggccactgtgtacagccactcatgctggctgctgtggtggggtgggcatctccaggcactggcacaggtgctggcttcatgcaagcttgcggctggatctgatgcatctcaagtggcttccactgtaggaacccacgtctggacgaggataatatggtggtgcccagaagcttggagacaccagaaaccacagagccccaaagagagtgtcacagccctggattgggaaccccctaggtctgggctctcagaagggctgcagctcttctttccttcttgttgcctgcaaggtgctgagtggggtgaggcatattttagctctgtttgtgttacagctgtttcagtcctgccacttggtgggtcttcttatcctgcatccatgaacagtgaggtatggggacaactggagggtgagcaaggtggagaggagcttcattgagcaacagaacagctctcaggagacccgaagtgggtagctcctttctgcaggcaggtcgtcctgacaagtgttcacctctcagtgagatgagaccccgagggggtaactcctttccacagttggtagtcccaggtctcttctgtaagtctggctgagtccagggtttttaatgggcttcacaagggagaagtgtgtgctgattggtccatgggcggctatgggtgggtctggaaaaagcaccatgagtctcactcccctcagtggaccccacctggaactgatagcctggcccccatgcttcaggctgtccctggcttgaaggcagggcttcacctgaacccaccccttttttcccaggagagtgtctgcctcctgctgccatcaatcatgttgtccacagtgtgcaggctgttggtgatgagggtacttgctggccccattgagctgccctcagtcccaccttggcctccttcccatgcttctctgcacctaaagtccagagggggctgagggggcagggggctggtatgtcagtgctgccccgagcacatgcacacctgctgggttgtgacagtgcctgggcttggccacgactttgctccaccctggagcaggtgctgggatcgaggagaggccaggcatgggaacaggcacttctgagtctgcaggggaaagggggacttcccgggccccagagagtgcagggatacctgggtccacagccatggctgggtggctgcagctgcactcaggagggtggggctccagccctgccaacttggaagtgggtgtggctcccacctgttcccagctcccatgggctctgtggagcatgcagccctggctgcatctccccaattgtagccagtgtctttgcagcagctgctctagacagcctgctgctgccatcaatgacgctgctgggagctcgagtaacttctttgttttacatgttttactagcagctggtcctaagtggctagctgaagttctattttatatttggaaggttttaatctttaactttgattttcaaataagtacttgaagataaaaaacaagtctttggaccctaacaataaaagagtcttctctattgttactcctggctatttcttccaaatatatttaaaaacttaccttatgatataaacgaatcgtgtttagcctacattttgagccaccattagataagtatttagataagtactatgtatatatatattttttatttttttatttttttattttttatttttgagttggagtcttgctctgtcacccaagctgcagtgcagtggcgcaatctcagctcactgcaacctctgcctcccaggttcaagcgatcctcttgcctcagcttcccgagtagctggaactacaggcatgtgccaccatgcccggctaatttttgcagttttagtagagacagggtttcaccatgttggccagggtggtctcgaactcctgacctctggtgatctgcccacctcggtctcccaaagtgctgggattacaggcatgagccaccgcacccagcatagataagtggtatattgctatggtttgaatgatggtatcctctccaaaaattcatgttgaaacttatccccagtgtagcagtataagaagtgtgactcttgggggttgaccaagttatgaaggctctgctcttatgaatggggttagcacacttgtgaaaggactcaaggttgaagggagagctctcctgcctttacattccttctgtcatgtgaggacacagtgttcctcccctctggaggatgcagcaacaaggttccatgttagaagcagagaaaagcctcgccagacaccaatcttgctggtgccttaaccgtggatttcccagcctccaggaatgtgagaaatatatttctattgtttacaaattaccccaaacaaaataagaaaaataaaacaacaacaaaacataagtaagtaaataaataaatagcctggtctgtggtatttttgttatagcagcacaaggggaccaagacatataccaaatgaatgagatatatactgattagtatcttacactgtgaaagtgagttctaattgtcaaaattcatttgataaaatatttttctgattctgatttttttttttttagagacaagtttttctgtttcccagactggagtgcagtagcacaatcatagcctagtcactcactgcagcctcaaactcctgtccctcccaccaaaaaaagaattgaaagttattaggaacacctgtggcagaaagtacattattgaaaagaatcttttctagtaaactgtagggacacagtgggcatgaggggataggaaatgtggaacatatgaatacctccagttgagccctggtctgtaattatggaggtatgtattaatagggatgaaaaaggcagggaaggaatgtgtaaggtaggtttgccttggtttttcctgacactagataaatatgaaagtaagaggaatgagagaatgaatgaaatggtaattgagaaaggaaaaccatcagtagaaatgaaaatactcagttttggctgggcgcggtggctcacacctgtaatcccagcactttgggaggccgaggtgaacggatcacctgaggtcaggagttagagaccagcctggctaacaaggtgaaaccccgtctctattgaaaataaaaaattagctgggtgtggtggcacacgcctgcagtcccagctactcaggaggctgaggcaggagaatcgcttgaacccaggagcggaggttgcagtgaaccgagattgcgccactgcactccagcctgggcgacagagtgagactccatctcaggaaaaaaaaaaaaaaaaaaaaatagaaaatactcagttttatgacaggagtagttgaggagacgtgtttttcttacagatctaaacctttaataaacatacaaaccttacatgagtttttattaatctgagtatgcatgaaagatgttacttaatgttcaaacctaaaatgcccgaagtagctggctgtggtggtgcttgcctgtagtgccagctacttgggaggctttagctgtagtgcatcatgattatgcctgtgaatagccactgcactccatcctaggcaatatagtgagaccctgtctctaaaaattaaaaaaaggaaaatgctcaaagtaattggccataaattttagtgctgattattcagtgccaataatttacaactgaattatttctataaataaaaatttatttcttctacaaatgggtgtatgttagctttgaaagtgaaaaaaatatttagtgtcaagtgagactgcatgtgttaggttaaaagctagacatttaattgttttgctttaaaatgaattgtaaactgctctgacacttttgtagttaattttttttttctttgagatgaagtttcactgtcgctcaggctggagtgcagtggcatgatctcagctcactgcaacctctgcctcccgggttcaagctattcttatgcctcagtctcctgagtagctgagattacaggcatgtgccaccatgcctggctaatttttgtatttttaatacagacggggtttcaccatgttgaccaggctggtctttaactcctgacctcaagtgatccacccacctcagcctcccaaagtgctgggattacaggtgtgagctaccgtgcccggtcttttaattaattctttataaagctattgccatatttttttctacagctttcaacattatgttttgtatatttaggtctttaattgacctgaatattctgtctgggattttgtttagtatttatggattaatttggaaaaaagagatctttaccaacaaattttcttatccttacaaatatttctttctgtattttaggtattcttctattatcttttaataacatgtaaaatttaaatacatttaatatgggttacaaaatggttaggctgatttttttaaaaaacgtatacatcttatggtagtgatcatttgctaaatctgttagattcaaaaattctaaaagtaaatgctttttagaaaaaaattcagaccatgtagaagtcaataaagtacaaatgaaatctggggtcagtatctttgcagcagtgtgtgctgtccactagaatgtttcatgattatggaaatgttgtgtatctgtgctatccaacatggtaaccactagtcacatttggctttgatcatttgaagtgtggctagtgcaactgatgaatttcaacattttatttcatgttaattaaattttaatagatataattagcatatatgatattaaccagtacagcttaggtttattgtaaaattttacatttctttttatatgtttatattttttaaaggtatcttcaaaaaaagttgtatctattgtgtatatgatatatttttctacaacatattctagattattggtggtgtttggaaatgcttcttaagtttgaatattttctcttatttgactaccttgtgacctacattaacagatagtctttggttattctgcttctctccttcaaaattctaaattcttagaatttgaaataaactgctatttgaatctttatgtcatttcacatattgagtgattggtcctgagttgctctggggcttcctcaaaaaacaacctaaattatggatactaaatgaacacagactactttccttcattttgcccaaatagatgctgttctttgggttctttgatgttcaaacttaactttgaatattgaaggaaatggtacttctaaggataagtaaacatagattcttttttaacagttcatttcacagctcaacacacactttttggagcatatgttttatggttactcttttgccaaatactgggaatacaatattaaataactgttttgcctttaagcagcttgtaatctaattgaggagacagatgtggaaagaaatcacttacttcttcacagtggcattatagaatagaggttaagagtgtgctctggagctgtgtgaccttggttatctatggaagctcagtttccttgtgagtaaaataaggttattagggttcttgtgaggattgaatgagattatttgaatgtttggcatatgttagctaatattactggctactgagcttgaaatctctcgtgcctctattattggcaatggagagcacttgagagatttaagcaggcagatgacatggttggattcatattttaggattatgtgaattgctttgtctgtagtggatcaatagatttgaggaggctatagtgataaacctgttgcgagatgatgacttgatcactttagttatgatagaatggttgggagagagtgcagtaatactttcgtgttatcaaggtaagacttgattgatttaatgaagagggtaaaggagttagagataacatttgaatttttggttttggtgactgatggtggtatttacaaatgagttagggagtataggaggaggatatggaagaggggcttgaaagattgaattgagttttgttcaagcttgagatgactatgatatccaggcaggcatattcaggagacagttggatttatgtttttggtgggtagaagagtcatggctggactccttttgtttctggagacagggtcttgctgtgttgcccagtctggagtgcagtgagtggtgctgtcatgcctccctgtagcctcccaggcttaagcgattctcttacctcagcctcccgagtagctgggactacaggcatgtgccctaccatgcccagctaattaaaaaaaaatttgttttttagagatgggtctcactatgttgcccaggctggtcttggaatcctctgacctcattctctcaaagtgctgggattacacatgtgagctacagtgccttgcctggactctttaattgtatttaattttacatagtttgacgcaatattattcaataaatggtagctattactagcactatttttattattatgtggctggtatttaaagcaaccagtagatgaaactttctaaaaaaaaagaaagagtaaaaagtaaaaggagtgggctggaagctagaacatttaatagatggatagataaagaatgagtatagaatgagattaagaaaaagcagaactaagacaagctctgatgaagtatgatgagtttatataagaatagtcaataatacctgatgcaacagagatatctagtaaagtaatgcctaaaagggtcccctgtatttgaatgggatgtcagtggcgccctctgccaggcaaatcacagtgcaaatatggagacagaagccagaaataaaatgtattagcaaataaatgggaggttgatataacatgggccggttttgctgatgtgacccaagagctaagcagtgatatcaatatcttccaattccaaattttaaaatgtcctttaataaaatatgtggctagtcattttgaacaattatcagtaaaatttttaaaataaaaagcataagaaaaattaagaatacaaagagtatagttctattttaggtatttaggtttaaatctagtttaattctttcagctttctctaattgagttttaatcctcgtttactttgctaatgagatttaaaaatattattttcataaaccttgtaactttttgcttttttattctaaccctgtgatttactcttaatctatttctttataagcttcttaaatttcagtccagctttagtctcaaacattgttgtagtgattaatggttttgcccccccattttcttcctttgtaatatattttaatcaacttttttttaaattggaagagccaattaaatatgttgtttaaaatcttgccatatccacactgtctacctgattggttttgccaattctgtaaaactttacttgatactgttgggattctttggactatgtggcaatatttgtagatttatagaaattttactgatttaattcttggaaggcaattttagttccaagtatttatagaatattttattgtcatctgctatgtaccaagtcttaacttgacattaactgtgcaacattaggcatggcacctctcttatgactgtcctatttcagaacttcacagtctgttcctgcgcctttcaaggcactaagctctgtgctatgctgatcttcagaggaggagcacatttgaataaaaagtgtttgtttcagtctcattaaaaggctcttataaaagttatgaacatttaaaagtgccctttcctccctttttgagctaattgaattcttcattttataggggtagaagattccaggaagagggggcagggatgagtatttatcataattgttaaataatgcgctggacactttttgtgtaatgttatttgatctggatagcaaccctgtgacataggcaggtttatcctcattagagaaattaagtggcttgcccagttcagaaaacaagttaatgtcagaatcaggatgatattgcaggttttttgatttgtatctagtgatttttttcactcagttgttctctttgtaggggctagaggcagaataaagaggccccttccctgtgctccctcttgcttccccgtcttctattctttggagtgtatgtcatttttctccagtaatttagggcagaaaaaaatgttgaggactaccactgtaccattttgttgtctctgatttttaggaactatgttcatggtaagaattgattataaaagaatacctatctatgccattagaaaacaaaacatccaaaatataggctgtgctttgcatcattctatgaaagccatggtgggaagttgggttatagctttctactaagttgaaagtaggctctgtcgcctaggttggagtgcagtggcacaatcttggctcacttacaacctccatctcccaggttcaagtgattctcctgcctcagcctccccagtagctgggaccacaggcgcctgccaccacgcctggctaatttttgtatttttagtagagatggggttttgctgatggggtttcgctgtgttggccaggctggtctcaaactcctgacctcaagtgatctgcctgccttggcctcccaaagtgctgggattataagcatgagccactgcgcccagctaatgatttttaataactttatataatactgataaatcactcttttttttttttttttttaagacagagtcttgctctgtcacccaggctagagtgcagtggctcgatctcggctcactgcaagctctgcctcctgggttcaccccattctcctgcctcagcctcccaagcagctgggactacaatgcctggctaatttttttgtattttttttagtagagacggggtttcaccatgttaaccaggatggtctcgatctcctgaccttgtgatccgcccgtctcggcctcccaaagtgctgggattacaggcgtgagccaccgcgcctggcctaaatcactctttttagtggactctaaataccactgtgatttgataccccttttattcatttataaaaatacataaacagcttccttttttgatgtttaaaaattttatagtcctttctgtcttgaatttgcatttctgttatacttttcacaccagattctattcttatatgatgtattttatgcataagttatattttgcctgtaacatgcatacattatgaaggtagtatatttttatgcattacagtctttcatgcatattgattaccctattatatgtctttgcagccagccaaaatgtgtaaattttaaaatatctcttagtcattaaattgtaattagcacacggtaaaataacaaatgtattaaaatgttgctaaattattttttatttattaaaaaaattttttttctccttctctgccttcaaaatgttgcttctctgccttcaaaatgttggtacattattaaacagaagaaaataggccaggtgcagtggctcgcacctgtaatcctagtactttgggaggacaaggtgggcggatcacttgaggtgaggagttggtgaccagcctggccaacgtggtgaaacttcgtttctacttaaaatacgaaaattagccgggcgtgggggtgcatgcctgtagtcccagctattttggggactgaggcacgagaattgcttgaacccagcaggcagaggttgcggtgagccacaatcatgccactgtacttcagcctgggtgacagagtgaaactctgtctcaaaaaaaaaaaataaaaaaaaaaaagtttcacagacaaaatatgaatcattccttgtttaacacttaaaaggtttttatactcaggcaatagaatagtgtatagtttcattcacaataggtgaggagtatgtcatcctttttatattaataaaaagtgagaggagcccagatggccgaataggaacagctccggtctacagctcccagcgtgagcgatgcagaagacgggtgatttctgcatttccatctgaggtactgggttcatctcactagagagtgccagacagtgggcgcaggtcagtgcgtgcagcgcaccgtgcatgagccgaagcagggcgaggcattgcctcactcgggaagcacaaggggtcagggagttccctttcctagtcaaagaaaggggtgacagatggcacctggaaaatcgggtcattcccacccgaatactgcacttttccgacgggcttaaaaaacggcacaccaggagattatatcctgcacctggctcggagggtcctacgcccacggagtcttgctgattgctagcacagcagtctcagatcaaactgcaaggcggcagcgaggctgggagaggggcgcccgccattgcccaggcttgcttagctaaacaaagcagccgggaagctccaactgggtggagcccaccacagctcaaggaggccttcctgcctctgtaggttgcacctctgggggcagggcacagacaaacaaaaagacagcagtaacctctgcagacttatatgtccctgtctgacagctttgaagagagcagtggttctcccagcacgcagctggagatctgagaacgggcagactgcctcctcaagtgggtccctgacccctgacccctgagcagcctaactgggaggcaccccccagtaggagcagactgacaactcacatggccgggtactcctctgagacaaaacttccagaggaacgatcagacagcagcattcgcggttcacgaaaaaccactgttctgcagccaccgctgctgatacccaggcaaacagggtctggagtggacctctagcaaactccaacagacctgcagctgagggtcctgtctgttagaaggaaaactaacaaacagaaaggacatccacaccaaaaacccatctgtacatcaccatcatcaaagaccaaaagtagataaaaccacaaagatggggaaaaaacagagcagaaaaactggaaactctaaaaagcagagcacctctcctcctccaaaggatcgcagttcctcaccagcaatggaacaaagctggacggagaatgactttgacgagttgaaagaagaaggcttcagacgatcaaactacgagctacgggaggaaattcaaaccaaaggcaaagaagttaaaaactttgaaaaaaatttaaacgaatgtataactagaataaccaatacagagaagtgcttaaaggagctgatggagctgaaagccaaggcccgagaactacgtgaagaatgcagaagcctcaggagccgatgtgatcaactggaagaaagggtatcagcaatggaagatgaaatgagtgaaatgaagcgagaagggaagtttagagaaaaaagaataaaaagaaacaatcaaagcttccaagaaatatgggactatgtgaaaagaccaaatctacgtctgattggtgtacctgaaagtgacggggagaatggaaccaagttggaaaacactctgcaggatattatccaggagaacttctgcaatctagcaaggcagccaacattcagattcaggaaatacagagaacgccacaaagatactccttgagaagaccaacaccaagacacataattgtcagattcaccaaagttgaaatgaaggaaaaaatgttaagggcagccagagagaaaggtcgggttacccacaaagggaagcccatcagactaacagcggatctctcggcaaaaactctacaagccagaagagagtgggggccaatattcaacattcttaaagaaaagaattttcaacacagaatttcatatccagccgaactaagcttcataagtgaaggagaaataaaatactttacagacaagcaaatgctaagagattttgtcaccaccaggcctgccctaaaagagctcctgaaggaagcactaaacaaggaaaggaacaaccggtaccagctgctgcaaaatcatgccaaaatgtaaagaccatcaagactaggaagaaactgcatcaactaacgagcaaaataaccagctaacatcataatgacaggttcaaattcacacataacaatattaactttaaatgtaaatggactaaatgctccaattaaaagacacagactggcaaattggataaagagtcaagacccatcagtgtgttgtattcaggaaactcatctcacatgcagagacacacataggctcaaaataaaaggatggaggaagatctaccaagcgaatggaaaacaaaaaaaggcagggcttgcaatcctagtctctgataaaacagactttaaaccaacaaagatcaaaagagacaaagaaggccattacataatggtaaagggatcaattcaacaagaagagctaactatcctaaatatatatgcacccaatacagaagcacccagattcataaagcaagtcctgagtgacctacaaagagacttagactcccacacattaataatgggagactttaacaccccactatcaacattagacagatcaatgagacagaaagtcaacaaggatacccaggaattgaactcagctctgcaccaagcagacctaatagacatctacagaactctccaccgcaaatcaatagaatatacatttttttcagcaccacaccacacctattccaaaattgaacacatagttggaagtaaagctctcctcagcaaatgtaaaagaacagaaattataacaaactgtctctcagaccacagtgcaatcaaactagaactcaggattaagaaactcactcaaaaccgctcaactacatggaaactgaacaacctgctcctgaatgactactgggtacataacgaaatgaaggcagaaataaagatgttctttgaaaccaacgagaacaaagacacaacataccagaatctctgggacacattcaaaatagtgtgtagagggaaatttatagcactaaatgcccacaagagaaagcaggaaagatccaaaatttacaccctaacatcacaattaaaagaactagaaaagcaagagcaaacacattcaaaagctagcagaaggcaagaaataactaaaatcagagcagaactgaaggaaatagagacacaaaaaaccgttcaaaaaattaatgaatccaggagctggttttttgaaaggatcaacaaaattgatagaccactagcaagactaataaagaaaaaaagaaagaagaatcaaatagacgcaataaaaaatgataaaggggatatcaccactgatcccacagaaatacaaactaccatcagagaatactacaaatacctctacgcaaataaagtagaaaatctagaagaaatggataaattccttgatacatacaccctcccaagactaaaccaggaagaagttgaatctctgaacagaccaataacaggctctgaaattgtggcaataatcaatagcttaccaaccaaaaagagtccaggaccagatggattcacagccgaattctaccagaggtacaaggaggaactggtaccattccttctgaaactattccaatcaatagaaaaagagggaatcctccctaactcattttatgaggccagcatcatcctgataccaaagcctggcagagacacaaccaaaaaagagaattttagaccaatacccttgatgaacattaatgcaaaaatcctcaataaaatactggcaaaccgaatccagcagcacatcaaaaagcttatccaccatgatcaagtgggcttcatccctggatgcaaggctggttcaacatacgcaaatcaataaatgtaatccagcatataaacagaaccaaaaacaaaaaccacatgattatctcagtagatgcagaaaaggcctttaacaaaatttaacaacccttcatgctaaaaattctcaataaattaggtattgatgggacatatctcaaaataataagagctatctatgacaaacccatagccagtatcatactgaatgggcaaaaactggaagcattccctttgaaaactggcacaagacagggatgccctctctcaccactcctattcaacatagtgttggaagttctggccagggcaatcaggcaggagaaggaaataaagggtattcaattaggaaaagaggaagtcaaattgtccctgtttgcagacgacatgattgtatatctagaaaaccccattgtctcagcccaaaatctccttaagctgataagcaacttcagcaaagtctcaggatacaaaatcaatgtacaaaaatcacaagcatttttatacaccaataacagacaaacagagagccaaatcatgagtgaactcccattcacaattgcttcaaagagaataaaatacctaggaatccaccttacaagggatgtgaaggacctcttcaaggagaactacaaaccactgctcaatgaaataaaagaggatacaaacaaatggaagaacattccatgctcatgggtaggaagaatcaatatcgtgaaaatggccatactgcccaaggtaatttagagatttaatgccatccccatcaagctaccaatgagtttcttcacagaattggaaaaaactactttaaagttcatatggaaccaaaaaagagctcacatcgccaagtcaatcttaagccaaaagaacaaagctggaggcatcacgctacctgacttcaaactatactacaaggctacagtaaccaaaacagcatggtactggtaccaaaacagagatatagatcaatggaacagaacagagccctcagaaataacgccgcatatctacaactatctgatctttgacaaacctgagaaaaacaagcaatggggaaaggattccctgtttaataaatggtgctgggaaaactggctagccatatggagaaagctgaaactggatcccttccttacaccttatacaaaaatcaattcaagatggattaaagacttaaacgttagacctaaaaccataaaaaccctagaggaaaacctaggcattactattcaggacataggcatgggcaaggacttcatgactaaaacaccaaaagcaatggcaacaaaagccaaaattgacgaattaaactaaagagcttctgcacagcaaaagaaactaccatcagagtgaacaggcaacccacaaaatgggagaaaatttttgcaacctactcatctgacaaagggctaatatccagaatctacaatgaactcaaacaaatttacaagaaaaaacaaacaaccccatcaaaaagtgggtgaaggacatgaacagacacttctcaaaagaagacatttatgcagccaagaaacacatgaaaaaatgctcaccatcactggccatcagagaaatgcaaatcaaaaccacagtgagatatcatctcacaccagttagaatggcaatcattaaaaagtcaggaaacaacaggtgctggagaggatgtggagaaataggaacacttttacactgttggtgggactgtaaactagttcaaccattgtggaagtcagtgtggcgattcctcagggatctagaactagaaataccatttgacccagccatcccattactgggtgtatacccaaaggactataaatcatgctgctataaagacacatgcacacgtttgtttattgcggcgctattaacaatagcaaagacttggaaccaacccaaatgtccaacaatgatagactggattaagaaaatgtggcacatatacactatggaatactatgcagccataaaaaatgatgagtttatgtcctttttagggacatggatgaaattggaaatcatcattctcagtaaactatcacaagaacaaaaaaccaaacaccgcatattctcactcataggtgggaattgaacaatgagaacacatggacacaggaaggggaacatcacactctggggactgttgtggggtggggggaggggggagcgatagcattgggagatatacctaatgctagatgacgagttagtgggtgcagcacaccagcatgtcacatgcatacatatgcaactaacctgcacaatgtgcacatgtaccctaaaacttaaagtataataataaaaaaataaaaataaataaaaagtgaattttaggccattttctgttacttagaatacctgaaactgggtattttataagaaaaggaatttatttcttacagttatggaggttgagaagtccaaggtcaaagggctgcacttggtgagaaccttcttgctgatagtgactctacagattcctgaggtggtgcagggtatcacatggcaaggggcctgaacctgctaatggtagctcaggtctcttctcttcttttaaagccaccagctcccctcccatgataacccattaatccatgaatggattaatccatttatgaaggtggagctctcatgatccaattacttcttaaaggccccagctctcaatattgccccgttggggattaaatttcaacatgagatttgaggggggtcaaatattcaaaccatagcagtgggtttaaaggtacttgtgaaagaggagaccagagaggaaaatcaacatgacctttcaaatggacctatgatccattttcaggcagattaattttaaattttatgaaagggttgagtatgaatgagaattgaagacctgggaattgttgtccattgttgtttatctatttctgtgtacccttcagaaagtctgtttaccttcagcagtacaaatatatggtactgtgaaagatccctgatctagtatttatagcaacctgtattttatgaccagagaaactgagacttaaagatgtagagtacttgcctatggtcacttagctagtaaatggtcaatcaaaaactccaaaacttgaggccgggtacggtgactcatgccagtaatcccagcaatttgggaggctgaggtggttggatcacttgtggtcaggagttccagagcagcctggccaacatgttaaaaccccttctctactaaaaatacaaaaattagccaggcatggtggtgcgtgcctgtaatcccagcttctggggaggctgagacaggagaatcgcttgaacaggttgcactgagtcaagatcgtgccactgcactccagccttggtgacagagtgagactctatctcaacaaataaacaaacaaacaaaaaacacacaaaccctccaaagcttttctttccctcctgtgtcatgctacttagtacatagcctggttcacagtatatgattactatatatttaatgaatgatttacatattatttgtgaagtccaaaatacttaacgttgtagttgttccatcagttttgaactgctgaataagtgtgacattacagatgattcactacagaagaatattgaagatcttcaaagcattgttaaggtgatctcctttcagttcctggagtggtgttcctggaaatgactaatagaacagcaaaaaaccgtctacttgggcattcttggtgttttatcaattaagtcagagacctataacagtgttggagtgcttgttttgaagaggtcagctaacttacgttgacactgtgtgtgtatgaagagtgtaattttcgtttctgttatacaggtattctctgaaaccaaatgaccaaatcttggctgaagacaaacacaaggaactgtaagtgcattaaaccattggttgtaaatagtttactctgtctatgaacttgatatatgtatatgtaaattatctgattttcaaaattatataatgacaaagtataattaacactatgaccttaatcctaacaattatgataacctacactatataatttacactacataaagtttacacaggacataatttctcctgtattcacattaaaagatgtagtgttgtattccatcatctagactaaagtcttactgggaaatatgtcatgctattttctctttccagataaaatattaaattgttcctattttctttctgactgctctaccagaaaaaagtaaaaaataaaaataaattgtcactcttaatttttgggtcttactccggtggatcacccaccttcatggtaatgatagacaaatataattttgtttctgtcactggtttatgcaaaagtaaatgtcaattgtttggtacaaggtaaaacactttattttatttttatttttttgaaacagagtcttgttctgctgcccaggctggaggcgcaatctcggctcattgcaacctctcattcctgggttcaagcaattcccctgccttagcctcccaggtagctgggattacaggtgcccgccaccatgcctggctaaattttgtattttaagtagagatggggttttgccatgttggccaggctggtctcagactcctgacctcaggtgatctgcctgccttggcctcccaaagtgctgggattacaggtgtgagccactatgcctggctgaagacattttattttcacatctaactcaggtcgctcttggtttagtttaatgtaaccttcacttgtactcatttatagggacagtaattttttttcgtagaggacttcaagactattattttcttcttgagattaagtaataatttttttccaagtacttttaaactgctttttaaaaactgtcttgaaccttttgtaaattattttcttctctcctatttaaggtaacataaattgttaattataaaatggcaggaccaatgttcagggaaaggattttcttatgcgttcttaccgtttacacattccactattatgctaacctttcatcagtatttttatatttggcctatccttatttgagtataatctccatagtgggttctcaaatatatatattgtcaagaaatttttttgctctttctttatttcctagtatagtcagtgagggccggtgattgttactgtagcattggttggttattatttataggtctggtaacagagcttcttttgctttgggaattaagtagttggtgagccttaaaagttcctttagtccttagactatgaccaatattaaaaataccagaaatctgcttttaaagaatatgttatttaatatgtaacccattttaatgttttaattcatttgaaagtttttttaactgtccaagatataattcatctctatgggtataacttggcgaactgatacttttttcttacctttttttttgtttttttgagacagactcttgctccgtcacctaggctggagtgtggtggcatgatcttggctcactgcaacctctgcttcctgggttcaagcgattctcctgcctcagcgtcctgagtagcagggattacaggcacccgccaccatgcccagctaatttttatattttagtagagatggggtttcgccatgttggccaggctggtcttgaattcctgacctcaagcgatccacccacctcagcctcccaaagtgctgggattatcacaggcttgagccaccgtgcccagcccctacattttattacgaaaagttttaaacatatgttatgtgttcacccatatatttaccaccaaggttttatcattaacatattactgcacttgttttatctatttattcttctgttcgtgcattacttcatctgttttttggatgcatttcgaagtaaattgtagacatcaatatgcttctctctaaatatttcaacacatataccattaactagagttttatatttcaaagttttttttttttagtttcacctgttctaaaatttcttataaactgagtcatatatatgtcctattttgtataaggcttctgtcactccctgtgtttttgaaattcatcagtgttgttgcatatatcagttaattcctttttatttttgcagattaacattctgttgtttatttgttctattattgctaagtattgccacttgtttgatttgtcattattgatggtcttgatatttttggctgctggctctcttccttgtagtttttgacctacataccaaagaaaactttcagttgaatatggcaccataaaagcagagtattaattttaaaaaattaaaacagttattgaattaatgaatttcatgaattatgaaagctgtttataaataatctcatttgtgtctttgcaactcaaatagccaaaatcttggtagggtggtggtcatggaagtcagagtctgctaaggagtgtataacaactcacctgctgtattaaaaacaaaaaaatctttttgtgttcaagactaagctttaaacaatataagagatatggatataaaacaaaattttatctaatcagtaattccatgctttattctcataaaacattattacaacttcttaatttcagtctgttaaagcttgattaattataaaattgtaaaaatgtgttggcaccatcacattgacctgctctttgaaaattaaccctaattctataagagtaccaataagagagtacagtgatagctctaattatcttgatattaataaataaagagtggcctggcatggtggttcacatgtgtaatcccaacactttgagaggctgaggtggaaggattgcttgaggccagcagtacaagaccagcctgggaaacatagtgagaccccatctctacgaaaaacttaaaaaaggccgggcacggtggctcacgcctgtaatcccagcactttgggaggccgaggtgggtggatcacctgaggtcaggagttcaagaccagcctggccaagatggtgaaaccctgtctctactaaaaatacaaaaattagccaggcatggttgtgggtgcctgtaatcccagctactcaggaggctgaggcaggagaattgcttgaatctgggaggaaaagttgcagtgagccaagatcacgctactgcactccagcctgggtgacagggcgagactctgtctcaaaaaaaagaaaaaaaaattagcctgatgaggtggtgtgtgcctgcagtcccagctgctcaggaagctgaggcaggtagatctcttgggcctaggagatcaaggctgcagtgaaccatgatcattccactgagctctggactggacagcagagtgagaccttgcctttaaaaaaataaaaaaagaataccaataagagagtacaatgatagttctaattatcttgatattaatgaatattaagtatgttttcattaaaacatttttagttcctgaaattttgtgattcagatttcatatacacttagtcactgatgcttcacgagtatacttgtttctctgtctgaggaagattggcatgggaaaacagggaaatattggtcagcagtgacacttgtttttctaagcaaagtggtttttctcaacttcctgtttttcattattctacatactgaagaccttgggggatgattttaagtagagaaagctgagcaattcaagttgtgatgtgatttatctaaaactataggatttatagtttgttctatacatgatccagtaatcaactggtttcattagctttctagtttttttcagttttagttttgtaaatggaataatttaaaataaattaggaaaacatcactattttactaagtattttttcacctactttccattgtgctaggcattaaagaaaagatagtgtgcagctttttatatgtcaattatacttcaataaagcggtttaagaaaaagtaaaagatactgattttatttataaatggaatcttactctccaatagtggcttttcaaaatctttggacacatctgcagttattgaaaatagaaccattttgtttccatgaatatctattttatgaatatataaattttgtattaccttggattatgagatctgatcatatagatttaggtaaggaaagttaaaagttgtctggagttaggggtgaattccaaatgcaaatataaataaattcagaagtatccatactacttaacacagagtaacctggtatctgaagattttttttttgtttgctataaggcaaggggaaaatctctttaaaagggattcacatttatttacttggctttttaagatagctaccaaggtaaacagtgaacttttgtaagcagtgtatactgttctaaatatgaagtgtattttcccttctgatagtgaatgaattccattatgattttttaatgtcaaaaattaaattattttgtcagaataaccccttaaatttttaaatgttgtcttataaaagttaattatattgtgatatttaaatgcttgccaatttacgattatgatgagatggaagaaaataaataaattatgcaataggcatgaaccttcaagggtattaggacgtgctcaggatatgatctttggtgcagtgtaaaaatgtaatttcttagtgaataggtcaatttccaaaccagcaggaaagttataagtatttaaatggaatgtgtagggatatgtcagggaagttagagacaataacatctggtatgctttttttttttttttttttttggtgagatggagtctcgctctgtcgcccaggctggagtgcagtggcgtgatctcggctcactgcaagctccgcctcctgggttcacgccattctcctgcctcagcctccagagtagctgggactacaggcgcccaccaccacgcccggctaattttttgtattcctagtagagaaagggttttgccgtgttagccaggatggtcttgatctcctgacctcgtgatctgcccgtcttggcctcccaaagtgctgggattacgggcgtgagccaccgcgcccggtctggtatgctcttaaattaattgttaatgctgtgacttagcagttctttgaaatcatcaagatcatagactgggcttgtgcctataatcccagcactttgggaggctgaggcaggaggattgcttgagtctacgagttggagaccagcctggacaatatagtgagactcttgtctctacaaaaagttaacaaaagtagccggatgtggtggtgcctgcctgtagtcccagctacttgggagactgaggtgggaggattgcttgagaccaggaggtccaggctgcagtgagctatgatccgtgccactgtgctccagcctgggtgacagaatgagaccctgttaaaagaatcttttttttttttttttttggtaagaatgagctaagaactggatatctgtaaagctaatagaaaaaaatcctgtgaagcaaaaagtcaaaattgaaataagctaggaccgacagcaaggttaaatgcttatttttttttagtgttcataaataaggtacagttttaaaaatatcataaacatttttatgatcctattctcagggcccggttttttttgtatctttaaaattatagtattttgattctagaaatgaacccttgaaccaatatccgtattttatcatgaataaggtgagagtaacattgataaaatgacttgctatagtttacattgctacttaaggacagtactagaccagaaaccaagtctcctgagtcccatttaagtgctgtttttgtcacaccaagcagttctctaagtatatagtcttttttttttttttgaaacagggtctcgctttgtcacccaggctagaaaacagttgcatgatcatggctcactacagtcttgtttttagagatgaggtctccttatgttgctcaggttggtctcaaactcctgacctcaagcagtcctcctgcctctgctcccaaagtgttatgattacaggcatgatctactgcacccagccagtaacttttttttttttttttgagacggagtctcactctgttgccaggctggagtacagtggcgcgatcttggctcactgcaatctccgcctcccaggttcaagtgattcccctgcctcagcctcctgagtagctgggactacaggtgcctgccaccacgtctggctaatttttatatttttagtagagacagggtttcaccatattggtcaggctggtctcaaactcctgacctcaggtgatccgcctgcctcagcctcccaaagtgctgggattataggcgtgagccaccgcgcctggccgccagtaatttttttttttaaagggattaatatccattgcaagacttggtaacggatcacagagaactcattagttaattaaatcagtttcacagtattgtgttttggttttggaaatcacttcagacctataaccaatattgagtgagttgaaaagaattaattacttccaaatacaaggcactttacattcttctaaggagaggatgcaacacaaagctatttggtcagcttgatacaaaagctcttaggtgtgctcatgaagtaagtcaaatgtatacattttacaaccacatattaaatagaattagttttttctttttccttcccatttctttgaacagtcttattcagaatcttcatcattagcaactttgtcatcattggagcccttttctctagaacacatcagcctctttctatgtatgatattttcgctggaaattttatcctgagctataaatgcctctcatgtaagaaaagttttttttttgttttttttttgagacaagatctaactctgttgcccaggttggagtgcagtggcgtgatcatgactcactgcagccttgaccttgtgggcttaagcaatcctcccatcagcctcctgagtatctgggactaccactgtgcaccaccacacctggctaatttttgtattttttgttgagatggggtcttgccatgttgtccaggctggtcttgagctcctgggctcaagtgatatgtctgccttggcctcccaaagggctgggattacaggtgtgagccaccatgcctggccaagaaaagttttttttaaagtttatttttgtatgtagtcataatacttgtaaggtaaccttttcactgtattgctttttaaactaaggtttaaatagttcattgtaataagagttaccgtttgtgcttataaggctgcatctccaggagtaagtactaaatctgtgttagatttctttgctgcttttttttgtttgtctttttttttttcttttactgatatggtcaggtggtcaggttacttccgtaaggatccaaaactagagttgattgagatcatttcaggcttatacataatctacaaatgattctcaaccaattgagatctgagttcacctcttttgctgaacttttaattgtgatcttactgtaaaattctaggatctcataacttctatgaaatttttatacctggattataaaacttcggaaagatttgcttaaatattttgttgcttaaaagaaaataattggccgagtgtggtagctcacgcctgtagtcccagcattttgggaggctgaggcaggtagatcagttgagctcaggagtttgaaaccagccttggcaacgtggcgaaaccctgtctctactaaaagtataaaaaaaattagctgggcatggtggcactcacctgcagtcccagctactcaggaggctgaggtgagaggattgcttgagcccaggaagttgaggctgcagtgagcaaagattgcacaactgcactccagcctgggcaatagagtgagaacccgtctcaaaaaacaaacaaacaacccccccgcaccccccccccccaaaaaaaaacaaacagaaaataattaacactgtcatcaaggaaggtaactcattataaggatttaaaaaaaaaatttttttttgagacggagtcttgctctgtcacccaggctgaagtgcagtggcacaatcttagctcactgcaagctccacctcccgggttcacgccattctcctgcctcagcttcccaagtagctgggactataggcgcacgccgccacacccggctgatttttctatttttagtagaggcagggtttcactgtgttggtgaggctagtctcgaactcctgacctcgtgatccacccgccttgccctcccaaagtgctgagattacaggcgtaagccaccgcgtctggcctataaggaataattttgtgattaaacatggtcttatattcatgaacgataggtgaatgaaaaatgtgtgttattggtggtaaaatcttaaaatccttaaagaattaatttaaattgctaccttctacttatgaagcactatatggtgccctggacttagcattagaagaaacttagtttatgtatgagttttgccataggctgtagtcttggggtattagttagaattcaatgccactatgatattaagaaatttattacaggaattaaatcttattcaatcatgagaaaaactggggatattaaggtccctaaaatgtgagagaaaaatcgctaaactgccttttgatgtaggttaatgaattgcgtgttctgttaatagggaaactgtgaaggaggttcgtgtgttgtgggctctttgcaactaccacctttatgggcctttagtgaaaaatctggtgataggcttggtcctggtagttgtggacgtaaggtagagtggggatgagtaaggacagattacagttctgcccatacctttgtgtctgtccttcctgcctctaaccaatgactgcctttggaatgtaatggctactgcttcaattgcatcccctaaattttttgcaaatttctcttgtgacatatcttaagctgaaaccatataggagaggaaattaggggaagtgtactccttcttgacatagtttaataccttaactttgtttaatcacttagtcttccaaacttaagttcctccgatatcattttgggtttagattagtgcttttctgtcattgtccattaaacaaatgatttctttcattacctacttctcttttagtctgttcagtgatccctctgggtatagcttctgaatttctagcataaaactcttcaacaataacaaaaaaggataatgatctttcctgtcaatttttagggggaaggataaggtgtttcctagaaactttattcagagcactttagtcaaagtgtagttcattgatccttaactgcaatttacttgacaagatatatttatgggatgaaatttattgagggtaacagaatggagagagaaactgctggtgtgatgaattctctttcttcttggtctacaacaaacagaaatattttgagaatgtagctatggcagattttaatgtaagagttatgccaacactatttccccttaagggttgagtcagaccttttgggaatgatatagacttgggggtcttgagtgaacttttagtatttattagcagccaatctaaccttgaaaactctatgttgatttctttttggaaagtgttgaacaattaaataatacatgttaaagaacaaggaagaagggcattgttttaattattttgtgatctaatttaatccccacagcaactctgtgaagcagatattgtaatcattcccattttacagatgaggaagagacttcgtaacttggtttatataagaaaaggatagaactgtttagatctttttgattgctttccattttgtataagttcagtgacttaggaaccttttttaaaaaacttctttggaggagtgatattgttcattatgaacatacctacttgaaaagtatttaaaggtatttttcatggaaattatattttataagttttagtatggttcactagaaatacgtcacaatttgtaggtaatactgtgttttattttgagttggctaattgttaaggtaaaactttagaggataaagtgagctcatattgatgaatggtaatctgatatttccaacagactaggtctttttttgaagttcatgtattataactttattctttgtgatactagctccctctgtagaacttcaataagattgcaactggactttttcaataatttagaaaagtgatctaaacattatctataacatttccctgtaaaattttactttgtattctaatcagttgcaagtgggtttttaaaagtataaatgtaacatttataaaaatgtttcactttgtacacacaaagttttaataacatatacaaaataaaactttcttcaaacattcctataactttaatgcttttttatttaggaaggctagagagaggtgtgatttctaggtctgtaggtctgtgttgagtaaagcctgatggaagccctaggggaaaaataaattttgacgtttagctggatacttgaaattatcccttttttttttttttttctgaaactttccggtttgacttgggtgggaaaatgttcataagggattttttttttttatcttgtagagaaggggaaagcaaacttctacaacaggtagaaagagcaaagagaaaatcttagcaagatccagaaatttagtggagaattgcaggaaaacattcttgacatttacggtttaaaaaaattttcctttttctttttttcttaagaggtggtctcactctgtcgcctagactggagttgagtggcatgatcatagtgatcgttccacctcagcctcctaagtagctgggactacaggtatgtgccaccacgcctggctcctttttgtatttttagtagagatggggttttgccatgttgcccaggctggtcttgagctcctggactcaagtggtctgcctacctcagcctcccaaagtgttaggattacgggcgtgagccactgcaccctgctcacatatatgagttctatgagtttatgctgttgttggaaaatcctttgttatcaaagtctaccaattttcctgtgtgggagtgagcttacttattttaccaccactttttctcctttctttctgctatggtttgaatgtttgtcccctccaaaactaatgttgaaatttaattgccattgtaacagtaataagaggtggaggcctttaagaggtgattagatcatggggctctaccttcatgagtgcattaatgcaggagtgggttagttatctcttagagggttgttataaagtgagtctggcccctcaagcacttgcttgctgtttgccttctgccatgggataatgcagcaagaagttgctgagcagaagctggcaccatactctaggacttcccagccttcagaactgagaaacatattaatgtttctttcctttataaattacccaatctcaggtttctgttaaaagccgtagcaatcaaactaagacactcccctaaaccattttatattaaattgtaagttgtataattagctcttcaaagatgttttctcagacataatgtaagctcaatgaaggcagaggaaatatgattgacttgcaacatggaatttagaaaaatgagcgaactgatttcaaccataaagctagggactaaaacatacaaatgaggataagaaagaactgaagtacatatgctctttcagtttctaaaaatttaactgtattttcttctaagtagattgaaggatgttcttaggattatgcttgagtaggcttttaaacaattttgtgtggataattatctttgaagcctttgttagtactaaacatctttattctgttataatacagtttattcaaacagacgtacagtgtgtattgtggcacaaagaaattcaagaatgattcttattctttttgtttgttggccttgactaaatttgataccagataattgctttaaaggataggccaattttattggtataacaaatctacccttcattatccataaaccacttatatagtaatctggttttcctatacaggcacaccttggagatattgggggtttggttctagactatcacaataaagtgaatatcacaataaagagaaatacatgaagattatattccccagtgcatataaaagttgtggtgatatcacactgtaatctattgtatacaataacattgtgtataaaaaatgtatatgccttaatttaatgtaatctattgtatacaataacattgtatataaaaatgtatattccttaatccataaaaatactttatggatgaaaatgctaacaatcatctgagcctttagcaagttacaatcattttgctggtggagggtcttgcctcagtgttgatggctactgactgatcaggatgttggttgctgaaggttggagtgtctgtggcaatttcttaaaataagacaataatgaagtttgctgtgtcagagccttcctttcatgaaaaatttctctgtaatatgcaatgctgtctgatagcatgttacccacagtagaatttggaaaattggagtcagtcctctcaaaccatgctgttactttatcaacttaagtttatggaatattcaaaattctttgttgtcatttcagcagtgttcacagcatcttcaccaggagtacattccatcttaggaaaccactttttttgctcatctataagaagcaactccctgtccattcaagttttatcatgagattgcaacatttcagtatccatcttcaggctccacttccaattctagttctcttgctatttctaccacatctgcagtgacttcttccctgaagtcttgaagcgctcaaagtcatccacaagggctggaattcacttcttccaaactcctgttaatgttgatgttttgacctcctcccatgaatcacgaatgttcttaatggcatctagaatgatgaatacgttgcaggaggttttcattttagtttgtctgatccatcagaggaatcacggtctatggcagctatagtcttgcaaaatatatttcttaaataataagaccttgaaagtcaaaattacttcttgatttgggggttgcagaatgaatgttgtattagcagccatgaaaacagcattcatctccttatacatctccatcagagcacttgggtgactgggtgcatcatcaatgagcagaaatattttaaaaggggccaggcatggtggctcatgtctgtaattccaggactttgggagactgaggcaggcagatcacctgaggtcgggagttcgagaccagcctgaccaacagggagaaaccccgtctctactaagaatagaaaattaggtgtggcagtgcatgcctgtaatcccagctactcgggaggctgaggtaggagaatcgcttgaacccaggaggcggaggtcatggtgagccaagattgcaccattgcactccagcctgggcaacaagagtgaaactccatctcaaaaaaataaaagcctagcctcccaaagtgccaggattacaggcatgagccaccgcgcctgtctgtccgcccgtcttcttttttaagagcaagaaaaggtttcccagaagtactctggtagattcttatcacacacacattcctaaaccagttactggcaaagaaaatagaattatcatgattaattagcatattctgaagtacatgcttccttataactgaacaaaaattagagctccactggcaacgcggaaatggctgttgacttggcaactaatagtgaattgctcacaatgtttaagtgaaatggcctgtcagatttcctgggaacacaggaaccagggccagacttagaaacggcctcagtaagaggttttctaaaactattttctggtatcgtaattattcctaattaccttgtgcactaaaaaaatttaaaaattttaaatttagaattttaaacacatttcctgacagtaaccaagatataaaaatgtgtaaaattgagtgaatatattttaaagcatggaagatttgtgttaccctcagacttgaaagggaacctgcaaagttatggtctcatgggaaatattgtttctttttgccttgacataattttcaggctctttggttttattctaagcaacccagcagggcacctttaaaaagaaacaaacaaaattactgtctctaaaccaaagaagatagaaaaatacattcaggagaatagtatacattgaaaactgccactttagctagtgcttttttttttttttttttttttttaagacggagtctcgctctgttccaggctggagtgtagtggtgcgatctcagctcactgcaacctccaccttccagtttcaaatgatacttatgcctcagcctcctgagtagctgggattacaggggccagccaccatgcccagctaattttttcatatttttagtagagagtactttttaactgagaagagatgctgtaaagttttaggaaatcacagtggggacagtagtcatacttctactttcttctgaatataatattgtttcttttttctcctgcagttacttattttttttttctttttgctttaaggcttggtagttctgagaattttagattcagttataatcgaatgtaactatcaacacatgttatggagtagtataaattgttacttgatgtttggagttgttttactcagtcactcagcaaaggtaagattagatctccgttagatgaaaagtattatctcttatgcaaagagacattggttagctctggatgaagacaatggctatggggtcagtcaaccttgtagaaagaataggctaggcacagtggctcatgcctgtaatcccaccactttggggtggtcgaagccagtggatcacttgagcccagcagttcgagaccaaactcggcaacatagtgagagccccctctctacaaaaaatttgaaaattagccagggcatggtggtgtgtacctctggtactagctatcaggaggctgaggtgggaggatctcttgacctggggaggttgagtctgcatgcagtgagccatgattgcgccactggactccagcctgggtgagaaagtgagaccttgtctcaaaaaaaaaaaaaaaaaaaaaaaaaagacacaataaaagtaaaattgtataatctctggaaaaaacaaaataggctgtcatgttctaatactcaatatgtaaggatgtttagtatattagtgggtataattattaataaaatattctatttagttatctttgaaccagtttgtaataaccaaaccacaaaaattcaatttgctttgtatgtaaaaatcttttaaaatagaaagtcctgccttaactttcataaatctgaatgtgagcatatatttatgcttttcatttctttgcacagctttttttttttttcctctaagacagagtctcactctgtcactcaggctggagtatagtggcacgatctgagctcactgcaacctctacctcccaggttcaagtgattcttgtccatcagcctcccaagtagctgggattacaggtgtgcaacaccatacctggttaatttttgtatttttagcagagacagggtttcgccatgttgtccaggctggtgcacagcattttgttgttgatgtgtgagacttgtaatataacagtaataatgctgtcatttcttaaagatgatatataatcctatcaaaatattcctgggaagtaggtatttgtcagcctgtcagtgttttccttttattttgtgtgtgtgtgtgtgtgtgtgtgtgtgtctgtgtgtgtgtgtgttttagtacattctcccagatgctgaaattttccctttaaactgttactatgatgtatgtcttatttctttctcttttttggtcctaattatgctctcaggagttaagacagtataaaattatgttttttaaaggaaacttcatcaaatacttggaaattagcaaatattttttagaggtagaaactgtcatttatattcctaagacttgtaggccattgtatttgttgactgactgatttgactgagaacctagtgtgtgataacgtgtcactgtttctgtcaacttatataattgagggtctttttaattgttcttaccttagaccactatatacttgtggtcttataaagtatatttgaaaattatatgcattttcatgttttgtctgggcctgggaaaaatatttattttaaaactgtaacatcttaacctttaaaacccattgtcagttatttggaaaaattagtattatatgatatgaagcacttctttttattgctgatttcaggtttcactatctgggaaactccggtgtggagacataggtctgttaactgtcttctttgttttatctggaatgttttattgatactataaaacaaaacttatcagtaagactgatttggaattcatattgtttgacagcattatcactgtcaataattatccattgtcagtatttgtaaagcagaataaaagaagccattatttaagtttaattcctgagatgattcagcatacggtgtaatgtcaatctgtgggaattttattttaaactttttcttagtaaagtttactttttagagctgttttaggttcattcacagcaaaattgagcaaagatacagagatttcccataatcctcctgccctcacacatgaatagcctcccccattttcagcatcccccaccagagtggtacatttgatacaattgatgaaccaatattgacacatccaaataaaactattttttggggaggggagacggagtctctctctgttgcccaggctggagtgcagtggcgagatctcagctcactgcaacctctatctcccgggttcaagcaattctcttgtctcagcctcctgagtagctgggactacaggcacacgctaccatgaccggcaaatttttgtatttttagtagagacggggtttcaccatattggtcaggctggtttcaaactcctgacctcaagtgatccacccgcctcggcctcccaaagtgctgggattacaggcatgagacactgcgcccagccgataaaactcttagaacaagattaattgattgattgagacaaggccttgctctgtctcccaggctggagtgcagtgatgcaatcatagttcacagcagcctgcagctcctggcctcaagtgatcctcctgcctgagcctcttgagtagttgggactatagcttgtgctactgctcccagaagtctcttatttaatctgtctcttctaaagtatagatgtatagttcatacctttagaaatttctgagtttttatggtggttctgcaaataaacctgtttgcttcttatttctgccttcccttccttctgagcctttggtttttgattttctcttatatgctggttcagctatccttgtttctgttgctttaaagccttcaacatattatgaacattttccaccaaacatattgttcttatgagtacatcgtaattttagggcaagaagcagagatgaactttgctttaactcttttgtgttgaagtatgctaatggcaagcatgttttttaaatataaaagttgtacaagttgagatgtttaattcctttactttaagaaaaagcatcataattagaagggagaattgctgttatctggaaggtgttcagacagtttggggagaaaaaaacaaccaaaacagctgcagtgtaatttccataagggaatgggcttatatctttgtttatttgtgtttgttttccattgtacactcagtgcctagcacggggtaacacagtatgtgattaaccaacagttattggaaaaatatattttagtgtgttattttagataattaaaagtacatttaggaaatatgcaacctttttgtttggctttattaatcagctttaaaatgctgatgatagaagcaggaggcagagaaattataggcaaataggggtgggtccctggtgaaaccccacctccaaggtgaaaagcttgaaaccagcagcccaaagtgagaacttctattcctgtttgcctgcactgtcctgattggttctttctgaataatgtctttttaccaattgaatgttgccttttccaaagctacctatggcctgccccacccgcatcctgtgcctgtaaagccccggactcagtaggtagagaggagagattctgccagactttcgggaaaagagatggcttgacttcggggaagagactactgctgtacttcagggaagaccacctactcttcccgtcccctctccagctcccctctccactgagagccatttccaccgctcagtaaaattctccaccttcaccatccttcaagtgtctgcatcacttccttcttcttggatactggacaagaactcagaacccacggagtgcaggtacccaaaaaggctgtcatactggccctttgccctcgctggcggagggcagccaccccacgcaatgtggtaagggaccaactgagctgttaacatgcacacagacagacggcagagctaaaagaccactgtaacactttctctggggttttggggtcgtgggcaccctcacctgggtgctgctgtgggacctgcatggagctttctctcgctggctcctggagcagccggccaggtcctgcactctcttgctaacatgctccctcctgcagggggttgagcgctgtggcgtgagtaaactgtcgcccttgttgcaagtccaatgaagggaccaagaaaaatcctgcatcactgatatgaaatgtaccaaattaagtaacatcatcttatttcttctgattttgttttcagtttgtttatattcctttccataggtattatgtgtctgttttagttcataaaattgtggcctaatttatattttgaccattattcagcacactgttagtactcaggactaatttcagttgcttatttagacacatcgaaataaatcacattttaaggctgggcgcagtggctcctgcctgtaatcccagcactttgggaggttgaggccaggagttcgagaccagcctgggcaatatggtgaaatcccgtctctactaacaatacaaaagttagctgggcatggtggtgcacacttgtggtcccagctacttgggactctgaggcacggaaatcgcttgaacccaggagtcagaggttgcagtgagccatcacgccacactgcattccagcctgagtgagattacgtctcaaaaaaaattttttttaaacataaataaagaccacactatcttttttgaagattatgttcacatttcattctctccattgaactgtatagatgtattacctgtatataaagaatgtaaatttttttgtattaaaaatcgacaccttaaaaaaaaactaataccaccacaaggttaagctctgaggagatttcagctttacaataattacattgttacaataatgtttaacttctcaataattaaaaaccaaagcaatgttgcaaccttggttcaatattcaaatatatttttcttggtaaccaagctacttcactatttatagtactttataaatgatttagaattgttatgcagttttttcaaagaagtattcataaggtaaatttagaaaattattttaaaacgaaagtgatgcccaccagatggtgctatttcgcctgttttatctgcgacaataagtaggaaaaatgaatatagaacttcaaaaaagtgtatggaagatctagaatatttgggcattgtattttgggtgtagatgagctcagtggaaggaagcattcaaatattctaaacttgtgtttagtactgtatgtttatcttgataaaggtaaagatgaattcccagagttaatatgccagataaccttttatttagtctaaatgttaagtagattttttgaaaagttgacctatatgcaaattttattaacttcatagctgtatatgcatgaaaaatgaaattatttattagatatgtgttaccaaaatttgtttcaagatttctttatattgttaagtaaacaatattactatctcatttgagttacattgtgatttacaaattaagggaaacattttgatttttttatgtgtttgtaattattacccagaaacttaggcttgaattcactatttttacaaaggaaagagatgactcttctaaattaatttttgtattaggaagagggcaaactatgtggtacagtgttcacttagatgcagccattgaatgacgatccattagagtcaaaatggttagttagctaatgaaatacacttttcagtaaagctggaaagatttagccagctcttaaaagtgtttctaggattttaatgtagtctttttcccgctgattttattatcactctgtattcttctctggtcatgagattgaaccataaaagtcatgtagatgcttgttataagtatttgccaaagtcatcattgtcagtgattttattggcatgtgtgaaattagagattaaacttgcttttaaatcttgcatttgaatttttcttctggaagggtacatgtataactttcaatttaatgttcaattattggtaacagaatgaagcatctctctataggccagtaaatatatatagtagattttattgtattcctgtactgtttttgaatgaatattttactaattatattaacataatcctcatacatacccttaagattaggacctactataatgctttatttgaacttgtttcatagcatttgtcttttttaactttggattatagttttggaatataaatcagatccctcctacaaaaacataaagttcttcatgctttctctcattccacttatcacaatactttacatgtagtagatgaccctatatattttttatataaatgaatagttttgtcatgccaagtattgatattagtattagtgacaacaagtattcctcattccatagtttttgtttttgtttttttttttttttgagacagagtcttactctgtcacccagggtggagtgcagtggcagaatttcagctcactgcaatgtctgcctcccaggttcaagcaattctcctgtgtcagccttcttagtagctgggattacaggcatgcaccatcacgcctggctaatttttgtaattttagtagagatggggtttcaccatattggtcaggctggtcttgaactcctgacctcaggtgatccactcacctcagcctcccaaagtgggattacaggcataagctactgcacctggtctctgttctacagttttttatcttatgcttttctgaaatgactttttatagttgggtttaaaaggatcatctcattggaatctcatatcacagttatgatgcattctgtcatgatgaggataagtgtatattcaggttaaaaaaaatcaaaatattattgtcagcctgcatcagtattagagattgtctggtccaggagttctcagattgtgattcaagggcctcttgtgggaggggggggtcaggggtccttaagaccttgacagaagttctgtgagggcagaactatattcaaagtaatactaagactgtgtttacccttttcattctcattctctcatgagcataggtggagttttctagaggttgcataccatgccatactgattgaatgtacaagttatatgaaactctagcagttctgtcaaaagacaaagttacaacaaatttagtttaaagatctcagtcagctttattgtgattctagaatcaggcaatacttcattccataaagtagagtgtgtgttctaatgagttgagcagatggttggttttatagacagaaagggctgaagaaagcagattggtcatttcaaagtgaattctcttgtaaggtctggatggggagacaggacaatagaaagactggttaatatcaggttacttcagattagggattaaaacagaggaaacttcattatcatgcccattgaatacttcattatcatgtgcattgaatattgaaaattgtcctgtttgggatattaggctgttatctgtctctcctgattttttagaaagtcaagataacaactcagtttgggtttggtgagcatgggtgactccattttgatttttagtctggtcttcttttggagcctagtgtaggagttttgttcaaaacagtggcctataattttggcttcataagccagacattaaagagatttgcaaagattataaaacagtgcttctcttgtcactaagatgttttttagtttggaaatagttattttcataaaatgttacattaacatttaatgaatttattcttaaaataataaatatttaaaaaagttatattttaacttctaatatgataactagggctagatattaaagctccttgaattactcgatactctttttaaagtgtaaagtggtcctgagatgaaagtgtctgagaacttatgatcctaattctttatcctcatttcatagatgagaatactatgagcccagagaggttagtttagttaagtacactcatccagtttttggcttagctgattcttggatcactgacatctggctttttttgatttttttttttttaagttttttttttttttttttttttttgagacagagtcttgctgtgtcagctaggctcgggggctggagtgcagtggtgcagtcatggctcactgcagccttcactgcctgggctcaagtgatcctcccacctcagcctcctgagtacctgggactacaggcacgtgccaccatgcctggctaatttttgtgttttttgtagagaagggtattttttgttgcccaggctggtctcaaactcttgggcttaagtgatcagctagccttgacctcccaaaatgttgggatgagccaccttgcctggcctgatatattttattagcagttttgctgtttagatattcttcaacctaataccaaccatcagctcctttaacagtttcttcatttgatattttaactaactttattaagtacatgagtaaattaggaatattgacctactttttcaacaacaataaaatggtgtttttttaaactcaaaaaatgtctagaaaaagggaattgatatatgaaacagtgtaaccttagcgtcagaaagaataatgttgagggcaaagaaataggttcttgtgttttagagactcttttactgtcttttttcctttttttccccccttcttcaacaacaaaacattggttacaagcttccctgggcatttatggcagcccacctacagaagaacaagtgttctgttttaaaattttaaaaattttatcaagaggataataattacacatatgctgcttttttgatggatatgtattatttctcaggttgagcctcatggtgggggtggtagattctaaccccctccttttaattgttgaatgaatttaaaactatgtcataaagaaactgcgtaattttaattcaaagaaagataattaggatatacataatatccctcttcctttgaggggcttccttcgtgtagaagacatggactgagtgatttttgctcaataaaggaaaactttctagtagtaaagaaatacaaaaatagaatcagcttgtttggaagtagtgagttccctttcttatgaggcattaaagcatagaccagattattgactgttagtaggagtactagcaaatgaatcagtagatggagggttaattgggttacatgacctttcagattgcttttttttttgaggtggagtctcgcttgtcaccaggctagagtgcagtggtgcaatctcagctcactgccacctccgcctcctgggttcaagcgattctcatgcctttgcctcccgagtagctgggattacaggcacgtgccaccacacctaattttttgtatttttagtagagacggggtttcatcatgttggccagggtggtcttgatctactgacctcatgatttgcctgccttggcctcccaaagtgctgggactacaggcatgatccaccgtgcccagccttcaaattcttttattaagtgtttgagtatacttgttcaaaataactttttaaacaagtataaaaaggcagttggtttagcagatgtattctacttttatatcagctgctctgttaacctaaagattttatggatctgtggtctcaccatgatcactgacatcaattctccttgaaggaggatgagttttgtttgttcattttattgcaaaccatttgaagagatgatagattggtagcagaaatttggcagagaaaaggatgataaacattagaaaggaggataaagcccactggaagacataaatgaattgatgatattttggtgtatattttctcattgctttatgattataaatattttctgctgctttttgccactatctatttttcatgtcttccaataaagtattccatggccaaaatttgtgtgaaattctcttcggttgttgctggttttacaagttatagggttctttggaatataattactgaaatgatgactacactaaaacatatttcttcttaatttaacaaagtatttagtgggaggaaggctctagcttttcttattttctttaatgttttttaggcatgctagaggaaaatagtgttcttactattagttttgaacattttttatgactatagagttgaaagcccaaaacactagaagtaaatggatcattgcaaaatatttgttttgttttcatttgtgagtggggcattcgtgtgtcactgtgtctatgcttctatttttctctgtatatagtttatatccttaagactttcagaaagaaattgagatgttatgttgttttattgtatatgcatgtacatgcatacacacacacacacacacacacacacacacagttttatttgttcatcatatatttaaggcctgacataggtcttacaaagttcaattactatagggcttaagtaggaaatgaatggtaaaatgagccaatttgaagcaataaatactgattgatagattatcaccttcttccaaataagatatgtggcatcgtagaatcttgctcttagatacacagatatgtgtgatgtttaaatagttgagaaattcaaccagaaatgaatgaaagggttttcccgttatcctgtcatacgcaaattaccagatcattcagttcttcaatttatcaattcatgtatttattcatttaactaatatttgttagttttatactatgtgtaaagccctattttagacactgaatacagtgccagacagtaattttcctgcactcatagtttatactctaatagagaatgtagaattgagctttaaatttcctattcaataagtatttttagtaatatgtgaagtacaagagcttctgaagacttattgcgccactctctccctattcatccatttaccagttgttactgaatgcttactctatgtactagaaatgcagagatgagtaagatacaacctggccctgaaaaaaattcagtctatttggagttatagacaggcagtaactagctattatatagtgtgatgatggctatgatataattacaaataatattctgcaagaacagtaattttctctagctgtgaggtatgcaagaagctatcatagagaactaatatttgaggatgagtagaaatagtcgggtatagggagatcaaaggagaagttactcctattccccaaatagagggttcttcatgaacacacagaagtaggcaaggtctgtttggagaatggtgagatattgtgtagtttgggtaaaacactgggtatgtcatggagggagaggtaaaagaagaagctacaacgtaggttcaggccgaattgtgaaaagttttatatacaaggttaaagttggctttttattttacagttagttggggacctgtggaagatttttcagcaggcaaacatacttagtctgcagtttacaaagatagttgatagaatacaggatgaagtagtgagaagttgaggctatggaaaggcaggtataccagtttgaaaacttcataatagatatgaatgaaataatgagggtctcttatagggtagtagtagtagtgactttagaacacagggatggattaaaaatcaaattcagaggtatttttgttttgcttcatttttttgagacagggtcttgctctgtcacccatgctggagtgcagtgacatgatcacagctcactgcagctagggctacagatgtgtgccaccatggctggccaattttttatttttatttttatttttggtagagacaaggtctcattatgttgcccaggctggtcttaaaatcctgagctcaagcgattcttccatctcagtctcccaaattgctaggattacaagcatgagccaccatgcctggtccagagttagaactgacaggatttagtgagtgatccatatggagagagggcgttgaaaaagattttgaagttttgtgtttagtgtctgcataattaaatgctggtactattaacttcaaaaggaaaagcaatatggttgagggaagcaatgaatttggttttgtaatattgagggcaggagtaaacctaagggaatgttggaggcatttaaattctaagtggaggagatgcctattcaagagaaaggaggaggagtagggggaagagatagctgttcagtgtgtcattaaacctctcaaatcctcagtttgttatttatcatatattggaggtagaatcaataatttttctggttttgaaataacctgtgttttagttatcacaaattctaaattagtagtacaaaaattataataattatagtttatatgttatagactgatgataatatttattgattacttcctgtgaagtttaggtaaaatgctaagcattttgcattcatcatccatttaattctcctagcaatatgagttaaatattattactatctggattttcagaaaagggaagataacttgaccaagattgttacagcaaataagtggtggatgggtattcaaacccaggacaatctgacattaaaactcaagcttttaaccactatattatttgcctgtcttgtagaacataagagttgtaatgaatctaaaacatcatctagccctttcctgtaatcagatttatgtcatagctaaggtctgtaattaatgtcaaaattagctatccaatttacttaataagaagcttactccacagccattcattactgctgttttccttgtggcagatacttttttttttttttttttttttgtcgactcacctctttaccgtgtgatgtgagtaaattctgtatagtctaggccactcatgattatcccatttttcttgctagtcattaattaagacctgaacataggactgatatctgaccaataactcatttgtggccaatgagacatgaggggaggtttggtggaggggcttcttggaaaggtaacacctcctctcccctcatttttggatgtttctatctagatgggttcttggaattgtgagagctatcttggaattatttggggcctaggtcaggataaaaccaaaacactggatggcacagtgaaaagatggtgagaacttggatccttaatgatcttgttgaacttctaaattacccattcctaaagctattgtgcctcaggactaggtcttacatgaaattagagggaatttattaggctgtgtgaaacaaggactttttaaggctactaacagtttttttcttttaaacgatacttatcactgaaagaaacctaactgggatctgcagtgtttatctttgtctgaagtaaatagaaaggcactgtagggcttgcattactgttgagacacaattaaaacaggaatagaagacaatttttgtgtcactgcacctaatttaattggtgtagaagttggagatgatcatgctctagaaaacagatcttatatatgttaaaggtagcaaagtgtcattgaggaaatgagtctgattattctgacagtttctgtaggtaaaaggaatagaaagtaagtgttcagattaggttaggaaatagaaatggatttagtttgtagacagttaacctacgtttcagggtccttccaagactctggaagaatctcaagcaatgtgttaacataatattttgggtgaggcggggtaagatttgcaaaagttaggtatttaatccattaaaactgctattccttttcacttagactttccctgtatcataccctcatattgggtggcattagagtggcctgagctaagggaaaattgagtagaggatacatttagagatagtatatggttagcagttgtttatgtgtccagttattttgtaggcattacttccaggaatgttattactgtccactgtgtctacttccctggccttgtgatacatagatgtagttttgcagggcaggtgagccccaaagtggggctcagcccgtgagggttcttggctttgcccagaaaagaattcaagggcaagccagaggtagaagaaaatagatttattgaacaggcagtgttacagctctggtggtgttatagctcggtgactgctcctgcagagcagggctaccccgtaggcagagagtagcagttcagggcagttattaatacccttttttaataacatgcagattaaggagtggtttatgcagaaatttctagggaagggatagtaacttttgggtcattgggtcattgccatggaaagtggtggtaactcctgggtgttctcatagcagtgttgacatggcacactggtgggtgtgtctgatggaaagcttcttctgcctaatcatctttcagctagtcctcaatttaattgggtgtctgaacctgtctctagagtcaagtcctgcctcctaactcagtaggggcaagggtcttagagcattataaatatgttctttgtggtagaggtagaggaagagaaacatcgtttaagtgtttagagtgagaaactagtctggaaaatttttctaaatcttggaacttgattgtggttttcgtaaatttgataatattcctaagaatgtatatgacattatcagtaataagttataaagaagttataaagctgatataaactctctacactgccttttttttttttttttttttaagatggagtctcctctgtcacccaggctggagtgcaggggtgtgatctctgctcactgcaacctctgcctcccaggttcaggtgattcttttgcctcagcctcctgagcagctgagactacaggcacgcaccatcatgcctaacaaatttttgtatttttagtagagatggggtttcaccatgttggccgggctggtcacgaactgctgacctcaagtgatccgcccgcctcagcctcccaaagtgctgggattacaggtgtgagacaccgtgcctggcctacactgtcagtactaaaaattgatcaaacacagtagtaaaaagataaaattatctttctattctcttaatgttgcaaaattgttatatgaagaggaaatcaagaaatgcagccagaaatgtaagaaaataagagcattatagagatagattaggcaattaataaagatatgctcttctttttgaaattcatgtttttggcatttgttagccttttaaagttagtgtttagttgtaatttattttctcattccagatatttacttcacacctaattttgtattcctttccttaaatagagtcccacaaattgtaaaaaaggaattagctcaccaaaaacaccaaatgcagtatttttaatatttacctttcaggttcggttgctggatctagatatgcctcttttttttatttcctcattttttcttctaaaaagaaaattatgtattttaatgtcagattgcttttgattaaaatgtttcatattaaaattgtatacctgaaaaatattattcaataacacacttcaaaaagttgacagttaaaaaaaaaagaatagcccttgttacttttcttatctaatcacagagtttgtgtagtgaatgtaaaaagaaaaaaaaattgttacaagtttggagcaaagagctctgtgtttaaaaggaatctccttctttttttgtgtgtttttccttttgtaccaatggggaacctaaatctgttttagttgcacagacacaatggacaaatagtcattttgtatttgccaagtgtgataccttcctttgtttatttgctattaaactgttgagagttttatggctagtggataatcattgttcaaactttttaataactacagtgaattgtgttaatataaaattatgctgtacagtattttcttgttatgttgatggtcaaagtgaacatcagatattaaaaatttagatgagtaaaatattaaacagcctatttttgtcatgtaacaaaagaccatgagatccatggaggaaaaaaggacagctttatttttctatagaaaacaatagtaggttggggatatgcagcctgtggtgtaaaatgaaaatgaggtcctagttgggggttggagagttagaaattataaaggcaaaaattgtaggacaggggaggtggggtcaaggaagtaaggaataaagtcttgattagatgacctttaatccccaaatcaccagtgtgtcttagttggttgtttccaggtggttggtcagttggcaccaggtggtcttttggtgatcatttggggaatttccaaatgatcaccaaaaggaactgttctttgacttggtggcagaaaaacaggttttgcaacacttttaaggacacagggtataattgctcccttaccctgtcattgcctcttggttctgcttttacctttgagccacaaggagtctatcttgtcaattaactgggggcataatttgacagtccaatatgtataatgatgacaacagctccactaacatgaatgccattcttagaatttctcatagatcctggcatttggtacatctgagttgaataaataaaagtctggggaatgaatgaaagaaaaattagttcaatgtcctataactttaagttaatttattagaattgccaccaacaaaattagctctagcatttagatactaaaaggaatttgttaagcaaacttacttttgcagttatctctccatggacagtcagaacaggtattcttcatttctaaaacatactgctgttctttaagaccattctttggcactgtggaactttagtcattttctagacatttgttagccactaaatgtctcataccagggactcatatttgtaaataatagtgtctgcctttgagaagctcataactgggtagtcaacgaacagtcacagtgcagatctggaatcagtgttgagggagtacaaaatcctttgggtgttgtaatcagagtcaagaaaagcttcacagtggcgataggcttaagcttagttgaaggaagaggaagctttcaagtggaggtggcagagaaagcattctgacatgtgaaaaggcaggaaagcctgcgtgcagcatatttattagttttgtctcccttggagcattttgtaaattttattgagtattcagagttgacagaaaggcagtcagggatcatttcatggagcgccatgctgagaagattagaggattttaagcaagtgatgtggtcaaatttgcagttttgaaagagtacttaacattatcctggttatatgtttagcagatttggcaagaactgattgttatgatttgatagtcatttaatacaaaaaggaacctggaatgctcttcgtctttagtgaacattatgtaacctatcttcatggccttcttagtgaggtaaacattttttttttgaaattgtaaagatttaaactttttgaagggtaaactttctcagataattatgcttagttgtgagcagaagtaaaataatgtttttacaggccagagcatttaattaccagtgcaagactgtccagactactctttccatttaccatgataactggtaaaatgtgagatggtgattgctccatcatcttgggtactgagatgaaaagatgtggggtggagtcctcaaatgacttatgatgaacagctagtgtaagcaagaaaatgaccttattgttttaagccactgatattttgcagttcttacctgataaatggtacatgaacctaacgtgtttttattgatgcaaccatatatcaaaacagtatttttgaaggaatcattgtagaagtacagacatttatagaaaattttttacctctctgatttagagaaatttttgaaatcacaataacttaggtaacatagtaacataaaagttctcataatatgtgtaaaccaaaatgagttactgcaactaagagtcattttgaaagagactaaaattgacttatctttaatttgttaaataaaagtgtgatattaaatccattacaaaaatgggtaaaaattgaagacaactgcaattttataggttactgaactttatattttacatgatattacagtcatccttcagtatacatgggcgggtggttccaggacccaagtctacaaatatgttaagtcccacagtgggtgctgtgaaacctacataaaggaaaagttggctctctgtatgcgcaagtttcgtatcctgtgaattctgtattttcaatccacatttggttgaaaaatttcagcctgtaggtggacttgcgcagttcaaacccacttcattcaagggtcaactgtattttatagtcagtatttgcataataaggaaatctaaatggtactttgatattcaaagtttcataataatctatatgtatgttttaaagtgagtgtggtgatattaatacttaaatgaaaaatatgagttaataaagcaatttataattttatatcaattgagcatattgtttttgaaatttaatttagaataatcatctatacataatctatagatactttagtctttctatatgacattcttatggtggtttattgattatcataactatgaataatgagtaaaaattatacaactatacaagccaatatatgcttgaaattattatttattgatagtaaattagattttgacatgaaatgatttctgtttaggcaataaatttaaactatagaaaaaaatgcagtgtaacttgtactgtaaataaacgattagcaatgaacattacagtgagagctgatagtttatgaattattcactgcaaacttattgtctctgtgtcattaacatgtaagataatgagcctaattaccatggctttaaactcaggggagttagcaatttatgtgtaaaagtttctgggctgtagttaccacccacaagggtattgagagaactgcagacactacttctgtgttttgtttcagaaatgttctttttcctcacttgcttccttcttaataaattagtttttatttatttttatagtgagaattatgagcttttcctcttgcttgaatacctttttaaaggagttatgagaaatatttaagtatttttttagtgtagtttagtgttgtaagtagacaaaatattattagatgtattcttttatttgcttacataagttggcatcacttactatagtaaatgaccactaatagtgtaatttcttggaaaatctagcctaaaaggtcaatattaataattggttttctcctctaaaaggatttgtactaagatgatttactttcaaagtactcagtattagcctatagccttttttctaatctttaatattgtatctttgatcttaatttaaagttttgatgaacttgttgcttctattttctctcttatagtataaattatctgtaataagccaccttaattaaagttggtaaatctacaactgcttcaattatacactaatcaattatacactaatttaattctacttagcaggatacggtacatcattaatcagttttagacttaatacaacagatttagaagtaatcaaaattgaagcattttatttagctgggaaaaaaatgaagggtcataatctagtaattcacatatcaattctgataaaaatcaaagattctttgctaaaaatgaaggaatgtagctgttatgtttactgttgagtgccatgggctgaagctgtgattatataatatctttagatgttaatagcataatagttttgtgctctacctttttctttaaattgttattcatgttactaaatgggttgttttctgtaacatgattgtttaacgtatacataatataagaattccttgagtgaatatcttttttgttgttgttgtttgtttttgtgttttttttttttttttttttttgagacggagtctccctgtgtcgcccaggctggagtgcagtggcatgatctcggctcattgcaacctctccatcctgggttcaagcgattctcgtgccttagcctcccaagtagctgggattacaggcatgtggcctagctaatttttgtatttttagtagagaagaggtttcgccatgttggccaggctgatttcgaactcctggcctcaagtgatctgcctgcctcagcctcccaaagtgttgggattacaggtgtgagccactgtgcctggcatatagaatatttactagtagtttgttttgaacatgtaagcatgtgcacaaatgtatttttttcagaattatgttaaataagatgattagatataattaactcaaaaatctttagcaaaatgatctttgttttctgtgattgaggtggtgacaaatttgccttagaattcttggggatgtgttataaactcgatgtaatcatttttcttttccttttttttttttttttttgagacggagtcttgctctgtcacccaggctggagtgcagtggcgcgatctcggctcaccgcaagctccacctcctgggttcatgccattctcctgcctcagcctcccaagtagctgggactacaggcacccgccaccatgcctggctattttttttgtatttttagtagagacggggtttcaccatgttagccaggatggtctcgatctcctgacctcgtgatccgtctgccttcgcctcccaaagtgctaggattacaggcgtgagccaccctgcccggcccatttttctcaattatctgctcattgaattaaatgactcagattgaatttcattactcattctttctatacatgttcatattattggaaacacttcttgtcctgctcagctttctttccaataaattagtaattctttgctcactcgtcttgtattcctttataagaatgttctagatagggatattctaagttttgaagactatgtatgttaagtgcattttacccttttgagagagttttagtaacaagtttcagggaacccctaggactctgacccattatagctttggccatttaaaaaaaaaaaccttcaaaggtaatatgtgtacatggttaacaatcaaatagaacagatggtctgtctaataatgaaaaacaagaaaaatcttgccctatgtttctctgttcccactccccccaaaatcagccacttgtaactgattctgttttcagtgcttattgtggttgtctcaacctgtagtagaattatagattcttttgtttgtttgtttgttttgctttttaaattagagacaagttcttgccctctcaccaggttggagtacattggtgtgatcatagctcactgaagccttgaactcctgggctcaagccatcctcctgcctcagcttcctgtgcagctgggactacaggcatgcaccactccacccagctaattttttaatttttttgtagaaacagggttttgctgtgttgtcccttgaatgcctggcctcaagtgatcctcctgccttggcctgtgattataggcgtgagccactgtgcccagccttagaaattatttctcaatgcttttgctcttctgtgttctgtgattaggtgactctttatctcacaccacttctaccttttctccatccttccaagttgtgatcactgttttcgttcctaaattggttatttttaaacttcaaataattcaggtaaatttatattttatgttttgttaactgtgttccctgcttactgtttcttccattaatttaaatatcatcgaagttgataatgctaagaacttgtttgtgttaaggtaattctcacatgtggataaaaactgattagtgccaaaagtttacaataaaatataacagtctcctatcctaccctgggttctccagaagcggcaacttataatactgttagtttgttctttctgatactagcttattcctaaataatatgtgtattcagcttttctgattaaccaattttagatgttatctattgacctttttattggggcctgggatacagatcatattatatacctgtgcacccagttctgaaaagttatataataattttggttcaatctataagcagtctataatcgttatttatattatagtgactatgtaagtattgagtgctgtaatatagcacattacattcatttgcttaaacaaatatttggtccccctttcccaccacattatttatagccttgtttattcatttgcttggtttcctattggctaatttgctaatctcccccctcagtgtttcagcagatctctccagcacctcccattaatttttctttgtttatcataggttcgaaactcaataattttttttcctggaagtttctctccttcagccctctattctactttaccaaggagttgtcttactcttttcagctctgatcctgggacttccctttgttgctcttttgggggacaatttgctttttgattgtttttagtcttattagtttatgcccttgttttgctcaagcacattctccagagcttcctgagaaaagaatatgtgagaaataaaatttttccatacatgtaggtctaaaatgtctttattctacctttacataggttggtatttcaattaagtctggaaatgcagattgaaaataattattcctcagaaacttgaaggccttgctccattagcaaccagtgtttcctatgtgaagtttgatgccacactgattgctgattctttatatgtgacctatttttttctctttggacattcttagaatctcctctttcctcctggtattctggcatttctcaatgtgatttttcttattatggcttttttttttcattgttctgagcatgtaatgggcccttatagtccagagacttaaatgttcttcctgccattcatgcaggtttttgaaatttcttctctactattttctttagagctatgagttatttttattagccagttttctattaatagacactggatttttcaagttttccaccacaaaaaacactcatgggccgggtgtggtggctcacacctgtaatcccagtgctttgggaggccgaggtgtgtggatcacctgaggtcaggagttcaagaccagcctggccaacatggcgaaaccctgtgtctactaaaagtacaaaaattagctgggtatggtggcaggtgcctgtaaatcccagccacgtgggaggctcaggcaggagaatcgcttgaacctgggaggcagaggttgctgtgatcacgccattgcactccagcctggatgacaagagtgagacttcatctcaaaaaaaaaaaaaaaacaaaaaaactcctcacatatattatcttttttgcatgtacttttatataattgtgccagttcttctgtaagatatacatggcttttatcttattactttctctgagaggtagagggtggggcagggaaggcaaggagaggaagaagctttgagattctcctacctgaacttcagattctggtgtgatacctcaatattgagttagaatggctttatcaagcatgtttatttctagtttttcatattatttttgtcttagtcatgaagcacaacaaaccaacatagaacccatttcatactgatgaataaacaggtagcttcattcatgtattcatttattcattatcatttattcattcagtcatgttgtgatactctttgggaatacaaaggtgatactgtacttgctgtcatgggatttacaattctagggataagtaggagtgtaattgataaaacatgtatttgtgcttttcaatagtaatattgactaactcaagaaaacttttggagacaggctttctttgaatggactgtgatgcttgcttgtttatgttttcatgaatacatttactagcttttgattttttatattaggagagaacagagtgtcttgttgtggcagaaatacctaatatgtaatcctctgaattcttcaattgttgcaaaacataaacatttactaaagagttcagcagagtagattaaatgttatttaaaacatatgttatattgacctcatggctaaatggcctggtttaggaatccatgaattatcccacaggtaatagcaaagttttctccctgcctcgtctcccaccccaaatatttgatttccacatatactgcacaggggaattgaatttgatgtcgaaagccataagaaaaagagaaactttgctttttactgcttttactaggaaatagaaaacatttttagtgacaggctatgcttcatcatgaaaatacggttgggtgttttaggccttcacaaatttgatttcattgtacttagtgatggatgttagtaagctgtgtgagatggagagaaattaaagaataaacaggaacctctcaaacttgctagtgatgttctacagtttgtagcatgaattttcttacttttagtttttccttatgaaatactttatgtagaacaaactagcagtactaaaacaaacacccatgtacccaatctgtcaacacttagatttgttgaatatttgggtgggcagagtcttccacccaaatggtaaaaggggaatacattacaagtacatctggggttctctgtatacctgtcttcagcccattttctgtcttatttcaaagttcactggtgttccagttttgtttttagctgtaatgcttttcttagtgcttaaaatatatgtgtatatattcataagcaatatgaagtattgatttgcgtgttctaaaacatattttacagtgcctctccttcggctcgcttttttgtgtaacattgaatttttagatttttccctgttaatgcacgtaatttatatgtaatttattttcacctgtatagacttgtatgaatacatcacaatttattctttggttgaggaattacaggtttttcagtattagaaacactactgcgtttaaggttcttgtactgatctgtttatgcatatgtgaaagattcttgaggactgtattttaaatatgtggatgtttaaatttcaattaattaaaattaactcagttcctcagttacactagcaacatttaaagtgtttaatagccacatgtaactagtgagtaatgtattggatattgtggatatggaatcattccattatcataaaaagttttataggctagtgctccttggggtttatacctgtgtgtggaattgttgtgtcactgggcttgcacatgttgcacttcagtagatgttgctgagttgttctttccagtggtatctgagcattccctttctcaattgtcttgctaagaattggtataaacagaaattctaatttctgttttgtaggtgtgaactgtatctcattgtggttttaattgaattttgaaaatatatagtgaggctgagccttttttcttatacatgtgtttaccttttacagttctcatcttgtgattgcctcttaatgtcctttactcattttttcttttgagatattttaaattactgatttgcatgagttttttttgtattttatggatacaaattctttgattatatttgccatatatctgtgcctagtatgtgacttgtctttcattttgtggtgtcttttgcctcacacaagttttaaaatgaaatgtaatcacattatcaatttttaaaaatgctttatgttcttatgccttatttaagaaattacttcctactctaaggtcagagtttcccatatgtgctttgcagaggtagatctttcatctggtagtatgtaatttttgtgtatggtgtgaggtagagttggagacttgagtttttttgcatatggataaccaattatctttgtataattttctgaaaacttcattgccttaatagttttttgtttgcatgggggtcaatttctgggttctaattctgttccattggtctatttgtccctataccaatgtttcagttgaattttcctttttgtcaaagtacctatttttttctttattttttgtagagacagggtcttgctttgttgggtagactggtcttgaacatcaaatgattctcctgccttggctttccaaagtgctgggattacagttgtgagcaaccacacctggccaaattttcttaaaatgaaaataacagtgataatttaggtccaagccctcttcccaaaattgatttagctgatgataagctataatattggaatttataatataaaatgctacaatttttttttttttttgagacggagtcttgctctgtcaccaggctggagtgcagtggtgcagtctcagctcactgcaacctctgcttcctgggttcaagcgattcccctgcttcagcctcctgagtagctaggactacaggtgcgcaccaccacgcccagctaattgtttttattttagtagagacggggtttcaccatgttggccaagatggtctcaatctcctgacctcgtgatccacctgccttggcctccaaaagtgctggctgagattacaggcgtgagccaccgtgcctggcctagaaaatgatattataaccagcagatgtgaacaataacatttttttctgtgatgatatttgagaaaagcgcaacttaattacaaaagagtgaaaaacaatcactttaatcaaagtcagaacttctatacactttcaagtggtgaattgagcctcacttaaaatctaattttcacttttaatgccatttgttttcttttgagatataactgattcatttaccaccaatttttataaattggatttgtagtttggccattgtatgaaaatatttttttaaaaaagtatatgggtcatatgggtagtaatcaggcaaattggttttagatttgcagtacctgttcaattatctgagatttaggggatctagggcatgtgagtagaggttctattaggtttataaagtgcttgtgatgataatataggttaaggaccaagtacctgggaaagatcaagggcatactaaatagttgttcctaaagtaatgggacaattgcagagagagggatgagagaaggagacttaaggatgatgtgttgatgtgtatgtatatataaatgagacataaatgacttttggaaggattactaaagaaaaacagcaatagaagaagactagcctatgtccagcagcaaaaggaagtagaagacagtgagtcagatagtgaccagtacaggacgctaggtggtgccattagtcttagactgcttatttgaagtctctggaggctcagtaacctcagaatagaaagatcgaaaggcggccgggcacagtggctcacgcctgtaatctcagcaccttgggaggccgaggtgggtggatcacgaggtcagcaattcaagaccagcccggccaacatgatgaaaccccgtctctactaaaaatacaaaaattagcctggcgtggtggcgggcacctgtaatcccagctactcaggaggctgaggcagagaattgcttgaaccggggaagcagaggttgctgtgatcggagatcgcgccactgcactccagcctgggtgacagagcaggactctgcttcaagaaaaagaaaaaaagaagaaaaaaaaaggcactgcttgtatagtaaatgagcgaattgtcttattgagtataacccatagtatattatagttcttgatattttcttctccagtgatcattttgaaaaattttctggaatttgcattgtaaagaagtttgtccaccaaataaactgtgttttaaaagtaatagttcatttctttctaattttaaaggttgtatataaaaaggtattttcatttaaaattcatattaaaaaagataattgaaattttcatattgaaattatataatcagaaggaacttggtgttttaataagctttagtggccttttcctaggtcaatgtacaattccactgaatttttttgaaatacatatccatgggttccacattggtggattaaaccgtggaaagaaaatattagggaaaaagaaattgcctgtgtacagagcatgtacacatttttccttgtcaatattccctaaacaatatgacaaaagtttacatacatttccattgtattagatattgttagtaatctagagatgatttaaagtttggggaggatgtatgcaggttatatgcaaatacagttgaccctcaaacagcacaggtttgaactgcatgcacctacttatattagtttttttccagtaaatacagttggccctctatatgggttggtttggcatctacaagcaaaaatggatggaaaatacagtattcaaggaatgtgaaagttgtgtatatggagagaagggccaactttttggatctatgggttcaacagggccaactgtggtactttagtatgtgtgcattttggtatccaagttgggtcctggatccctcaaagatactgaggaatgactgtattgaagatgattccttgattcctgttacatttttttttaagattccagattgggaataattaagtgcattatttgatttctggagatgagttacaccattaaatttttgttgatatgtgtatcgtgcaggtgacagaaaccctaactcatactggcttaagtaaatggaaattattggatcacatatctaaaaagatgttggtatggctgattttaggtgaagcttgatgcagaggttcaaataattttatttggaccctcttcacctcatcttctagaggtagggtactgccatcagctattggcttatatccttatttgtgtgtgtgtgtgtgtgtgtgtgtgtgtgtgtgtgtgtctgtctgtctgttttagtggctctaaaaacaggtgtaggattatgtcatattaggcctctttggcttgtttgggttccatatctactctgcaactggagatagagttaacactgctggaaatttatggattaagagtgttgaagggatgattccccaaagaaaatttggatcttattagggaaataaagaatggttgtaaaattgcacttatttctttaaggaagtcatcttaaagctgtttttctttgccaggtatggtggctcacacctgtaatcccagcactttgggaggctgtggtgggaggttcacttgaagccaggagtttgagaccgctctgggcagcataatgagatcccatttctacaaaatatttaaaagttagccagagatagtggcatgaacctgtagttctagctacccaggagactgaggcaggaggattgcttgagcccaggagttcgaggctgcagctcgattgcgccactgcactccagcctaagcaacagagcaagtcaccatatctttaagaaacagcaacaccccccaacacatgaaaaacttttttttttttttggctaagctgttcttacactattgattttatttcactagaatttgtttttactttaatctcatttgtgctacttattagttgtgtgacttctcagagtccatttcctcactggcaaaattgttgatacaactattgatatagttatggtgatgataaaataagataatgtgtgtgaaatacctagcctagtgcctggcatatattagatattacagaaatgttagtccacttgtaagcatggttattacccagacatgtttggattttatcagtctttgctatatgttttaaattagcctataatctgtaagtatcacagatgttgtagaatgatcaattttcagattatcagtttgatttattgattaccgctttcagtgctgaaaatgacagttggtagatattgtccaattcatgacttgccagtatttttatcctagtacttaatgtgcagatttagcttctgtaagatttttacaattaatctatgtggggaaatataaattatctttaaggagtagcagtaagtgtagtgaaattatgataaatggttttattgtttggggaaataatatcaactgcttcatgtgtttgaagaataaaaggaagttggcagcaagggagaaagatgaatgattaagtatggcttaaacttgttttttaattaaagtgcttcattgttgtacacaatattcaaattatatttaaatgtaacattaatttttctattaacattcatctttattagaaaatattgcttgtatttatcataatttttttccccaccaactataacactcttataatctatttgggttaatgcgtgtgtagtctcaagaaaagagcctccttaattgtttttaaactgtttgaacactagagatttagtaacctacatttccaataactaacaatacatatgaaactcttgatagtgatggaatagaactaatcatttccttataatatagtgatacatcattatttgacttatggcatatttaactctggttagctacaagcagctttatactggtgtcttttattcagatttgagaagtatcagtgtaacatataaagaacttatttttactaattttcaccatattttatagacacaaaccacatgagaccaaaaatagtgtatactgacctggctggtcattttatggttggttattgtgtttattattctgtactatgtttgttgtatttgtgctttagttgctatttatttttaagaatattgtgttatataggtgtaaaagtgataagaatgtgccaggtatggtggctcactgtaatcccagcactttgggaggccaaggcaggcagatcacttgagctcaggagttcaagtatatcttttgtaatcccagcactttgggaggctaaggcaggtggatcacttgagctcaggagttcaagaccagcctggccaacatggggaaaccctgtgtctactaaaaatacaaaaaattagctgggcgtggtggcacgtgccagtagtcccagctactcgggaggctgaggcaggagaatcgcttgaacccaggaggtggaaattgcagtgagccaaggtcatgccactccactccagcctgggcaacacagccagacttcatttcaaaaaaataaataaataaataaaagtgataagaatgtgacatgttaatagggagagatattagtccgatggtaattaaaagcagagaaagttttaaataaactaaatggtgaagaattggtttgttcaacaataggagttattttgaagaataaagcaagtgattaaacatgtgaaaagtaatgtgcctatgccccaaagtgctattgcttagtgggttatatctattgataattacaatattagaaattaaaatggaaacggttgaaaatattcaatacatttaaagataactgtaataaacccagtatttgctagcataaacacatttttgtggaaaataatgatattttctaaaccagaaaaaaatagttaaaagaatggtattgctttttgcaaatctctttaatgtctgacttagtagaagacagctggattttcatctgcttctgcctgccatctgttgtaatatattgaactgatccagaactcctggtctcaagccattgttccacctcggcctcccaaagagctaggattacaggtgtgagccactgcacccagcaaagcaaatagttttaaccttgttggttccctgaaaagattttgtgggacccttgtagtccttagactatgctttgagaactgctggccttagcaattgaaagtaagtacagtaggagacattggtagaaatgcttttgaatttacagtagagtctgggcatcaatattagatgtctattgatcttttattaaaagactaagagtttgagaatttaaaggctaaaacattataggtcctgctgatcagacttttcatagccagatagttctgtaggcttaaggccctttaaatccagataatgtccaagtaagtggcaaggcagcaatttggattccatagctgctaaaaagttttttacggcatttgtacatagatcattaagaagagaggaattatttctcacaaccaatttttagtgtagacaaaactggaatattttggagaaaaatgtcttaatagaatgcatatagcggtaatgtagtcttctatttggcaggaatatatatagggatggtcactttagattaaagaacaaataaaacttaacctacttataaacagaggcttctgtattgagaatttttcttagtataacatatattcaccttagtatcaagttgtgggggtttttgatacccccaaattgacagttattcagctgaaacttggagataggacagaccttgattaatatttggcaataattgtcagttctaatgttggaatttttgctctaaccttgttgattaagcatttaacttatttacatttttatgcttagggattaaaagtatgtctactttacatttatattcaggtatatatatatttttgttgttgttgttgttttttcttattattattatactttaagttttagggtacatgtgcacaatgtgcgggttagttacacatgtatacatgtgccatgctggtgtgctgcacccattaactcatcatttagcattagtatatctcctaatgctatccctcccccctccccccaccccacaacagtccccagagtgtgatgttccccttcctgtgtccatgtgttctcattgttcaattcccatctatgagtgagaacatgcggtgtttggttttttgtccttgtgatagtttactgagaatgatgatttccaatttcatccatgtccctataaaggacatgaactcatcattttttatggctgcatagtatatattcaggtatattttaaggcagtttttaagtatatcttttttctttaatagtacttacaaaaatgtaattatttgatatgacaaagctgcttcatattttcatattagcttgaactttccattgatatgtcaagcaaataaatacttagtttttttctgagtagaaaccaactgtactgcaaaccccattgatagtaaattaattgcagggatttaacatgtagggaaaccttaattattctgaatatacttatgttatgatgtgtagatgatttgtttactgtctttaatgtgactgagtcaaaatatgtgtagttatttgcataaaagggaagtgttgctaatatattttgcattacttaatgttatatataaaattaattttccttgtaagggatgtgagaaatttttttactcctcatttctgtttattctcatctatttctttgaaaatgtagatttaatttatttaaatactgtgtgatgaaaacattacagatatgttcttgctctctttttttttttgagacagggtctcactctgtcatctaggctgagtgcagtggcataatcatggctccctgcatgtcaacctcctgggctcaggcagtcctcccacctcagcttcctgagtgtttgggactacaggcgcgcaccaccatgccgggttaacttttgactttttgtagagatggggtctcactatgttgcccaggctggtctcaaactcctggatgcaagcaatcctcctgcctcagcctcccaaagttctgggattacaggcatgagccaccacagccaatatgcttcattttctacatctgattataatttaaaggatagtattataaatgcttaattttataacctccaaatagtgatattgtattgctccttattgtgatggataaattataagacatatgtgtttaactggtttggtggcaagtctgtttacagaaatttgctgttaatttctcagttgttcacatgaacttatctgatttatagctttggccagcaatttacaaagaaacttcagtctgtagggcttcctgttgctctgagtgggggctccttctacccctgttcaacttcagtcagcccatggtctatagtatacctctcacaaggtccttatactgcagatcctctctgctgcagatgcttgggcttttgccttaagcacactggtgtaattagaagaagtagaaaagaagagaaagggtgaataataagagatgagaggatttaaaaatggttgaaacaggagttgtgaagtttgagtgtggtggatatggagatgtgcagccctgatcctccttcaaggaagaattgtggcccagttgtggggaggtcagtcatcagaaaaccttcagctgtctggcctacagaggacagccaaaaaaaaaaaaaaaattgccttaagctgtcagctccttcaggctctacctcagttgcggagagcctccttgcttaaggtcacatcctttccagggcagcacttatcctgcaatcaagcaagacatgtttaaaggcccagccattttgttcaggcctgagacaactctgacaggtgatataccaccagagatctgccaggttgcttgaggctttgttgggcccgaattgcaatttgatttttccctctgcccaattcggctttcttccccaaatctcttcttcttctttttttttttctttgagatgaagtcttgctcttgttccccaggctggagtgtgatggcatgatcttggctcactgcaacctctgcctcccaagttcaagcaattctcctgccttggtcccctgagtagctgggattacaggtgggtgctaccacccctggctaatttttgtatttttagtagagatgaggtttcaccatgttggccaggctggtctcgaactcctgacctcaggtgatccacccgcctcggcctcccaaagtgctgggattacaggcgtgagccactgcgcccggcctctccccgaatttctttcacagggattgactgctaataaacatcatatacccaaaactacttcagtgtccattttcagagaatccagcttgcaacaggcaggcgtatcggcttcatgttgtcctaaaccttacgtaaagttctatgcaattttttttgtgaatttgcatttttcttaggaggtctgtggcttccattatcttctttaagatagacttgaaaattaaaggtttttctcatcaaggacttaagaaggaaaggcttaaacattttttttttgactcaagatcaaactaaatacacttggccattgaacaatatgggggttagtagtgctgaccctttgcacagttgaaaattgacatacgactttttactctcccaaaacttaactattaataatctactgtgtaccagaagtcctaccagtaacatagtctataaacacatattttgtatatgtattaaacactgtattcttacaataaagctagagaaaacaaagtgttattaagaaaatcatggccgggcgtggtagctcacacctgtaatcccagcactttgggaggccgaggtgggtggatcacctgaggtcaggagtttgaggccagcctggccaacatggtaaaaccctgtctctactaaaaatacaaaaattagctcgtggtggtggcaggcgcctgtaattccagctactcaggaggctgaggcgggagaatcgcttgaacctgggaggcagaggttgcagtgagctgaaattgcgccattgcactccagcctgggcgacaagagcaagactctgtcttaaaaaaaaagtcataagagaaaacctgtttattattcattgagtggaagtggatcatcataaagatctttatccttgtcatcttcatattgagtaggctaaggaggaggaggggttgctttttaagagggggcagaggtgattagtaggagaaaaattttaatgtgtgtatatatatatatatacacacacacattatatatatataattttttgtagagacagggtcttactttgttgcccaggctggtcttgaactcctgggctcaagtgatcagcctgcctcctaaagtgctgggattaccagcatgagacaccgtacctgactggaggaactacgtttttgatatggtactcagagaactgagtgcagtacagaagcttatacacccccttttttttatagggaagtggggaaatggagaatgtagacagttcttttgagggccagtaaatcatttaggtgggaggcagacattgtgggaaggtgagaggtgaagctgcaggttgtcttaccatgcagatgaaggccccctgggtaatctgttggagctgccctgggaagaatagatgaagtctttctgggcagtaatgatcatgacttccagcttcttctcatgtagtcgacctttcctgatcatttgatgagatccctaggaagggagtttaagacaattgcatttcttttggaaagaagcttttttgggctgataaggaaataccagagagagcccctctctgcgctggggtgggggacacgacaagttagagggatcttgattgtgaggcagcttctaaggcctttaagcatgtctaagtgccagtctttgggggtgtggtttgagagaccaaaatagatgcccctttattaactaggacagatcttaaggttaaggaaacaaagttacctatcggtagaaagttcagggccctgctggtgtggcaaatttctaaattcctatggctacaagaaaaatcactcttattaaactctctaacaataggagctttcagacaaattatcacaattctgatttacagcccagactactacaactctggacagaattcccaacttagaaacattcttttcttttcttttttttcttctttgagacagagtctcactctgtcacccaggctggagtgcagtggcacaatcttggcttactacaacctccacctcccatgttcaagaaattctccagcctcagcctccagtgcggaccactatgcctgggtaatttttgtatttttagtggagatggggtttcgctatgttggccaggctgttctttaactcctgacctcaggtgatctgcctgcctcagccttccaaagtactgggattacaggcatgaaccactgtacccagcccttagaaacattcttttctgataagctttatagaccttgagtttcaaccagctttagaggctgggcacaaattgtctttgcatcgtatagtttttatcttttgatgtaaagagccaaattccaccttattttaatgctaaagccccaccccaaagtgagcataggatgtatattacacatatgtttacccattgcacgtgcgctcagctcttctcgtaaatatgaatagctttcccctaaatctgctgaatatatatgattctgttgtgtaatatgggccctgtgaggcataaaacccaacctatccttcccctgtttgaagacagagcacctttggtttgcactggagactttttcttcgctggttgcaaacccatattcccagtaaagctctcctttctactacgtagcttctggttatcttttggatgacaggggtattgctttctgggccccaacactgggaagcagcacttaaccattgtaagcaaggagaagggtgtattaattttctgtttttcagataacaaattgacacaaatttagcagctttaaaacaatacccttttattatcttatagttctataggccagaaatctgatacagtgtgtctcactcagctggttctcagctccaggttttacaaggcagaaatcaagatgctgggaggatagtgtatgttcctttctggaggctctaggggtgaatgtttccaagctctttctggttgttagctgaattcagttacttgcagttgtaggactgaggttcccatttacttgctggctttttgggaagtggtgtttacctgtttaatctcagtggtgtttacctgtttaatctcagtggtatgtgtagttatatgggattgtgtgttttaaattgatctcttttgtacctttcctttctattcctttgatttttgttctttttcatctccttttactttctttgggtttatctattgttccttttcaaatatcttttttttttgagacggagtctcagtctgttgcacagactgcagtacagtggaacgatctcagctcactgcaaactccacttccccagttcaagcgattctcctgcctcagcctccggagtagctgggattacaggcgcctgccaccacacccagctaattttcctgtttttagttagagacagggtttcaccatttggccaggctgatctcgaactcttgacctcgggtgatccgccctcctcagcctcccaaaatgctgggattacaggcatgagccactacacccagcctttaaatatcttaataagaatacttagctcattcatttacagccttttttcatttctaagatgagcacttaagtctatacatttttctcagaataccttttttgtgtgacctggactgtgtgagatagttttttactttttcattttgaagtgttttaaatttcttttgttttgttttgttttgttttgtttttttgagatggagtctcactctgtcgcccaggctggagtgcagtggtgtgatctcggctcactgcaagctccccctcccgggttcacgccattctcctgcctcagcctcccaagtagctgggactacaggcacccgccaccatgcctgggtaatatttttttgtatttttagtagtgacggggtttcaccatgttagcccggatggtctcgatctcctgacctcgtgatccacctgcctcggcctcccaaagtgctgggattacaggtgtgagccaccgcgcccagctaaatttcttttatggtttctttttgacctgttgattgtttgggaattgtttagaaatacgggtttttaaaaagctattttttctttgattgtacattgtggtcagagaataagttccatgtgatatctatgcttagaaattttttagatttatattttgccagtacatgactacttttgtaatgttttatgtatatttgataaaaatatagattatctaattattggatgcagaaattcatatattccatatatcattatatgatccatacatattcaagcttgttaattattatttcctgaatataatctttgtttatttatatgcttgactggtcagtaatagaaaaatgttgtgtcaaaatctactgggaggggtggcgacgtagctcacccctgtaatcccagcactttgggaggctgaggtgggtggtctgcttgagctcaggagtttgagaccagcctgggcaatatggcaaaaccccatctctactaaaaatacaaaaattagccaggcttagtggcaggcacctgtaaacccagctactcgggaggctgagacaggagaactgcgtgatcctgagaggtggaagttgcagtgagctgagattgcaccactgcactccagtctgggtgacagagtgagaccccatctcaaaaaaaaaaattaaaaaaaaaaaaaaaaaaaacaaccctaaaacaaatctactgtgatgttaggtttgtccatttttttccagatttttttggcttgatatattttgagactattttattagatgcacatacttttaaaattactttgtcttactggtaatgtgaacttaaataattttgttatgatcctttctttcctagttgatcatcttttagtttaaagtttatctgataacaattacatgtagttaaacttctttcttttggtcaacatttgaccaatatgtcctttttccttctttcactttttttatttttatttttagagttggggtctggatatattgcccaggcagaagtacagtgactgtttataggcatgatgatagcacactacatcctctaacttgtggcctcaagcgatcttcccgtcttagcctcctgagtagctgggactacagatgttagccatcacactcagcttctttcacatttatacattaggagtccttttgctttttatatgtcttttataatagccattagttggattctttaatcttataatctttattttttaacataatgatttttgatttttgttcatccctcttgttcttggcttcataaaaaaaattgaggccagctgggcgcggtggctcacgcctgtaatcccagcactttgggaggctgaggcaggtggatcacgagatcaggaattcaagaccagcatggccaagatggtgaaacttcatctctcctaaaaatacaaaaattagccgggcgtagtggtgggcgcctgtaatcccagctactcgggaggctgaggcagggagatttgcttgaatctgggaggcggaggttgcagtgatccgagattgcgccactgcattccagcatgggtgacagagcgagactccatcttaaaaaaataaacaaaaaataaaaattgaggccaggtgcagtggctcacgcctgtaatcccagcactttgggaggctgaggtgggtggatcatggtcaggagtttgagaccagtctggccaatatagtgaaaccccgtctctactaaaaatacaaaaattagctgggcatggtggctcatgcctgtagtcccagctacttgggaggctaaggccagagaatcacttgaacccggaggttgcagtgagccgagatcgtaccactgcactccagcttgggtgacagagtgagacttcatctcaaaaaaaaaaaaaaaaattgagtgccttttacccagagcctcaccaacagaattgccaaacttttgattttttctttttttgccagtttgatcactaaatagtgatgtttcatcttacctcgaatttttttttttcatgagtgaagttgagcatcttgtttaaaaacatttgtggccaagtgaagtgctcaggtctgtaatcccagcaagttgggaggctgaggcagaggattgcttgaaaccaggaatttgagatcagcccaggcaatgtagggagaccccgtctctaaaaaagaaaaattaaactggtgtggtattatgtacttgtagtcccagctattcagaaggctcagggaggaggatcacttgagcccaggagtttaaggctgcaatgagttattattgcaccactgcacccaacctgggtgacagagttagactagatctcttaaaacaaacaaaaagtttacttttctcttttctgtaaaatgtctgttcatatcgtctctaccacacttatttttttggtgggattgtgtctttttagtgatatctgtgtttttttgttttttgttttttgttttggagccagggtcttgctcactgcaacctccaccttcctcaagcgattctcctgcctcagcctcccaagtagctgggactacaggcatgtgccaccatgcccggctaattttttgtatttttagtagagatggggtttcactgtgttagccaggatggtatggatctcctgaccttgtgatctacccgccttggcctcccaaagtgctgggattacaggtgtgagccaccgcgcccggccttaaacaagtttaaacacacacacacacacacacacacacacacacgttttttagagttggggcttgccttgtagcccaggctggtgtctaacttctggcctcaagtatttctcccaccttggccttccagatagtttggattatgggtgtttacccctatgcccagctctaaataagttttaatgccaaccatcacttctatttgtagagattcctaatgccacccagtgtaatgcttttggggctatggcagtgtaaatttggttttctcactgctgtttataattcagctttcttgggtctattgagttgatcactgcacctcactctgctttccactgtccaaaattttgtcaccattatttttttgtttttcttgtctttcagagttttagtgaggtttcaggaggaatcagaagttcatgcatgtattaagtcctttggttttactgaaagtttgacacatattttgaattgtagttattttgtctttcctaatttagatgcaaaattaagttgtctagtgagatactcagttaatcaagttgagatattaagggttacaaaaaggtttaccacactggtttatatacaggttaagtatccataatttgaaaatttgaaattcataatgctccaaaatctgaaacattttgtgagccgacaagagactcaaaagaaattttgaataaggtatactcaacttggataatattcatttgaagcatgtaaaggaaataatggctgttatgtgttatacacaaatgtgaagatagtgttgatttgatgctttacttttgataatgttgatctgatgccctggttttgatcacttaacagatacccatgtgctttgtgggaagttgagttcttcttatgctcatgggctgagcccgaattaatccaaatcagtaatggtaattttatgccctctcccattgatttgatagtgagtggccttgagagccagttcattgggggaagttccccacttttttggtaaagaaacataagcaaggggaaggcagtctctcttatgatcctagacattaaattgttacttgcaactagtgtagctactttgaaaccgttaggggacaaaaagtcatcacactaaagatgacacaggaaaaacaaggaaagaacttaggtccatgatcttgatgaggcatcataaattacctatccctggagctgctgtagctctggactttttgttatatgagataataattcctcagattgacttagaataccaatcaaaataactattattttagctagctaagaaaaaaaatctgagtaaataccataaggttcagattacataaatatgaagatcaaaactgcaagttttctgagaagttagttattattgttttttactaatatgagctgcattggaaatttattttctttttaaaaaattattgctgtctttgtccataacttttatggacctgacattttagttgtttggaaaaattggtaattttaatcttttgttttggtatgattcaggttgacctgacattttaatacatctggctcctaggactgattaaagagacattttatttgttgaaatatgcacattttcttcatgaaattggttttcttttttatgtgtgacttttcttgcaaaagcttacaaggcacatgcttttgatagcagtgttacatttttaattaatattttagatgtaaaaggtgacagtttaaaagattgttttattagtgggttatccttaaaagcaagtggcatttggttttattttacaatagagtttaatcttacatgttttttgttaaagtaatgttaccaaaaaatctcttattgaactatttgtggtgaactttttaaggatgtttaagatttcacatgcagtttaactgatcacagatgaagttgtaaattaatacctcatgagcgtatttgactgcagggcattgttgtgaatcaaaaccgctttgttcctgtaaactgtgaaaggggtttaagcatatggattaaaattgcatggtgataccgaagtacttatgaaaagacactgtagttggatcatttaaaatgtactaaaatattacgaatagccataaaatataataattccctgaagcttttaagagtggtaagatttagttttatttctttgttggatttaactactttaataagaaattgttttgttgcttttggaactatgcatagtaatgagaataaccatgatgatgagaacactggaagcttcccagaaaacatgtatttcttcagaaatgttcttggttgtgacaaatatatatatgaagcttttccttgttcccatctgagtcattcccttaccagaacctttagaatgaaaggtttaatgatatcttctagtataagattatgaaatgagcattgtttagtgtaaaatcatatttttcttttgctgttaattttgtcttatagtatatgaaaatcacctggtgtagaatgtatttttcctgccataagaaactgtcaagaatctattgaaaaaataccatgagagtagttgttctggatgacaatggtaggttctgatttactgacgtagaagcaagcttcagttagccactttagtcataggtaaacactagattagcctaaggaaaaattgttgggaagcttttggagttctcatctgtgtcactgttttagatctcttcaagttctttgaaaattttggtacctccctgtttaacaaatattctgttttctgctatctaattagttctcatgtagatgacgtttctaatactaattaccacactttcttggactcctcttttataacgacctttatctccattccatttgatcaactgttttttaggactatgttctgaacctacttcctacccaggactgctttaaaaaaagtaatctatgttagcttcctgtttggcttcttcctagtttgactttactctctatatacagcctgagtggcatgctcggttatttcagctacatcttaccattactcagttctctctcccttttgaccttgctggtttctaaatctgggtcaatttgtgtgccttgcttcttgacttgatattacaattaacttattttgtcatactagatgttttcagccatctttgatccccaggttgctcaccaactcttattatcctttgaaatgactctcaaatcttacccctctttttgacttttatgtttgttgccctcatcttcatcttttttttttttttaatgagacggagtttcgctcttgttttctttctttcttttttttttttttttgagacagagtctcgctcttgcccaggctggagtgcagtggcgccatctctgctcactgcaagatccgcctcctgagttcacgccattctcctgcctcagcctcctgagtagctgggactacaggtgcccgccaccacgcctggctaattttttgtatttttagtagagatggggtttcaccgtgttagcctggatagtcttgatctcctgaccttgtgatccgcctgcctaggcctcccaaagtgctgggattacaggcatgagccactgcgcccagctcgctcttgttttcttgttgcccaggctggagtgcaatggtttgatcttggctcactgcaacctccgcctcctgcgttcaagagattctcctgcttcagccttctgagtagttggcattacaggcgtgtgccaccatgcccggctaattttttgtatttttagtagagacagggtttctccatgttggccaggctggtctcgaactcccgaactcaggtgatccgccagtcttggcctcccaaagtgctaggattacaggcatgagccaccacgcctggcaaattctatttttttttttttttttgagacggaattttgctcttgctgcctaggctgtgcaatggcacgatctcggctcaccgtggcctctccctcccaggttcaagtgagtctcctgcctcagcctcccaagtagctgggattacagacgtgtgtcaccatgcccggctaattttgtatttttagtagagacggggtttctccacgttggtcaggctggcctggaactcccaacctcagatgatctgtctgcttcggcctcgccaagtgctgggattacaggcgtgagccactgctcccagcccttcatctcttacattaggtgccatagcactcacctctgtggctctgtttcttctatcccaacagcacatgagggattgggtccccttccatctctccaactccctactcctactaccacataaattaacagaaactccctttagtagtaattctcaaatgaggtgccaaatcttggtctgtatggaatgtgtatttggttttaaaaaaattctaaaagtgattctcttctgaggtcctaaagggtcttttgcaggacttcctcaaattcgtcttttacaatgctataggagtcatctttgtgaaacatagatttactcattttacaactgtgtaacaacttattttttgccaagtattgggatagctactggagttagtaaagtgaatattagggtgcttacttttgagaaaaatgctaataatatagtatagccatcatttactggaacttttttaagtgctaggcacttcatgtatttatccttataatagtccttcagtgtagatattattagccactgtacagatgagcagccattctcagaattctgaggactcacatagtaattcattaggcaagtgataagctttatgataaatacttgaaagggacctctaagagcatagaggagggatatctagtttagagttggaagattaacagaataggcttcacagagaagatgatgtattaagctgagtatttaaagacaagtaggaacttagacaaaatgatagattggaaaatgagtgtgtggcatggttatatttgtgaatagtctttgtacagagatataagagaagcattttatgagaacacctggtgctcacttaggcaacacatatactaaagttggagaacagctcaatatgactgaagcatagtatgtgagatggggaatttagagtggtttagatataaagacattaaactaggttgtattttatatatttatacatctatatctatatatctatatctatatgcatctgtggtcccagctactaaggaggctgaggtgggaggatcgcctgagcctgggagatcaaggctccactgagccgagattgcaccattgcactccagcctgggtgacagagtgagaccctgtctcaaacaaaacaaaacaaaacaaaaacccagttagactgctggaatagtccaaataagaaatcaggaggccttgaaacgtgtcagtgggattaaagaggagagaggtggaattgaaggttatctggtaggtgcaatcaacagacttagtggtttaaaaagtgagtgagaggttatagtcaggttgggactatgtattaatcctttatttttttaatttactgtactgtactatgtattattgttaatatcctttatttcagattgacatatacccttaaatattcttaagatcatatccttaaggtcttaatagtctctgaataaatattggtataagctgcttcctaaatgatttcccatttatttactggtgtttttatatatctatttagagactgaatctcactatgttgcccaggctagagtgcaggagcatgatcatagcttactgtaacctcacactcttgggttcaagtgattctcctgcctcagcttcccaagcagctaggactacaagtgtgtgccaccacacctggctcattttttaatttttgcagagacagactcttgctatgttgctcagactggtctcaaactcctggcctaaagcgatccttcagtccctgcctcccaaagcagtgggactgcaggtgcgagtcaccatggctggcttgaggagtgttttttaaaacatcctggccaactgtgagcattgagacatcaatttatcaaggctttactgagtgctcaagggcccaggcacattctaagtcctggaagagggagcacagtggaagttctaggacttagctatctagttaaatatcttcagtttaaacagatttactcattttacaactgtgtaacaatttattttttggcagtttctgaacttccagttttcacgttctctagtattgacaacaagctgataatcttgctagacacaacagactcttgaggaaggaattattcattgtggtttatagacaatgatatttgaagttaacttgccccagggcaggagtatggttcttatataatgtaggaaaaggccagtcaacaccagacctcagagctaccatttaatgcattgtggcaaatgattcgcatgtattatcacacttaatgctcacaagaatactaccatgaaatagttaatatttaaaacaaatttttttattttttaaggagactgggtctcactatgttgcccaggcttgtctcgaacccctgggctcaagtgatcctcccacctcagcctcttaaagttctgggattacaagcatgagccaccgcgagtggtctttatcattattatcgctgttttacagatgagaaaactgaggcacagagacctgcttatggtgacacaagtaggaattgaaaagatgagatttgaatctagctggtctaatttatcctgaagttcaagatagcaatacaagaattatgaacatataaatggagtgagtggatatgatcgctcaagataaatctcttggccgggcgcagtggctcacacctgtaatcccagcactttgggagactgaggcgggcagatcacgtggtcaggagatcaagaccatcctggctaacatggtgaaaccccctgtctactaaaaatacaaaaaattagtggggcgtggtggtgcacgcctgtaatcccagctactcaggaggctgaggcacgagaatcacttgaacccaggaggcggaggttgcagtgagccaagattgcgccactgcactccagcctgggtgatagagtgagactccgtctcaaaaaaaaaaaaaaatctcttggatgagaaaactagacttaggatttaaggaaatctacgttaatggactggccagaaaaacaagtcataaaggaaaattaggaagtaatcatgagagagggggatgttatgtcctattacctgaagcagaaatataaatggaaaacatatcagtgttattaactgaagggaaaagaaaatataaaaatatatctgttataaaatatattctgtataaaactcgaataccagattgttgtttgcattgacgttgcctgtaatcccagcattttgggagggtgaggtgggagagctcaggagttcaagaccagcctgggcaacatgatgaaactccatctctacaaaaaattagctgggcatggtggtacatgcttgtaatcccagctactcaggaagctatagtgggaggatcacttgagcctgggaggttgaggctgcagtgagccataatggtgccactacactcctgcctggggcgatgtactgagaccctgtctcaaaaaaaaaaaaaaaaaaagagaaaaaaaaatttttaagtacttttttacttagaacctttcaaatgccatgttatgtgtctttatatacagaaaccctgggcaaagacagtatggctctttttttaagaattaggagacatgagtgtaaagcatatttgtaaataacgggcaataaaattaatgcggaaggtttggcttacattatttggggagggaacatataaaattcaatattcaaattgttacatcaacttgaagtacagtgaatcatgactcagaaaatgtatgaagatgagacaaggtagttgcctattggaatcttaaatgatacttttagtagagatcatgtaaatctgtgttgatgttaaagaaaagtgaacataggctgagcgcagtggctcatgcctgtaatcccagcacttcgggaggctgaggcaggcggatcagctgagatcaggagttcgagaccagcctggccaacatagcgaaaccccatctctaccaaaaatacaaaaattagccaggcgtggtggcgggcacctataatcccagctactctggaggctgaggcaggagaatagcttgaacccgggaggtggagattgtagtgagccgagatcacaccactgcactccagcctgggtgacaagagcgagactccatctcaaaaagaaaagtgaacataaacttttaaaacttcattacagagtaaaaagtcttattacgtttttctggccaaaatttataaacttttaaaatatttcagtgaagttgagctatattagaggtatctctttatgtacctctggaatggaactttgataactgtttattacagtagaaaataggatctaaaatgggtaagttcattatttcactttgctttcttaatattcatggaaggtattttgccgaaattatttttggagagtatatgaaaagtaagtaatattttataaaactgtattgcagctgatttggagaatgagtggctactttgaaaattgtcagtagataggaaataaaaataacagaatgaagcagctcacacacttcagagtttattctcaatattgttgaattgggccataatgaagcataatgcctggttaaactttattgcaattcaaacatcccaccagaaagaaatttttaaaaactatatcaacaaataaattcactgaagtctgtctatagcttcttctaggaactacaatttatttatttgtttattttaatattgttttttgtagagacaaggtctcactttgttgcccaggctggtcttgaactcctgggctcaagtgatcagcccgcctctgaaagtgctgggattacaggcatgagccaccgtacctggctgaaggaactacatttttgatatggtactctgctttaaacgcagtaggtactctgctgaattgggctaaataaacatttcacctctcaaaactatgtgaatatttggcttaagcaaagatagcctgggaccatgaagaaagctaaaacacttaaaaaaaatgtacccttatttaaaaagtagcatgtttctttctgatttggagtgttatgtttttgttgaaaaattggaaattacataaaaccaaaatgaaaaatatagagatgatcagtaatttcaccatgaatataatactcctcttatcattttgtattcccttccaactaatttttctcttaaaagtggcactatgtttttgaaaaagctgactactttaagaaaatttctctcagtttactttcttaatcgtgtgcttttctgaagagttggctctgacgttgactactatagtaaatccaattttgatgagtttttcttttttagtgggccaaaaaaaaaaaaaggaaagaaaattctcctttgtagaaaaaggagggaggatggaatgtatattgtagtacacctgaaaatccataccttttcttagccatatacacaattagtttactctttctcaagataatatttttatagtaaattaggattctttgttacaagtgatgggaaaccaaactagtgctatgctaggttaaaaaaaggaatttagggactcaagtcactaaactactcacgcgcgcacacacacacacacacacacacactcacacacactcacataggggttcaattgggccttaggaatggctaaatctaaggtctcaaaagctgtcagtttttttccttcggttcgttctttgtctctgagagttagcttcactttgtcagcctgcttctttatactcttcctgtttttcactctgacttactgtgtttataattatcttgggttagtttttcttattgctcatttggaaaaactatcagtacttctgattagtaatttcagatgtttttatattttaattttgtatgcaaaataagtatccgtgatattttaaaaatatttactaagtatttccctagtctttctctaaagggtaatctcaaatgaaacaactggaactggattctcatttgtttaatgactgaagaagtcttccaattactctacaaaccattgataacttttgttatttgtgaccagtattcatctagtaagatgttaaatgcttttatgaaagagacaagtgttttacctaaagaatgagaaaaaaaaaaccctaattttttgtgaagttttctccttttttgctgagtgcttaaagaaaaaaagtttatgttgttttaggtttttcttcttgcttatcaccctaggaactaattgtgttactttttaaatgtttaaatttaatttttcctgtcccttccccatgcttgctaattatgttttttaaaggtgaccctttaagatggctcttatagaataaagagagacactgaattttctaatcttgtggaagaggttatatttagccattggtattttaagttggagcacttcattctactgtgcctttagtttatgagtcatctggagaaaatgggctgcttcttgcttttaggaagagtctgtagcaaataataataataagtgctatgggagattttttgccaaataatttaaaatggaaaatgttttgtaatatattttattgcccatatgtaaaatacgtactaaagaatataggagtttttggctcattattatctttagctcataaaaataaacaaaagaggctgggtgcggtggctcacgcctgtaatccagcactttgggaggctgaggtgggcggatcacgaggtcaggaaatcaagaccatcctggctaacacggtgaaaccctgtctctaataaaaaatacaaaaaattagccgggtgtggtggcaggcacctgtagtcccagctactcgggaggctgaggcaggagaatggcgtgaacccaggaggtggagcttgcagtgagctgagaccgcaccactgcactccagcctgggtgacagagtgagactccgtctcaaaaacaacaacaacaacaacaacaataacaacaaaaccctaatgtcacatataacaaaaagaaagcattttctaccaaaacattatatagattgttatgagttataggtaagtggaaagcaagcataaaccatatgaaattattttatatgcaggatgtacagcagtggtcaaatcttaatgataattgtcagtaactggggagaatattgtgattattgaagtattgattttttttcaaatatttttatattacatgtggtaactttttataatcttgttttatatctactttagtatgatagctttaccatactagatattctatgaggggtagacagttggcaaaggatgtgatattgattctaattttggctacctttgtattatgtgtatcataatgatttcacgcttcagttttctcatctgtacagtattttgttcttcgtgacttttcttgcaggaatgaaaggaggtagcatggaacaaagaaaaaagtgtatcatattgtaaaacaggaaattttaaagtcctagagttcagattttaaatccaagatgtcatttttgaggtaaatttgtcaggtctccctgggacacagaatgactgcatcactagaatcatgagcccgtgggattgtttttttctttttctcaaatgtatttatttaacatctctctccctctctacttacctacctgcctacctacctacttacctctgttgtgaaacttttgggagctcagtattgtctactataccaagaataccagtcctttactcatttttttgcattacaaagatcatatggaatatactggaggggaatttaggtcttttggttctgtgttagaagagcccattttgtttttccctgcatgtggtagtcggtgtataggcctgtttctgtgatgggaagatgacaccttttgtcaaatctctatcctttttgtatgtcaaggaatcatttctttgcagtgaagtagagtgtgccctgtagtatagcactctgtgtccttagtcatagcaatattggaggattggagagttaatcatgtttgagaagttaggggacttgttctttcagcatctatttaatgaatctgcttgtatttttgatatcctaatgtgtcccaacactgaactcctaatctttcctctaaaacctgttccacctgcagccctctctatttcacttgatggcagttttatccttctcgttattcaggataaaaacctgagactcattcttgtttttcctctttctcttatatcccacatctaatccttaaggaaattatactggcaccacttgtgaaatatatcctgaaatctgatcacttataccatctaaatcgctaaagtcatctgtacccccacctctcttttgtgccaccatcatcctttgcctagatttttgcagtagcttcttagttactttctttccacctttgctgccttcaatatcttgtcagcacaacagattggcggacattttaaaaacgtaagtcagataatgacactctaataaaaatgagaaaggtttaaaaatagtaaagataggaagcctggacaacatggtgaaacaccatctctacaaaactagctgagtgtggtggtgcatgcttgtggtcagctactcaggaggctgaggcaggaagattgattgaacctggaaggttgaggctgcagtgagctgtgattgtatcacttcactccagcccccgtgactgattgaaaccctgtctcaaaaaaaaaaaaaaaaaaaaaaaaaaaaggaaatattatttgcaggtgaaatggttgtatttagaaacaagaacatttaagtggcaggtagttacagaattgatacacacaaatatattttttatacttttgtatgtttaaaaaagccacaaattacaaattatgttaacagcaatataaaaagaatgaaacatgagtggggtttattctaagctgagttgttcaaaattagggtatctattaacataatttacgatgcttctcagagggtttctgttgttcactcagtgactgcagacccactagtactaatgaactactctcttaacttgttattgaactacaccttctccaatgagtctgagtctttaacattgcatactcttttaatctgccttggggtactatatagagctttcttatatcttatagttactcttttattagagttaaaatacttctttatgttaaacttctgtttaccttactctgtgatttatatcttttgattagaaaagactaatgtaccatattagtaggtttttggataaatttttatattattttcatagatgctagaagagcatttgccaaaattcatcattgattcttttattaactttttgtgaattaaagtataacatacatagaaaggtataaaaatcataagtgtacagctgaaagaattactgcaaagtaaacatacttgcttaactaccatttagttctagaaatagaacttggccagcagcccagaagcacccctcacccccaccttcttccccaaaggtatcttctgtcctgacttctaacattggagattacctttgctgttttaaactttaaatatatggaatcatatagtgtgtactttttgtctctggcttctttggctcatcattataagctttatccacattgttgaacatagcagtgcttttgttcattttcttttccatgtcctattccatcatatgaatttatctcagtttatttttatattctactgttgatgatgaatatttgggttgttactagtttggccatattacaaataatgttggtatgtgaacattcttgggtgtgtcttttggtgctcatatgcacatatttcttttctttctttttttttttttttgagatgaagtcttgctcttgttgcccaggctggagtgcaatggcacagtctcggctcattgcaacctccacctcccgggttcaagtgattctcctatctcagcctcccaagtagctgggattacaggcacacgccaccatgcccagataatttttgtatttctggtagaaatggggtttcaccgtgttggccaggctagtcttgaactcctgacctcaggtgatctgcctgccttggcctcccaaagtactggaattataggtgtgagccaccacccctggcccaaagtgttatctttagaacagcagaaatgggagttccagtttttccactgttattttctatcttcagacaaacaactgtttagttatactggtaaactggcagtggtatatcattgtagttttaattgtatttccttgaccatgaccactaataaagttaagcttttaaaaatttatttatatgttgatcaattagatatacttctttgtgaattacttaagttttttacccagttttctattgggtgtttaagaatattttatatttatttatgtatttatttttgagacagggtcttgctccgttgctcaggctggagtgcagtgatgtgatctcggctcactgcagcctccgcctcctgggttcaagtgattctcccacctcagcctcctcagcagctaggactacaggcgtatgccatcatgcctggctgatttttgtattttttgatagagctggggttnnnnnnnnnnnnnnnnnnnnnnnnnnnnnnnnnnnnnnnnnnnnnnnnnnnnnnnnnnnnnnnnnnnnnnnnnnnnnnnnnnnnnnnnnnnnnnnnnnnnnnnnnnnnnnnnnnnnnnnnnnnnnnnnnnnnnnnnnnnnnnnnnnnnnnnnnnnnnnnnnnnnnnnnnnnnnnnnnnnnnnnnnnnnnnnnnnnnnnnnnnnnnnnnnnnnnnnnnnnnnnnnncccgtaatcccagcactttgggaggccaaagcgggcagatcacctgaggtcaggagttcgagaccagcctggccaacatggtgaaaccccgtttctactaaaaatacaaaaattagccgggcatggtggcacgtgcttgtaatcccagctgcttgggaggctgaggtgggagaatcacttgaacctgagaggcggaggtggcagtgagccaagatcactttattgcactccagactgggcgacaagagcaagactctgtctcaaaaaaaaaaaaaatttttttaaatgaaaaatctctgtactcagggctatgacactttttggttggcatatgtctttttggacttgttctttcattctttaaatggtgtctttgatgaaccgatgttcttcattttaatatggaccctctttttggtgttcctccctttttttagttttcagaagatattgtctatgattggttttacttctattggttttatttcttaaatgtttggtggaattcactggtgatacccttgaagcctggagttttctttgtaggaatgttccattaaaaaaaaaatacttaaagggctttttagattttttttcacttcttaaatcaactttggtaaaatttctttttctaagtatttgtacattttgtcttaagtgttaaaatgcgttagcataaccttttccctacagtatctttctgtgatttttaaatatgcatatgacctatcatttctgctaatgattatttgtgccttctttgtaagagttcatcaattttattagcgtttcaaagaactaactttggctttgttggttctctgtagatcatgatgtatgttttctatttccacgtatttagctccttttttttttttttttactttctttgggtttcatttgcagtttttttccttaccctaaccctacagttgtttttaaaaaaagattcttgagatggatacaggaccatataaaaaattttttttatgcatggcaagaagtttgcataaagtcagaagacaaattacaaacttgtaaaaaaattatttaataccaattacatcaaagtccaaggcctacttctttaatatgtagtgagtttctaaaagtcaataagaaggaaataattatgtattaaaaatgagcaatgtttgtgaagagttgatgtgtagaaaagttaatattaatggcagtaaaacatatgaaaggatgttcatcgtctcatgaggaattcaaaataaaccttctattattaaattggcaagtattttaaaaatcagtaataagtagtatgggcaaagttatagagaataggcgctttcataagctatcataaggatataaattgctacaacctctttgaaggagaagtttacattatttatcaaaattttaagtattcttttttttttttttctttttttttgagatggagtcttgctctgtcacccaggctggagtgcagtggcgccatcttggctcactgcaagccccgcctcccaggttcacaccattcgcctgcctcagcctccggagtagctgggactagaggctcccgtcaccacgctgggctaatttttttttgtatttttagtagagacggggtttctccgtgttagccaggatggtcttgatctcctgacctcattaaccgcccctctcggcctcccaaagtgctgggattacaggcgtgagtcatcgcgcccggcccttaagtattctttaattcacgaactatgtgtataaagatgtttatttccatattacctataaaagccaaaaaactagacataacctaaatgtttattctagagactaggttgtagctacccaatggaaaactatgtagccactaaaaggcaatagactgttggtactggttgttacagaacaagctccaggaaagtttttttgcagaaatacacattttattaaacgagtttgtgggtgaagtgtttgtattttgtgtgtgcatagtaagtttctgaagtgcataactttgtgtatctcactaggtaaatttgagtgttgtatttatggagttggatttacaacatctggtatttactattcagtatcactttaggttatgtttcgttttctcacttatattgtaagctcatagaaaatggaagatatggactgtgttttatgcttcataattttctccacattgcctagcatagtatattgagtgtgaaacagacttggtttttaaaaaacaatttaagaacaaatttaacactaaatatttgttttccagtttcagaacctgttcacattatctttggtgagctgtattgtagctctctgtagtagataggtataatactcattaatttattcatatgttaccatagggcgaactgagcccaagtgaataagtgagttatttaaagtaggggttggcaaactatgagctgtgggctaaatttgtcccacctcttgttctttatggcctagaagttaagaaaggtttttatatgttttaatgtttgggagaagaaagcatattttatgacacatgaatgttatatgaaatttaaattttagtgttcataattaaagtttattagaagacactgatgcatattcctttatgtattgtctatggctgccttcccaccactatggcagaattgagtcgttgcaacacagattggagttggcattttcattgcttcacactgctgcttggcatactacacatctcagtaatgcagttataattcaacagtgtttcaagtgccatatgtattgctgtgctataacactgtattttttttttattactagggcatacctatgtgtcaaaacaagaaaaggagaaaatctcatggttttaaagcacagtggactggggattattttatccaattagatggtaaagcattaggtttattatgcccttctaaagaaatagaatatatattgccattaccaggctaagcacttacagtgttccaaattcataggaacataattctcataaaaattcaaaaatttgaaatgtaatatgttacaacagcagaatttttcatgcactcactttttctctcactcactctcacactgaaaaggaggctggacttaatataagattttgaatgacccatttgttagcaaagcaaggagagctatttactaatggtaagttagtaaattttcattgtagcagctaaagaatattttcagaaaaaaattacatttttaaaaatatcattagccatttggtgaccatagttgctttaagaattgaggacattaggctcgttgcagtggctcacacctgtaaccccagcattttgggagtctgaagcaagaggatcacatgagcccaggcgttcaagaccagcctgcgcaacatagtgagaccctatcttttcaaaaataaaaataaaaagagtattgaggattttaggccaggtgtggtggctcatgcctgtaatctcagcactttgagaggtgaaggtgggagaatccacttgagccctggagtttaaattcagcctggacaaatggcaagaccctatctctaccaaaaaaaccccccaaaaaaacaaaaacaaaaacaaaccagaattgaggacattagccaggcatggtggtgtgcacttgtagtcttagcttcttgggaggctgagatgggaggatccgtttgatcccaggagtttgagttcagcctggggagcatagcaagaccccatctctaaaataaaaacaaaaaagtgaattgaggacattgggtgtaacatcggtagtcagttaaagaagatagtggttttacttggctctgatgaaccaacagatgttactgacactgatcagttattcaaagagccaatgctgagtttgaagtgactgaaaaattagctttcatgaaaagtcgatgaaacatctgcagacgtgaatattttcaaaaaatttgagaaaacactaattcagcataatctgaagtagaatctgttaagatgtgttgctactgatagtagtaaaaatatatgtggaggccgggcacagtggctcaagcctgtaatcccagcactttgggaggctgaggtgggcagatcacttgaggtcaggagttcgagaccagcctggccaacatggtgaaaccccatctctacttaaaaaaaaaaaaaaaaattagcagcgtgtggtggcatatgcctgtaattccagctactttaggaggctgaggcaggagaactgctcgaacctgggaggtggaggatacagtgagctgagatgatgccattgcactccagcctgggtgacacagcaagactctgtctcaaaaaaaaaaaaagaaatatatatatatatataaaatatattaaaatacatatttatatcataaactttgtagatttctccacttaacctttttgctccatatatattttaaatatacattatacatatatatggatcagaaaaaagggttaattggagaaatctacaaagtttgtgaaactataaggttgtaaagcctatggctattcattgtattatttattagcagctattttgtagacaacatttgaatctatgatttattatttgaatatcatttattattgaaccagtattatcaacagtgaacttcatttgctgtatgaagagatagttctgtaagtttttatcagaaatttaagctgtatatttgacttgcctgaccacccatcagtttgattactgcagttgtttgagcttatggtcaagattcaaatttttctaaacaaggagaagctccttcaactactgttattgcatatgaaatggctttgaaaattagcttttactgaagactttatattgtttcttttctttcttcttcttcgtcttcttttttttttttttagaaacaggatcttgctatgttctccaggttggtcttgaactcctggactcatgtgatcctcctgcctcaagctcccaaagtgttgggattataggtgtgagccatcatgtccctggctaatacattatttcttaatgatactgatattgttgttgtttgtttctttctttctctctctctctctctctccttgcttccttccttccttccttccttcctttccttccttccttccttccttccttccttccttccttccttccttccttcctttctttctttcttctttgtctcttttctcttttctcaacagggtttcactctgtcacgcaggctggagtgcggtggtgctgtcttggctcactgcaacttccacctccctggttcaagcaattctcctacctcagcctcccaagtagctgggactacagcctcatgccaccatgcccagctaagctttttgtatttttagtagagacaggatttcaccatgttgaccagcctggtctcaaactcctaatgtcaagctatccactcactttggcttcccatagtgctgggattacaggtgtgagccactgtggcagcctttatatggtttcttaattttgaggcataccagtgcttatatgtaaaacttatactatggtaaagttatttgacagcagctaatgtagtttgaatcacaagtaatgtcaagctgctttatatacaatgtcccattctgtcaaaagttaaaacaagaagtgatacttctatttccacacacatttgtagcagatgtttgtgggctcaaactatagttttagcaatattgatgccagagcagagataacttctttatttcaaaatccatctaacactgcaatcacggagcttctaccttatgttacattagaagtgattaatctgcaatctacatgctaaaggggaaatatcaagaaaaagctctgatagaattctataaatgctttctaagtgataaatatgcttaatttaaatcatatgctattggatttatatcagtatttgggagtatctatttgtatatagagacattcaaagttgaaatatgtgaaattattatagatcaatgttaacagatgaatatttgcgatcaattttgattgataacagtaactttggccaggcacagtggctcacacctgtaatctcagcactttgggaggccgaggcaggtggatcatgaggtcaggagttcaagaccagtctggccaatatggttaatccccatctctactaaaaatacaaaaaattagctgggcgtggtggcgtgcgcctgtagtctcagcttctcgggaggctaagacaggagaaacgcttgaacccgggaggcggaggttgcggtgagcccagattgcaccactgcactccagcctgggtgacagaatgagactctgtctcaaaaaaaaaaaaaaaaaaaaagtaactttaaacaccaattaaatgaaatgttatttcccctaaaagaattacattcttctcattactaaacctgataaacaaaaaattttattgttattaatattcctaaatttgtcagtaaaagttttttgttttataagtacctagataatgtccttggtttttttctcattacccatagagcccaaactatttactacctggccttttacaaagaaagctttctgaccctcatcttcttctaaaagaataatagatgtctaattagaaaccagttatgcattgggttgagtatcctttattagcattttaaagttcttgcatttcgaaaatactaaaaatactcaaatttagaaaagttagttgtcttcataatgtaatttaaatgtttgaagtgttacaaaagagattcacctgcaattaaatatcagcagagtgtgtcctgtacccttatcctgcaacacttttctcctatagtaactgaatgactttggaattcagggctttgtatttttacctttttttaaagcttatttttgctttcttttcttttctgttttttttttgtttgtttgtttttttttttttttttttttttttttttttttttttgagatggagtcttgctctgtcgaccaggctggggtgcagtggcgtgatcttggctcgctgcaacccctacctcccgggttcaagcgattcttccacctcagcctcctgagtagttacaggtgggaccaccatgcctggctaattttttgtattttagtagagatggggtttcaccatgttccctgggctagtttcaaactcctgagctcaggcaatcagcccacctcagcctcccaaagtgctaggattataggcatgagccactgcccccagcctgtttttgctttcaaatggactgttgatggttttctcagagtgctttacttttgaagtccagtttgtactggaaagaatttatattccaggctgggcacagtggctcatgcctataatctcagcactttgggaggccaaggcagatggctcacttgagtccaggagttcaaaaccagccggagcaacttggcaaaacctcgtctcttaacaaaaatattttaaaatgagctggttatagtgctgcatgcctatggtcccagctacttgtggcactgaggtaggaggttggcttgagcctgggaggcggaagttgcagtgaacccaaatcgtgccactgcactccagcctccattacagagggagagcctgtctcaaaaaaaggaaacgaatttatattccacattttactgagtctagtgtgagtttttgtttaaaaaaaaacaacccaggaataatttcttcaaattcataagcatggcaggcagttttattttaaattctgtgggaaatatgaatttaaggatctcatgtaccatgccttgataatcatttctctgtaatgtatattttggcaaatgatattgttatgaaacatacttttgcattaatattaactttatgcataataaagatgcatcttcagttttttgtttgtcctatgagagtttacagctggggacatcttttacaaaagtatatttataacctgttcagaagatatgaaacacaataatgagataatcacctatgtatttttcagttagcagttacaaaaggattattgacacttatagttgttaatatctcagtaaaaacatactcttgtgcttattttaaaattgaacgctagtctatatttttaaagtttccttttatggaatattttgtcttttggcactttgcatctggattatagttcccccatttaagaaagaaacctgtttctattcaataggattaaaaacacactttcagttttagagcagatttatcatctacccttcaggctattctttaatatggagctcttaaaaatgagtatattaagatattccccagatgttttaaacttcagcaaacttgtggttttctttatttgtagtatttggaagatgaaagaaagtatctccagtatctaaacacttttcatattggttttaatgttgttttttttttttttttttttttttttgctagaaaggcatgcacaagataaagcttctacactgataaattttcaaagtccttgcttttaaaatatcaagctgggtgcagtggctaacgcctgtaatcccagcactttgggaggctgaggcgggtggatcacctgaagtcaggagttcgagaccagcctggccaacatagtgaaaacccgtctctactaaaaatataaaaaattagctgggtgtggtggctggtgcctgtaatctcagctattagggaggctgaggcaggagaatcgcttgaacccgggaggtggaggttgcagtgagctgagatcgcaccattgcactccagcctgggcaacaagagtgaaactcttgtctcaaaaaaaaaaaaaggtattgtcaaaatgagagttgtattagcagtaatgtaaaagtaatattgtatgtctgtatacttttgaatttacattgttatgtgattcatatttgttttgtatagctgtaacatttggttaattgtttagtgggttattgaatagattattttcttcattacttagtacagtggggattgagaatgctttgtatcaagtgtcttacaagtattgggaagttcgaattaaaaatattaaagatgtcagtcatttacttctttttttttttaaggtggtagcccaattgaaaattttctgcaaaatcagtaactaagttatttttccacaattataaacttagttgatggcatttattgagtgcttactacgttcaaggtaaatgaaatgaaagagtggaatagtgcattatacacgcacacactcaagggaagcaagtataaacaccttatttcatctcacttgtttagaaatttgattttgttttttcttgctgggtaacatatctgtgttaatcgaaaatttatgacttagagtggaatttctctaaaaagcagtaggtgacagggatacaagataaataatttcatcagagaatagaaattcttttttacaatggataaaattgtgcttgtaacagggatacaagcacaaaccaaatcaatgtttaattattttaaaaatattcaagggaaatctagttttgttaaaatttgtataggttggtagtgtgcatgttcttaaaaatccaagaacaatagcagcagcaattcttatttaatctttctttagtgtgtccattcaaccattcattcatcaatttttttttctgtgtacccattattcatcaggcactatgcttaaatatcgtggaacacaaaaagaaatagtctttaatgctgtgttttacaaatgaggaaacctaatctcggagaacttaaattacagttgtcctttggtattcatgggggattggttccgggaacttcctcagataccaaaatccaaggattctcaagtccctgatataaaattctgtggtatttgtatataacatatgcatatcctcccatgtactttaatttctagattacttataatacctaatataatgtaaatgctgtgtaagtagttgttatactctcttgtttagggaataatgtcaaggaaaaacactctttacatgttcagtacatatttttccaaatattttcaatctgtggttggttgaatccatggatgtggaacatacggatatggagggccagccgtacttgccccatgtcatataattagatgaatatagaattaaagccaggtccgtctgacagagcgtttgcttctaaccattgaggaatgttgcctaccctgatgactctactataggaaatcatatattgatatcaaattgatcttatatgtctgtagtgaggaacttggccatgttggacctatccccttccctccttgctcctctcctttcttcctcccttacccccacagcttcacccctcccttagctcttttttctgacaggtggctgtttccatccctgtttgctggcaccttctccacttaaattttggtatatcccttggttccactctctgtgttcttctcttgtgtatgagtgtggattttgtgtttgcttatcctgtgtggagtttctgagcttgaatctgttaagagtatgtcattaatcaaatttggaaatttttaagccatttttttttctttctttcctttccttttccttttttagaagcaggttcttgctttgtggttcaggctgcagtgcagtggcacaatctcagttcactacagcatcaaactcttggactgaagtgatcgtcctgcctcaacctcctgagtagctgggactacaggcatgcatcactatgcctggctatttttatttttttgtagaagtagggtctcactatgttgcccaggctggtttcaaactcgtgggttcaagcagtcctcctgctttggcctcccaaaatgctgagattatagttgtgagccaccatgcctggtcaagccattattttttcaatttttttttttctgcaccgcacttcttttcttctgttactcatgcacaaatttagatcttttagtattgtcctataggtctgagtcttttttcattttttaaaaaaatcctttttctgtcctgcagattggaaaatttttattgatttatttttaagtatactgattaacagtcttcttcattttactattaagcccatctagttagttttaaatttctagttattgaatttttaaattctaatatttttattttatcttctttatcttctgtttctttgctgagtcttttcactttttctagctgtctgaagagtcctagtagtttgtggttccctggagctctccgccttggtaatccagccagagaactggggctttattttctcagctctgcacatacttcctgtgactgtaaccatgtctgggtctaagtagtaggcagatactcttctcttgcttttttctttcttgtgttttagtcaaattattttacctcttattataactttgtttattattatttaccaacactttatatgcaaattgtagattattcagattgtatcttctaccagagtgttcactcttttctgtatgaggctgatacggagtgaggggagagcttattaccttaataaaaattaagggttaagctaggtcaaagttgatttttcagtgttgacagttcagttgagcctgtttgcttctgttcctagagcctgaacctctaggacttttaattgataccagtggtctccgctctgaaacagtccaccagaatgagggtaccaaactgacctcagaggtttccaggttaatgcagaggtttctagcttaatttctttctgccttcaaaatttggcaattatgtcaaaggggaaaatgatcttttgttttaggttttcagtttccaatgttactacttcagccttatgtaattgctaaaatccctactgttttccccctattgcccccttccttatcattatcttctgctaagcacaaagtgtgaattttcaggttccacatgtaaccagtataagtatatccttccccccaaaccccagtggaaatgtgccacggatccttatttttattctccactccttctagggctttcatttcttgcctattatgtttttagttgctcttttcttgttctgtctttgtaagcacagctagagtcagagaactttctgcttttggaactattttggttaacctctttaacttagcattcagtttcagaattcagcaaatgtgttttggggcaaactagctgtgtgttttaggtttgggaaatgtcaaattttgtttctctgtcttcatgcttctggctgcaaatgttggcaggtggaacaaaaagctgccagttctggcctgcccctgtgaacaggtctcacctctccggaaatttatccactttgtccttgttgcttcagagctctttggtaccattaacaatgtgacttatgatttatatggccttcctaggtgtcatcagtaggaatgttggctgtgatgcagtatatgctacccagaatcggaagttccatatattatgttttgataagagattttaggtgtttgagtatttctgatgagtgacattttttgaagtttgctagagagaaataattagctagttattgcttaactactctctctccatatctattacatatgtttctggaatatttctatggtcagagaaactcaggcccattataaaccatggactctggtagaaatagaagctgaaagcaaaccagtaagggaggtggagtgtataatttgtgttttggaagtacctgccggtggacttgggggtgatgctctaggtttaccatgagattactcatctaattttgagaaccactgtcctgcagtatttttcttttgcttacatatgactttttctttttatgatttaaaactaaatgtcaaccagttactatttaatgaaaatcataaattggtttagtgaaattttgttgtgttcttacaatgggtagaaacctaatgcacttatcatgcatctaaatttaggaataattcattttattttaatcatctatacttatatacaaaatgcttttcagcagtatatttgattatcttaggtacaatgatcttcatgttcagagttataaatgggaataattaaacctttaaacatattagagttgaataagggcttatctaagcaatacatgcttaaaattgctttcttatcaaaaaaataaaattggaggttcaagaagtgtctttaaattacaatccttatgaactaatagcttaaccttagttttgaataactgttactttttccgtcttttaaaaagatgcttaaaaataaacgcatgtcgaaaatgttattttggcttttagcaaactgacatttgagttttttaaaacctcactaaacatttgtggtaaaagatttcaaagctttgaattttacaatttgcctgtcgattccccccctgtgttattctattaacatttgatcttaataagtataacctgtttagaatgacttatgtttttaattatttgtttagatgagaagtttaaggaataacttcatcagaaattctacttggcagttatgaatgctttcttaaggaagttaaatttttggaatttcactgtaaagattttaatcacatgtcctattcttcatacatcaatctataaatgttcaaaaattgttaatgttgtttttatgctgtgctgatgttaacacaacgtgaggtcttctttcttctcctgataatatgctgagcgcacacacactctcatatgctcactcgctctctctctctctccttccctcccacccctgagtttgaaataagttagtggctttagtttctttgaaaatggaaagcaattgcccttaggtagaactggaaattgtaaagtgttggttttgtggacattttcctgttcataattcttgttatatcttatttataagtacttttattcatataggaataaatgattctatgttgaagggtataatcatgaagtcttttttattttttcgtgttagataaggagaaaaatgacacattaaaaattacagtgctatttgtgttttaaaatttcttctgtcgcttttgtattccttattgttctcttcactttttctattgtttttctagcttttcaggatacattttctaaatgcatcctaaatataacttacaatagttgccttttatttaaaagtaatacatttagtttccaaccacaaagtgtttaattctacatatttctatttttattttacatgatcttaatatatccttgattactgtgttgatcttctagtttttaggctgccacttataccatcaaaagccatttaaactggacttagaggataatgaatctaaattttcttatcttcctcaaaacaacagatacaattaaagtcacaaataagctgtaccttcagaattgctaggagacagaacatagtaagaattcaaatctcttataagcagagttataaacatcatattccaatattgattctgctgctttgtctgtacatttggagagcagaggtagcagggaggtttaagagactgaaaaaagggagaggggtgtatgaagtgtagatcagtaacaaacaccatcactcttgaaaagaaaaagtccaacagaggtcctagacctgtgttttagacaggtgggaggacagtaaattaatttttaaagacaaaataattatattgaatgaatttattgatcattttgttgaacagttagtataaggacatcccgtattatatttcagctttcataaactataagtgtttatgtcttatattttgtgttctttcaactttatcttaatttgcttctgttatttttaatgccatttttgtacatttgtttaatattactatattcatctttgttgtaattttttcctgtaataatgtaacataaataattataatattacaaagtttattaaatttcttccaatgataattaatatagtaggcttgtggtggaaaaatggatcaggtactgtccttccaattctgtcaggcttttgattgaggtgtttatatggccaccccgttcagacaaagaatgtcaaccaaaaggagaaagtaagaaggaatctataaattactaaaattcccatactttatttcctatggaaaaagtcatgtaaggaaaatatatagaagtttcccgtaaaatgtaataatatcataaactctttcatccttaaacacctgttagtcttgccacagcacaatcagttccctaaagataaatatttcttggtttgttagttggctacttaggagttccttttccttcttatgagttttcttctctcctgtatttcttttctaacaccatccaactggttatccaaactagcaacctcagaattttcatccctcttccacatcttacatttctttatcacatcctgtgtcttcaacttcggaatgattccttactttggtctcgtctctctatcctgtctttcgtatgagctattctaaaggcaggtggtctgcttctctttactctgtccagtgttatcatcatttttaaaaagtctgcttttcacactgttgctaaatagagtttaataatttctagtagccttcagaataatgtctacacttattagcctgatagttaccttttctttgtcagtttttactactttgattttgacctgcattttagtctgtgtttaactggtttttctgaatacgtcatgtttattgttttagcctcaaccctgaattttttttttctcccttaagtgtcaaatttcaattcagatgttaaactttccctgcctttttcattcagaatcacttctttctttgctcttgttttttattcagctttgttctatatatggttctttaaaaataattgtatggaaaattgctatgttcttttattataaaatgaagttgatttttcattacaaaacagtttatatgcttattgcacaatctaaacagatgtataaaagagccataattgttcctaatttggcgataactactgttaataccttggttgtattcttccaggttcttttcagtagacatgtatattgggtaattttgtttacacaaaaagattacattgtgcatcagttttcataaattagcacttctcatttgaaataacatggaaaatacctatcaatagatgtaaatctattttaaatctgtaacatttaaaaatgtttaacacttaagtagaagcaacacatacacatagtaaaactacatcaaggtggaaaattaaacgcttatttgaagacttctaattttgggaaattgactaattctgctattcttcaggatttctcaggccaaaattcagaacaaggctaaatttgcccatttccacctactattatttattctttctttatattatgctagagcttgtaggctctgtactaacacaagaaaggggaagaaaaaaattgtccttattcacaaatgataattatgtttaatttattaaaaacacataaatcattggagttaattaaatattagaaacttggctggaaaaaattgatataaagaatgtttctaaatatcagccacaaataaagattaaacaatatcataatagtattaaaacataggaagtatgaagtagtgatcagaataaaagatgtggaggctttgtggcaaacattatgaaactttgagagatactgtaatcatggattagatgatttaatattggaaatatatcacttttcccagcatagatatagataagtagtgcaatcactgttaaaatcctaacaagttgggctgggcatggtggctcacacctgtaataccagcactttgggagtccgaggcaggcagatcacgaggtcaagagatggagaccatcctggccaacatggtgaaaccccatctctactaaaaatagaaaaattagctgggcatggtgggatgcgcctgtagtcccagctacttgggaggctgaggcaggagaatcacttgaaccagggagtcagaggctgcagtgagccgagatcgcgccagtgcactccagcctggcaacagagcgagattctgtctcaaaaaaagaatcctaacaagttggtttttggagtttgacaactagttgtaaatttatatggagtgcaaaaaaccaagaacggccaaagcactcatgaagaacaacagggtaaggacacttgtagatagagtgtgtgtgtgtgtatgtatatatatgtgtgtatatatattatatatgagagatagttataagatactggggtttctaagtcagtccagtgtgttttttcttaacctgggtagtggttacacagacattcactttttttttttttttagaacagaaagtttctaagaatttatagcaccaagacattcattttttaaaaattgcacatttattttacttatcctagagaaatttataaaaaacaaaagtaaactataaacaccagttaaaaaaatccttttatattaactccatagagatgcaaatactgttaacagttaatgttttcaggggcctggctccatggcttgcacctgtaatcctagcactttgggaggctgaggtgggaggatcgcctgagctcaggagttcgagatctgctgggcaacatggtgaagcctgtctctaaaaaaaaaaaaaatacaaaaaaaattagccaagtgtggtggtgcatgcctgtattcccagctatttaggagactgaggcgggaggatcccttgagcccaggaggtggaggctgcattgagctatgtttgcaccactgcactccagcctggatgaaaaaggaagattctgtctccaaaaaaaaaaaaaaaaaaaaaaaaaaagttaatgtttttagcttaccattataagtctaaataatgaatttgtgcttatttttaattaacaaacttatacaatgtctgtaaactctatactggaagatgaagaatgtagtgcacttacactgttttgcctttttattcttccttatatttgctttagtttgattttttattgattgactttatgacttcaacaatatatttaaaacctttttaaaaacttgatttttaacatttgagatatttatggagtcttctccatgaaagggagaattttgcatgcaatagtgtatgatgggcacttttaacttttttatggctttctttttcaaagtcatacaccactttacttttcttttaacctcattccatctttcttctgttttttttgggggggagaggttggaacatctccttagtaattttttccacataggaaaaaggattattaaatattactttgccttattaacctgataatttgagtacatattgaaaatttctagtttcaaaaatttcctcccttctcagcatagaatacattactccattatatttttagcatccggtattctttgagaagttaagtattagtctgatttttattccttttaaggtaattattatttttcacattatatgctttaaaggttttatcttaatatgagagattaaacaagatgtgtccaagtatggggtcctagtccctaatcccttgtaaaactgcttgatgtttggaaaaatctgaccatatttatgtttcaccttttttttttccaacatttctctcttactcttcataatctctattttccctttctgtatttcctgttaaacagatctcagaccacctaataaattctctacaccttttaatttttatttcatatttttaatttcttatattttctatctacttttttggtctttttaaaaatttcaacttttctatttttatcttagtttttacccatgcatattttgattgctcaggtaatccatccaactattgatttttcaaaaatttttcaataattgttagtgtacagaaactgtgtcattctctagctgcatcttttcatataattagataggtctgtttgtggcatctttctttccttgctttacaggcagtactgttatacttttgtttatttttatacataaaacatattttttgacgtttagtaagatgtggaagaggaaatgaacatatacttcatctcttttgaagtgtaaggtcttataattttcatacttcttgaactgattccaagggtaacattaagtgaaattttgtttagtttctatagaaaactctgttagttgtctggaatgaggagaaatacatgctgatttctgtatgtttgtagtaacaagtgattctgagactgggattctgattttgacttaaccagtttgccacgtgacctccatttggcaatctattaattattacttttactttctgtttagtttaatggccaattatggacagtctgttttaaattcttaaattcttatagttgtacacttatggaaaacatttcttaaatgtggaaatttagtatttttgttataagatatttcaattcatttattcaacatacttaaacaataaaaacattttactatttgtgttttaatactcttctgctcagaaaagtttactttgttgcaactcacagaaggtaacttacttttttctactgtgatttccttataggtttgatgaacttgtgaaaaaattcaaagtcgaatatcatgctggtggctctacccagaattcaattaaagtggctcaggttggttaattattttaaaagttaaaaggattcaaaatgattctagacccatgtctattttgcataattgtttccttttatattgtgttgctgtagaatagttttgttcatttgaattgggattttagtagtcattgcacatctaatcaaaagttattttaattggtatttctttggttattggtaagcttgaacttttaatgtttattgttcatttgtgtttcttcttaaattgtttcctttcactatcattttataatttttcatgttacagatttgtagaaacttcatattttatagatagtattcctttttattttataagttgaaagtatttattttttgttatgtgtacattaactcttacagtgtcttttactgtgccttagttcttaatgtaactttcaaagtttttaacgtaattaaactttatggcttcttcatttcctgcatgtcccccttacgaaggacgtttctgccacaagatagtagaaattgctctgtattatatatagatatctatatacataaatgtacattcatatattcatacctaaatatctatgtatagacatatatgttggtagatatgtatatgcatctatatatctataccggtgtatatcttttataaatctatatatctgtctctattcccatatcttccaatgagtaattgaataaacccattaggcatatactctttgagttaccagcttaacctaatcttgattgagagagttagtgatctgtttaatcttccagctttgaaagatatgaacaagttttacatacctctggttcttacctctgcagtttgaagttaactcaaaattctgctcattgcaatcatgtgtcagttctgcctacactagatttctttttcttttttattgattaatgctttccccttgaattctgattaacttcaagaactggggaagtggaaaattgacaaataaaatccagaatgatttcttttcaagtaactcttagttgattgagacatatagtatgattattccacatacttccaagctcagatttaatcatagttttcaaatattttgtaaaaatgaatctttaaggcggtcattaatatgaagtggcctgagtctttgtattggtcaattgatttgtattgtttttggtaaaacatcctggtggtcactttatgaacttccagagtaatagaaaaaggatgatttacggccaggcacggtggctcacgcctgtaatcccagcactttgggaagccgaggtggacggatcacttgaggtcaggagatccagatcagcctggccaacatggtgaaaccccgtctctcctaaaaaaatacaaaaattagccaggtgtggtggcatatgtctctaatcccagctacttgggaggctgaggccagagaatcggttgaacctgggcggtataggttgcagtgagctgagatcatgccactgcactccagcctgggcaacagagtgagactccatctcaaaaaaaaaaaagagagaaaaaaaggatgatttacttaagccttaatttatcaaggcacgttttgcattttgcagttttcagtcttttctcctgctagaactgggggtgatatggttaggctttgtgtccccacccaaatctaatcttgaattgtaatctgtataatccccacatgccaaggaagagaccaggtggaggtaattgagtcatgggtgcagtttccttcatgctattctcctgatagtgagtgagttctcacaagatctgatggctttataaggggctcttacccctttgctcagcatttcccattcttgctgccttgtaaagaagatgcctttcttctcctttgccttctgccatgattataagttttcagaggcctttccagacatgctgaactgtgagtcaactaaaacttttttctttataaattacccagtctcaggcagttctttacagtagtgtgaaaatgaactaataccgggaggctattagctgttcactaataaattgtctcctttcttggggatcttcatcagtttctgccttctaaaagtttattaattatataattaagttctccctcagctttctccctgatattagtctcataataaaacagtcattgcctacttttattcttttgcacttttttttttacaatatttcacattcattctaacaacgtattctagtagtggtttatttgttcctgtctttagcaaggtaataaaaggaatttgaagctttgggtaacttattctgtcagatcttactagtaatcatactttcatgtatcaagtgatatggcaaattatgtcaacaagaaaatgtccccaaagctcttaggtattttgatatgtcaaatcatgtttttgaagattttaatgaaaccataggcaacaaaaacaagtatggttgatatcttgtccaaacacaattctagatttatttgatacacagcacaaatgtaaattttggtaaatttcatttggtctgaacttcttcctaatgaaagtgaaaagttcttatctgctcaatatcctgcacagcatgtatataacactgctaaaaaggggtataacttgcttaagtttgataattgatgctttcttaatgaacacttttggttactttgtcagtttttaaaaaatttgtagaagcacttaatgtgagttttgacttgaaagaaatggaaaaacgttggcattgtgactcatgcctgtaatcccagcattttgagaggctaagttaggagaatcgcttgagtccagtagtttgagaccagcctggacaacatagtgagaccctgtctctaggaaaaaaaaaaaaaaaaagaaatggaagaaaatgacttccttggatatgtgcctaaaagatggctattattgttgctggacatagatgccctgcagtacaatattaacaaaatatgggaccaaaggaatgcccatctctgatttggcagtacattgagaatgagaatggaaaaagaagattatagtaaaacaaatatttttatgctgtttctggtttttttgtttgtttgtttgtttcaagacggagtctcactctgttgccaggctggagtgcagtggcgcgatctctgctcactgcaacctctgcctcccgggttcaagtgattcttttgcctcagcctcccaagtagctgggactataggtgtatgccacaaagcccagctaatttttgtatttttagtagagatggggtttcaccatgttggccaggatggtcttgatctcttgaccttgtgatccacccgcctcggcttcccaaagtgctgggattacaggcatgagccaccgtgcctggcctgtttctgtttttgaagaggccacaagtgggctagaaaaaacacataccaaaaaaatactcaaataattttatttgttcattatttattaatttttttgagacagaatctcttgctctgttgcctagactggaatgtagtggtgtgatcatagctcactccagccttgaactgctgcgctcacagggtcctccttcctccatctccacctccatctcctaggactacaggcacaccctaccatacctggctaatttatttgttgtagagacagggtctctgtgtgttgctcagattggtcttgaacttttggcctcaagtgattctcctgtgttggcctcccaaagtgcgaggattacaggtgcgaaccattttacctggctcaaatggctcatttttatatattaagagtgcttcagaactcaagtaaaaaagtcacagaaaagagcaatgaggttaaataaaactttttttcagtttctttactaaaactgtaacttacttggaatccagttttgacatcagaaattcaaattcaggtgttttaaaaccatttctgcaagaaagaaatttaagttaggatgatagccaatgtctttcagagtgttttaaagtgatggacattttgaacattgataagcctatataatgaatctgtaaacacaagggatatgattcataaagagctggaatgccaaaacctgcatttagctaaaagatagatggatatttttatagaactataaactaattcctatatctaaacacctattattgatagtaattaaaatcctaagtattctatgtttacatgcttttgttgagaggatatttagcttaatgtcattgcactggactgacatcaagaatgtgggcttgatgcatcagaggtataagtcacagtgaattttacctttgactgtattacgttttaccacacatacaagaaggattgacctaatggctctagtcaagtatagaaaggaaacataaaagtaaaaatattttattatttcttaggcaaaaagaagcatgcctttattctttttaattaaatattggtaaaatgtttaatccaactgtggttacgttatttttttaaaaagtgtgatagaaataaacaacagaataatatatgattttgaataagttcaatattagtttgctagggcagtcttagcaatttcagagactaggtggcttaaacaacaaagatttattttctcacagtgttggagtcccagatcaaagtgttgacaccttgattccttcagaggcctcgcttcttagcctgcagatggctaccctctttctgcctctttgcgtggtggtttctgtgtacatatgtacctctggagtgtctctgtgtgtcctaatgtcttcttataaggacaccagtcagattggattaaggcctaccttactgccctcattaatttaattaccttgttaaagaccctatcttcaaatgtagtcacattgtgagatactggggtttagggcttcaacatatgcatagtggcaggagggtctgtggaggggtgtttataattcagccgataacaactatgtgtttttaaatttttgtgtctaagtaataaaacatgaataagttaatttttggtagtgttcttttttgataccttcttccttttctttcctgtatatgttttagttacttttattatttaccatttgaattacaatgaacattctaaactcataacaacctaatttgaataataccaatgtagtttcaataatatacaaacactctgctcctttacatctccatcctcttcttatatattattatgctcattgattacgtctttatatattgcatgcccattaacatagatttgtaactattcttttattcatttgtcttttaaatcatataaaaataaaaggaattacaaaccaaaagttcagtgatagtggcatttatatttactatgtagctacttttaccagagttctttacttcttcatatggcttctggttactatcaaatgtcctttcatttcagcctgaaggactctctttagcattttgtgtagggcaggtctattgttaacaaactgtcttagcttgtgtttatctgggaatgtcttaaatagcccctttattataggatagttttgttggatatagaattcttggttaacggtgcttttcttttagtatgttaaatatgtcaactcactgctttttggcctacatggtttctgatgagaattagttcttattcttactgagaatcctgacttgtgaccagttgcttttctctcactgatttcaaaattctttccttgtctttgtctttcagcagtttgactataatgtgtcttggtgtgaatctttttgtgtttatcatgtttagagcttattaaattcatgcttcaagttcatgcttggatgtgtagattcattcattttatgaaagtcaggaagttttggaccattatatcttcaaaaatttttttcttttattttctctttgttttccttctggcattctcataattaatatgttggtctgtggtgattgtttagtgataaggattctgattaaataagatagaaaaaaacaccatggtgagtaagcaaagcagaaatagaaccccactgttttaactagtaacctcagcttgctttttttaccggagatttttctctcatcctgagaaaacttcaatttttacttctctaaatgttagagattttgagtagtgtttcacatgctttcttcacttcttactgtcttcttcaatttgggagtaattgtaggttgtcagagagagtgtcgaatatgcatcactttaaatacagttatcagtaaatggactctttcattcatgcttcccagagatgacagttttccttggtgcctagatacctttttgttccttggagattcatagtattatgtgactcattgaatttttcagaagcctgatggtgagcttcgtgaggtatttctatttaagttgtaagttcgcttgtttttaagcttcctgcaatttaacttacctatagtatttttaaatttattttaaaaatgccatcttggggtatattctaggcatctcaaaaattttaaataccatcttatcctttgttaactggaatataagcaggtaatcatttgaatcattttttttcctgtaattattataacattgaggctatatggatttttttttctttttttaatttgaggcagagtcttgctctgtcacccaggctggagtgcagtggtgcgatcacagctcactgcatccttgacctcctgggctcaaggaattctcctgcctcagcctcctgagtagttgggactataggtgcacaccaccacacccaccttatttttaacttttttgtagagattgggttttgccatattaaccgggctggtcttgaactcctgggctcaaatgatcctcaagacattagcttggtctcttctcaaattagcagatccttatttctgtcttataatttctaatctgcttttataattattgacttacattcaatcttccagtttttcatgtctcttccaattagataagcctccatatttgtatttaacttccagtaaaattttaaccatgttgtttcatttttaattaaaatttaagaggactgcctaaatgccagtgtgtttatgttgtatacatctcggggcatgcttttaagtgttttcttgatgtaaaacatcacataataaactagtgttcataattgtattttaaagctttccaaaattctatgtaaaatgagtttctaaaaacactaaacaaaagaagttttaggaattatgtttgaatgaaatagaaacattgaactcaaaattgtaaagctgatatttcaagaactaccaattagtgtaacattactaattgagttacagtatttagaagttaaaactgatgtaaatcaaaggactcatgttgtttatctattttgaatccttttttgaaaaaagttaatctttaaagtttttctgtattaaaaaaatctgattatctcttgtgacctattttacctagaaaagctagttagaggttaaaaggttttttatgagacatacttctgtgcatcggaacagtccagatgtaaatttaaaaagaagaaatgacaatgaagtgatcaaagagaattctgtgttcaaatgctttcacctggagcagttgtagaaatgtcagtagcacaactgtatttataattatagcaggatgtggcagatggtgatgcaacaccgtctcgtcaattctttgtgtcattgaagaaagtagtaagtattaattctgccaattttatgattaatgaataattttaagtaacacaggccctacgaataaggttgactgttcaaattgtgatacctcattatagtttttaaagtttaaatatgaattaatactcctctttgcctttctgttctctttccttttcaaattaggttgttaagttttcatagctaaaataagatgaaggaagcagtggcttgctgtcctcaattatatttttgatgtgtttgtgaaattattataacttagatcagattctttaaagaaaaatcagtatttcattttttcctttcctcccttttctccctctctcctttccttgtctctctcctttcctttctctctcttcttccctttacccctcctctccccttcccttctttctcctcctcctcccttcctcacatctctttcccttctcctcctacccttcctcttccctcccctcttcttcctttcttcctactttgttttatgcattatgttaagaaattgttttactgctattagtgataacatgcttttagttctgtcttagcagttatggttgtgctctccaggataaatctacacatatcacagttatccacttcataaaagaatgacatatctctactcttgtgggccttaatgtcatgcagtgtttctgggtatgacattaaacatgggtacaatttgaaattgtatttttctgtctaaaagcaaaacaaagcttcatcaagaaatactacaagcagtgggacctaatttcatcaaggggataaaactctattcctttttattctattttggaattggaattcagaaacatttttttttggtcctatggatggtatattcacttatttgaaatgaaaattgaactcagacttttctgaaagagtctcatttgttaattggttgacaaggatggtctttgccatttaaatgatacagtggtactgtcagctgtcattgttcttgaaagcaaagaaaatatttaattgtattgattttctgacttacgttcgaattaatacacatttccttcttctttaagcaactttattggaatatagttcacgtacaattcacctgtttaaaatgtataatcttgtggcttttagtgtgttcacagatctagctagctgtgcaaccatcaccacagtcagtttcacaatattttcttttcttttcttttttttttttttgagatggagtctcgcactgtcgtccaggctggagtgcagtggcgcgatcttggctcactgtaatctccacctcccggggtcacaccattctcctgcctcagcctcccgagtagctgggactacaggcacccgccactgcacccggctaattttttgcatttttagtagagacgaggtttcaccgtgttagccaggatggtctctatctcctgaccttgtgatccgcccgccttggcctcccaaagtgctgggattacaggtgtgagccaccgctcccggccccacaatattttcattatcaaatgaagaaactctataaccattagtagtcattccccatttctctctcaccccctcatcttctgtccattcaaccccttggccccagacagtcacttatccagttttgtttctataggtttgcctattctagacaattatttttatttttggagatggcatcttgctctgtcttcgaggctggagtgcagtggcacaatcatggctcactgcagcttccaactcctaggcacaagtgatcctcccacctctgcctcccgagtagctgggtctataggtatgtgccaccatgctcagctaatttttaacttttaaattttctgtggaaatggaatcttgctttgttgcacaggctgatgttgaattcctgacctcaagcaaccctcctgcctctgcctcccaaagtgctgggattacagttgtgagccactgtgcacagcctttcaccaattgtcaaaaacttattcatgtatgtgattgtagattctttgaccaacatctctccatccttctacccctctaattacccaagcctctgataaacaccattttactttctccttctatgagatcagctttgttatagttcacatatgagttgagattatgtagcatttgtctttttgtacctggattatttctgttaacaagttattctccaggttcctccatgttatcacaaatgagaagattttgttccttttttttgtggatgaatagtattccattgtgtatatatatcgcattttatttattcattcattcattgcctgataaactcttaggttgattacatatcttggctgttgtgaataatgaagcagtaaatatggacgtgcagatatatcttaatcatttccactgaatatgtacccagaagtgggattgctggatcacatgttgtaccgttaatttcttaaggaacctccatacctgttttccataatggctgtgctagtttacattcccatcagcagtgtacagggttcccttaatatttcgggtactatagccttttgtaatatattttgaagtcagatagcatgatgtgtctttgtcatttttgctcaagattgcttttgctatttgggatcttttgtggttctatatgaattttagaattttttttctatttctatgaagattatcattgtcatttgagagggtttactttgaatctgtagatcactttggatagtatgggcattttaatgatattctttaattacatgaatgcaggctgtcttttatttgtgtcttctttaatttctttcatcagcgttttatacttttcatcttagagatcttttatctccttggttgaatttatcactaggtattttagctatttttatagctattttaagaggaattgtttacttgatttttgtttttttcagatagtttgtggttgatatatagaaatgcttttgtatgtttattttgtgtcctacaactttactgaatgtgattattagttctgacagtattttggtacattctttagggttttctgtgtatgagatcttgttgtcttcaaacaagaacaatttaatttctacctttccaatttgtatgccttttatttctttctcttgcctaattgttctggctgggtcttctagactatgatgaatagaaatggtgaaagtatacatccttgtcttgttccagatttcagaggaaaagctttcaatttttccccattcagaataatagctttggatttttcatatatggcctttattgtgctgagctgcattccttctatacccaatttgttgataatttctaacatgaaagaatgttgaattttgtcaaatgcattttctgcatctattgaaatatggttttttcctgcatttaatgtgatatatcacagttattgatttgtgtatgttgaaccattcatatatccatgggatgaatccacttgatcctggtgaattatcttgttaatgtgctggcttttttttttcttttttaagacagagtctctctctgtcacccaggctgaggtgcagaggtgctctacctcctggattcaagtgattcttccgcctcagcctccctagtagctgggattacaggcaccaaccaccatgcctggctaatttttgtatttttagtagagaggggtttcaccatgttggccagggtggtcttgaactcctgacttcaagttatttacttggcctcccaaaattaatgtgctattgaatttggtttgctggtattttgttcaggatttttcttctatgttcatcggagacattggcctatagttttcttatttttgttgtgtccttgttaggttttggtatcagggtaatgctgattttgtagaatgagtttagaagaattctttcctctttattttttaaaaataatttgagaagaattcgtattagtttcgctttgaatatttggtagggtgtgttggcttacgccagtaccccagcactttgggaggctgaggcagaacttcaagaggccaggaatttgaggtcaacctggacaacatagtgagaccttgtttctacaaaaaaaaaaaaaaaaattagcttggtgtggtggtacacacctgtagtctgagctacttgggaggcctcttgggaggctgaggcaggaggattgcttgagcttaggaggtggaggctgcagtgaactatgatcatgccactgtactccagcctgggcaacagagcaagaccctgtctctttaaaaaaacagaacaaaaattttggtaaaatacagcagtgaagccatcaggtcctaggcattttttcttttttctttgatgggagactttttatcactgatttaatctctttacttattggtctgttctaattttctatatcttcgtaattaaattttggtagattatatatattcagaaacttatttcttctaggttttctagtttgttggtgtataattgttaatgagagtctcttataattctttatatttctctgggatcaattgtagtgtctccttttttgtttctcactttattatttgtgtcttctcctttttttcttagtctagctaaaggtttgttgcttttggctatcttttcaaaaacctaattctttgttgtatttatcttttgtatgttttttaggtctctatttcatttatttcttctctttattatttatttttttctgctaatttggagtttggcttgttcttgtttttctagtcccttgaggcgcaacattaggtttatatctttcctctttggggatttatgtgttaattactataaacatcacttttagacctgcttttgctgtatctgataggttatgctttttttccattggcattgtttcaaaaaatctttttgtttctctttaattttttcattgaccatgttgtttaatttccatgtatttgtagagtttttgattttcctcttattattgacttctagtttatgccattgtgatcggaaaatataatctatgattttgaactgaaacttgttaagacttatgttgtggcttaatatgtactctatcctgaagcatgtttcatgttcaattgagaagaatgtgtaatcttcagccgctggatagaatgttctgtaaatgtctgttaggcctatttggtcaagagtgcagtttaaacctaatgtttcttttttggttttctgtctggataatgtttctgttgcttaagtggggtgctgaagtttcctactaggtagaggatcagaaaaaataaatattacatactcagcttagtatctgggtgatgaaataatctgtacaacaaacccccatgacacaacctgtacatgtaacaaacctgcacatgtaccgctgaacctaaaataaaagttaaaaaaaaaagttgtctactatgattgttttgtactctatctttccctttagatttattgatatttgcttatatcaggttattttaatctagtaacaacttaactttgattgctaaaaatgtttaataaacactgtgtactttaactcctctttttctctcacattttgaatttttttctgagatacagtctcactctgtcacccaggctggagtgcagtggtatgatctcagctcactgcaacctccacctcccgggttcaagcgattctcatgcctcagccacccaagtagctgggattacaggtgtgcaccaccttgctcaggcaatttttgtatttttagtagagacggggtttcaccatgttgcccaggctggtcttgaactcctgacctcaagtgatctgcctgcctcggcctcccgaagtgctgggattataagcatgagccaacttgtccagccacatattttgaatttttgatgttacaacttacaacttttaaaactgcatatcccactatcaattgttgtagttataattatttttaatagttttatctttaatcttcatattaaagatataagaggtttacatactatgcttacaataggccgaatagccacttcccactcattttttccaccatagaaaacttgcatccaggggacttctgcatatgtgggcttaggggaagggtgttgcagtcaaagcaccatttcccttactgtctgatatggtttggctctgtgtccccacccaaacctcatctctagttgtaatccccataatccccacatgttgagggagggatctggtgggaggtgattggatcatgggggtggtttcccccatgctgttctcatgatagtgagtaagttcttacaaatctgatggttttataagtgtttggcagttcctccttcactctctgtctttttctcctgccaccatgtgaagaaggtctttacttcccctttgcgttccagcgtgattgtaagttttccaaggcctccccagtcatacagaactgtgagtcagttaaacctcttttctttataaattactcagtcttggatatttctttatagcagcgtgaaaatggactaatacactgttctcagatttttctcagctctgtggtacaatgagacaccatcctgagttccaagagatccagggtagtcgtcttgccactgagaagatactaattgtgacaagttaatgggtgcagcacaccagcatggcacatgtatacatatgtaactaacctgcacattgtgtacatgtaccctagaacttaaagtataataataataaaataaaataaaaataaaataaaatctaatcttctgtgcaggcaaaaaaaaaaaaaaaaaaaaagaaattctatagggtgtggagaaccagacaacaattcctacccttccattttgcaagcatcactctgccatattttttaaagaataatgtttttagagtatttgtgttctttggtacttttgctgctgagattcttgggataacaaagtaaaaaaccaaatagtctagattgtaacataccacagtgatttggggcaagaaggatgtgcagtagaattaagccaagctgggcaagtatgaacttgggactgtcaccaaactctgtctcattcttttctccttatttaattctttccatatcaagcatttacaacccactatgtagaggtccatacaccttggcttatagacttcacttggtagttactgttgcccacctatctattaaccagaattttcatttaaaaatctctacataaaaattagcagttatgcagtggagttttcaaataaggaagaagattggttggatggatggatgttaggtgaccactgggaaactatggttttagaacgagtagctggtaggttgcaggtggcatgtattttaatacatgtagcagaaaactgaaaatttatgagcattttagaaattagagctctgtcaaaataagagaaaaacttagatttaattttataaaagcagtactaatgactttatgaagatggcatatgatttatgtatgtatgaacaattatatgtatcattaaatagatcagataaattttttgttcttttaagaataataggccagatgtgatggctcacgcttataatcccagcactttgagaagccaaggccagaggatcagttgagctcaggagttcaagaccagcctgggcaacatgacaaaaccctgtctctacaaataataaaaaaaaaaaaattagccaggcacggtggtacatgcctgtcatcccagctagtcaggaagctgaggtgcaagaattgcttgagcctgggaggttgaagctgtagtgagccatgattctgccactgcattccagcctaggcaacagagctagaccctgtctcaaaaccaaataataattttttaaatatttattatctaatgtgggtttttgctttatgttacagttgtcacctactccaatatgaaaaatgagaagaaagccaggtgtggtggtgcatacctgtagtccctgctactcaggaggttgagatgggaagatcacttgaggccaggagtttgaggttgcagtatgctatgattgctcctgtgaatagccattttactctatcctgggaaacacagtggcatcctgtctcttaaaaaaaatttttttttaaagcatgttcacaagttctttaatacttctccattgaaaaggtagaacctaatttcccttctcttgaatatggcccagacttagcgacttgtttctaataagtagaatgtatgtaatgatggtgtgctatttctgaggctagatcattaaaggcatcattacttccatattattttttcttgggacacccataatggggaattcaactgctatgttcttgaggatacgcagtcagcctttgaagacacccacatgggcaggaacataagccttccagcggcaaccagcaccaatatgttggccttgtgagtgcagccagctccagtcaaatcaccagattactggagccctgccttacttaaccgactacaacctgatgagacaccccaagagagaactgttccactaagctgctcccaaattcctgacccaccaaaactatgtgagatagtatttcttatttatagccaccatgttttgaagcaacaatgactattaaaataataaaataactttcagacattgtttttaatccctcttttctgtagtccctgtactttcccaccccaatttatatttcctgtttctatttgaacttttttcttttttgttttcatttcttttatacataatcgttttgagctataagaataatttatgccaaaaattatgcagctaatattttacacccgtattgtaaccagtatactggtataaaactagataataaactactatggctgtgttttgcttcttacagatggaaggaaatgcctaaaatttaattttatataccacaatgtgttttgaaagttttgaataattttctggttttgaaaacctgttttgatttttttttctcacaaacacgatattcttaagtaaaatagagtgatttatgattaatagaaataatgaagattatgcaagttattttacttcaattgaaatagcaaggccagaataatttaatcatgttttccagaagaataataaaatagaatcagtggcaatactagtaaacattagtctacatttctatttatttatttatttttttagacggagttttgcctttttacccaggctggagtgcagtggcacgatctcagctcactgcaacttccgcctcctgggttcaagtgattctcctgcttcaggcctcccaagtagctggtattacaggcgcctgccaccacacccagctaattctttgtatttttaatagagacgggatttcatcatgttggcaaggttggtctcaaactcctgacttcaggtgatccacctgccttggcctcccaaagtgcagggattataggcgtgagccactgcacccagccaacatttatatttctttaacttcatatcatttgctgtagttagctggatcatatttcttaaattttactttatttatttatttttgagacaaagtcacgctttgtcacccaggctgaagctcagtgtttgcgatcttggctcactgcaaactctgccttctgggttcaaggaatcctcctgcttcagtctcctgagtagctgggattacaggcttctgccaccatgcccaacaaatttttttttgtattttttgtagagacagaatttcaccctgttgaccaggctggtattaaactcctgacctcaagtgatccacccacctaggcctcccaaagtgctgggattatggccatgggccactgtgcccagacaaattttactttcatagtaacattttgcaaatgtaaaaattttataatttgattagtaatgtcagactctatcaaggtgatgctctcttaaaagttgttgatgataatattagatgagagatgtatgtagttatgaaagaccctgaaatgattgtatttttttatttctgtacaaagtttactcacatttctatgtctagccatagctattctaagccatagcacaaagaactgtattgtgatggtgagactataaaaaggtaaatttagagaaagcttccagatctgctctagaatttattaccatctggtctctttggagactagtataattattcatgggaatgttttcaacacagaaaagcatggtttgtgtattggcagaaagtaaaaagtaccagtggtttaaaccatatgtagcttttttagagttaggcaagggaaatgaactgaagacctaattgagagtcatcagtagtgatgcaatttgtgtcaattttgtcagaatctgttcataatgaacaaaatattgcacaacaagaaaaactgaaggtattagaaatataactccatttgaagagtattactttatcttaatttaaccaatgaaatgtaagatggtgtcagctaagtatttgtgtaaatctctgaaataacataaggaatatatgtcaaattttgatgacttttaaaaatgaaaacactcatgttaaaataattttaagcttgaacactggaagaatgtcttattaaggttatttttcttaaattgaatatgaatgtattattttagatcattttagatgtggcatggacttactactgttcctcttaagaagcagaaatattttacagtctttcttaagcttaaattgattttatagaaaaaggaaaaaaaaactaaatatcttttcactttccattctaacagttacttggagtctataaaaaatgagatgacaaatcaaaaaattgaaatcgtctattttttcagctattttaaaagaaaaatgcctagtgggctgggaatacacaagaaatttaaatttgtgattgagaataagaaatgcatttgtggttttaaaaaagaaataccagcatgtcacattaaaaatatggcatctacagtattgtacaaaggaaaatgtattacattaggagggggtatgttgtactttatttagagaactagtgcagggatacgaatgagaagtataacgccatagaaggcatgagcattagtaatccagtcagagaggaagaattttgctgcctcccatgtaacataaaacagatgttccattctattagaaccttactaaaatgagagtttagatcattggtcaataggagaaacatgaacaatggcaatttaataattttgagggtttatcttatttgtgagttaatatccatggtggggagtatgaagggatgcctgccaaatgttattttatttttgatatcttgattgagagagctgaaaggcaacagtaagctatactaatttttaatttattgttttgcaaatttaatctatttttttctcaaaaactgttgtaagaaaaaaagatttcaaaattataagtcctgatttaatgcttgaataggtattgaagcatatctgaaagtataattaattaacctcaaatgaatactgtaaacattaagtagttggcaactgaaagtagacgtatgcagaaagggacaccagggatggtaccacagggtcctgggtatatttttgtttttttaagggaagatttacttttttctagaaaagaaattcttttcaaataaatttatttttcaaaaaatactttttttcaaaagtattttttccattttaaaattaagttataatttatatacaaaaaagtgatctttgtagtgtatgtttctgcaagttatgacacatgcacagtctagcaaccagtatcagaaataagatagagaatagtttcatcacctcaaaactttccctgtgtcccctttgtagtcttcctttcccctacttcagcccttggcaatccctgctctgtttttgttgacagagacagttctcctcacttgtttgtgaagactgtaaggttctgactgccctttttcctgggacatttctcagggttatatatgcagctgataaacttgagacatgagataacatctgttcccagacaaaaagcaagcttatttactgcttgctataaaattggtggattccctgagttcagtgcttctcatttgctgatgcaaactcactacaagcatagcatccatctgagcatccccaaaggacttgggatgaagggaactgatgcaaatgtgctgatgttcttctgttttgtcataagtaatgaagtgttttttctttgactgaggagtcttgtgtcttctgcctgcatccatgaattagttaagaggcttttgtgttagcttttattaaatagggtaaaatcaaatcccagtctccataattttctgtttgtatagttttgccttttccggtgacttgtattgagggttcctgcttctggccaacaacctatgagtgattttttaggtctgatcataaggcatttacagaggttttcctggcaggcttcatagggggagggctggtctccagagcagacttggtgcaaagcttttatagtctctgaggggaattgcagtcaaggacccagccatcctcttatacatatctgcgttcctagcctaggtgccttcattcagaggcctctttatgtggggcttttggggaggctttccttaagtgtctctgtcaagactttattggggaaaagaggggaagacacttaccaactctttctctactatgacttgtacttttctgtttctaacccttccctctctagccttcactcgactcctgggtctgtaaaactgccagaatcttttgttgggggttccctttggcaatgatgcaaccctcacatttgtgctggtctacctgccctgtgaccaatgtgccatgccacaggggaaaatggaatggggggtagctggcactttctccaatttagcctcttatactgtcacagtgattacagacctattctttattttattttattttatttatttatttttttggcttgttgccattggctgtgccaaaacgtggcagcccagctttctccagctctcctgaggtactgatacacacaaatggaatcatgttgtgcatagcctttgaatctgactttcttcagttgacgtaagttcatcttagattcatccatttgctttgtcaatagtttttaaattttaatggctgagtagttttctatcatcgtgatgtactgcaccttgtgtctctatccactctagagggatatttgaattgtttctggtgattatgaataaagctgctaaaaatatttatacgtttttgtgttaacataaattttcattttactagatgtattgccaaactcctttccaaagtggctgtgccatttcacattcccactagtaatatatgagaggtctagtggtttcacatcctttcagcacttgatattgtcagcttttattactacatcaattgtaagggggagaggagcatctcattgtttgtttctacttccctaattatgtgaagcacatttttatatgcttatttgctatctgtatatgttctttgaagaagtatctcttcaaactctttgccttttttttaaaaaaaattgtgtttatttttgttacagagttttgagaattctttatctgttctgcagacaagacttatcagatgtgtgatttgcaaatattttctcctagtgagtggcttgtgttttcattttcctaacaatgtctttcagtgagcagaagttcttacaaatttatgtacttttaaaatggattatgcttttgtgtcatataagaactctttgcctaatccagggtgagaaagatttactcctatattttctactagaaatttcatagttttactttttacatgtagatctgtgatccattttgagttaagttttgtgtatattgggtgaggtctgtaacagagtttttgattattgttttttgctattgttttttgctttggcatatggatatccaattgatccattactcttccctgaagtctatttaaatctctttaattgccattgtacttttttgaaaatcaattatgtggttgtatatctatgttccatattctgtttcattgatctatatgtctcttctttctccaatatcatacttctctgattactgtagcttaatgtgtttgttttttttgctgtctaatcatggaagttgaatttattgcattttacaggtcaatattttttgtagttgtagacgtctgtaattttgcactgttaattttaatgtaatggacatattagaaattaggttttcaatatgcaggggaaatgctgttaatttacaattgaagagagttatgaaataataataaatagaaaaagtaaatagagaaaggaaagtacagtcatcccttagtgcccataagggattggttctaggaccctctgtggataccaaatccatggatactcaagtcccttaaatggcataatatttgcacataacctatgcatatcctcccatatactttaaataatccccagattgcttataatacctaatacactataaatgctaagtaaatacttgttatactgtgttatttagggaataatgacaagaaaaaagtctgtacctgttcagtacagactcaacaactatccatttcccccacttccaagtatttttgatctgctgttggttggttggtctgcagatgcagatcccatggatatggtgggcctatatatatgtcttatttattgtcactaccttttgcttccaagtattttttatttttaatgagagttattttgttgtggtgggtggtttaacatacataagttttcccagcagcagaaccctgaagcaaggattttagaacaaagtctactttggagacgtatgtaacaggcaagaattgatgcaaggaaagcaaggcagctaatgaagacttactaactaaactaacacaataggttgctggagctttatcttgtgggataattctgggaaagtcagtgtcaaatttagtttcgggactaactcacctgaagtgtgagagagtgagtatatttcctgttactggttgtggactgccatacagaagacattgcacctgcctggtgctgtggtgggcagagtagcattcagccattcagaggaaagccctgagggatacagaggaagatactggctattggaagtaatttggaatggtgggaaagggttaggtccaaaggatactgtacagacactgacattatctgactcatgccttgtgaattttaagtgcctttcctgggttatcaaagtgaatagctttaatcaaatcatctctataaagacatttctaagtaaattttctatacttacactcctctactttttattactacagctggcttcattagctttttgtatattaatctgtgttgtcctactattagctagaagagcttactaactgtgagcttgaagatattgtatattccctcttcggatgatttttttttttttttttttgagtcagagtcttgctcttgtagcccaggctggagtgcagtgatgcaatctcggctcaccgcagcctccgcctcccgggttcaagtgattgtcatgcctcagcctcccgagtaactgggattacaggcacctgccaccacgctgggctacaaatgtatttaagaatcttaaatgagctgtgattgcaccactacactccagtctgggtgacagagcgagaccctggcttcaagcagtcctcctgcctcagcttcctaaagtgctgggattacaggcatgagccactacccctggcctaaattccttttctagcctctatacagaatttctaggataacaacaacaacaacaacaacaaaaacttaaatgataaaaatgaatatataaaatagcaagtaagccatgtaaaatattttcaatattcttagccattagagaagtgcaaattaaaactataagatactgctgcatacatatgtggatagcgaaagtaaaaactggtgagaatacagaatgaatggatttctcatctgttgctgataggaaaatgacacagccactctggaaaacagtttggcatttttaataaaattaaagataaatattccatatgactcagcaatcatattcctgagtatttaacatagaaaaatggaaatttatgtatatgtaaaaacttgctacacaaatatttacatcagcttaatttgtaattgcctcaaactggaaagaatccagataactttcaacaggtgaatagataaacaaactgtgatatatctatcgaatggaataccaagctttgtaaaagaataaattactggtacagtcaacagtttccgtagatcttaagttcatcacacgaagtaaaaaaaaagctaaactcaaagtgttacatactgtatgattccaattatatagtattacttaaatgaaaaaaaattagtgttggaaaattaacctgtcattccaggagttagagataatgtgggagaaggggataggtatgactataagggagttgcaggagagggcttctttgtggtgatggaatagttctgtgtcttaattgtgctggtgagtacatgaatctttacagctgataagattttatagaatagtacacacacactaagaacaatgcatgtaatgtctactttggggagctttttttaaaaaaatttcttttaagagacagtgtcttgttccatttcccaggctggagtgcagtggcacaatcatagctcactgtagcctcaaacacctgggctcaagggattctcctgcttccagcctcccaggtagctaggactataggtgcatgccaccatggctcgctaatttttttatttttattttttgtagagatgggggtctcaccatgttgcccaggctggtctcagtctcctggcttcaagcagtccttctgccttggccttctaaagtgctgggattacaggggtgagccactgccctggcctaaattccttttttagcctcttcacagaatttctaggataaccaatataagtaaagtagatgttatttttaaaatgatccactttatacactaaattaaaagacagtcttgatttcttcaaaattctttgctgtgaagtgaaacgtttggtaatcatatatcttgttgacataaacatacagattcctctgcatgtaacattcttttccttcactttaccaatttgtgcccatttcacgtatctcagcctatatccctttttcatgatcatcttacctctgacataactctttcacccaccaaatctgtgtttggtgtcatttctatgatggtcccatacaaagctggactcattttacagatgcaaaaagtgatgaaataatgaacaagttaatggcccaactgaaactgtggtgttggacataaactttagaataaatcctaaatcttaagtgtgcaaataaattattcaaaacatgagattacctaacctattctagtgatatttaacagagatatgtttgtaactggtggaagaagaatcactccctaggtacaagatcaattactgttcattttattcacctgaagataaatcactttcacagattttgcagactacttcttttcctgaaaaaatgatttattaaagtggaggtttctttactatatcaacactggcttactcttttctttataatacttctatactgaaagaagccagaggccaaaagtagtcttgtttgtgctgctctttatttcattgttatttttaaaccagatgatgaaattcccttccattttgaagggccatttttcatgtacataggagggaatttaaactgtttgagttaatattaacatattctattactataaattggttttagtttgattttaaaatagcatattaatttacatttaattttagtattcaactctgatcagaaaaatagtattttggatgtaggggtaaggaaaaggtgtgaaattccagttaaaaatctaaagtactgtgtttattgtttcattgtgtgtctgcatttagtattgtttgtatgagaaaaagtcagttgtttccttatattcccatataatttttgagtagtatgacaatcttcatttatatacctgatgacttttaatttttaaaatgttgtctaaaccaggtttcaggtgatatatcttgcttcctaatttgacaactctgaatattactattgaaacttgtaagcaagtagaaattaaaatgaagccatacatagcatttgctttgattaaaaagaatagaaacctagactgttttggaaaattcagtgtatatttcagtgtatatatattatgtgtttatatattgacagatctgggcatcagaatagagtcaagaaataacataaatagaaattcagtaagaacacatatgaaactggaaaccagtggaggaaaactgaggaattgctgtttgtgagagacttatttttcactcagtatacttttttttactgttttaattgtctatatagcatgctgcatattaccaattttaaatacttaattttgaaagattaaaatggctggcaaatttattgcccatttgcaaagtacatttatatcaggcatagtacaatatgtagaatgttattggaacattggaacattgtgtctgaaatacttttttaaaaacctcataaaatatgaaaatacttcttaatgatttcaatattaactctattcattagacatctatcattatcctttatgtcagaaacttagagtgaaatcttattagcttgattgaagaacacttgttctcatttcattgtgctatagttaacattcaaagttaaagttatttttcttctccttgatagtatactataataagtatattcaaagtgatgctctagatttgtttccttcacatttagacttgcatttttacaatgtttatactaaggtttcttacacttgccatagtatatctgtgcggtggcttactcctgttaatcccagcaattagggaggcccaggcaggtggattatgaggtcaggagtttgagaccagcctggccaacatggtgaaaccctgtctctactaaaaatacaaaaaaaaaaaattagctgggtgtgttggcgggtgcctgtaatcctagctactcgggaggctgaggcaggagaatcacttgaacctgggaaggtggaggttgcagtgagccgagatcctgccactgcactgcagcctggacaacaagagcgagactccgtctcaaaaaaaaaaaaaaaaaaggatttttgcaatcattaacttacttcttgctgtctgtttttattgtctttggctgtccttcttaacttcttcaaagatttctagtatatttacactccttaatcctaaatccagtgtatgttggctctcatggtagttttccatttcatgtacttgcttgtataatataaatccctgttcttggtgttttgtgtatttatttatttggctgccattgtattgaaaattgtcttgacaattcatttatgaacatcattagtacagcaatatgtaattcaaaaccagcatgctcaaatttgtactattctggttagttattgctatgtgtgtattttcaaatttttaaagacttagagaatagtaaaacatatacttagcacaaatgatatcacttcttggtacctttctgtgagtccttcttcccataaggaaattaaattgttctttgttttcatgctaagtagcatgaaaaaaaagctttattgagataaatcaaatttagagcatttttatcacctcaaaaagagcccatatacattagctctcacccactcaattatccctccttgactattttgggtccattgcaattccaagtgaattttagagtcagtttgtcaatttacacaatgagtatagcttggattctgatagggattgtgttgaatctctacatccataatgggtaatattgccaatcttaataaaattttccatgaatgtgggatgtttttccatttatttggatcatctttaatttgttgcaacaatgttttgtagttttcagagtataaattttacactgtaaagaaaacttattcccaaatattattttctttttgatgctattgtaagtggaattcttttcttaattttatgttcagattattcattgcagatggcttagagatacaattgtgtgtggtttttgttgttttgtttttgagacaggctcatgctctgttgcccaggctgaagtgcagtggcacaaacatggctcactgcagccacaatctcctaggcccacctgattctcctccctcagcctcccaagtagctgagaccactagacatgcaccaccatgcctggctaatttttaattttttttgtagagacagagtcttgccatgttgcccaggctggtctcgaactcttgggctcaagcaatcctctggccttagcctcccaaagttttgggattataggcatgagccgctgtgcctagctcagtttgtgtgtgtgtgtgtgtgtgtgtgtgtgtgtgtgtgttttaatattgatcttgtatcctacagcctttctgaacttacttagctctaatattttttagtgggttctttatgattttctataaacaaaaccatgtcatctgtgactatagttgtgtttccttctttctttctaatttggaagcctttaactattttcccccttccttaattgctgtgactagtagttgtaatgtaacagtgaacagaagtggcaagaagagatgtccctagtcttgtttctcatatagggggaaaatatctaatcattcaccattaagtttgatgtttctctgcagttttcttagatgccctttatcagattgaggaagttactttctatttctgtttttttttagcgtttttatcttgaaacagtacagttgacccttgcacaacatggcgattgtgggtgctgacccactgcatagtctaaaatccatgtataacttttgattctcccaaaacttgtcaattaatagcctactgttaaccagaagccttaccagtaacataaagtcaattaccacatattttatatatgtatcatataaagaatatattattaagaaaatcatgagagaaaatgtatgtactatttattaagtggaaatgtttcgtgagaaaagtcatcattgtcttcatgttgggttggctgaggaggcagaggaggaactggttttgctgtcttaagggtggcagaggtggaagaaaatactggtgtaagtggatttgtgaagttcaaaccagtgttgttctggagtcaattgtagtggattttgccaaatgctttttgtttgtttgttttttgagacggagtttcgctcttgttgcccaggttagcgtgcaatggcatgatcttggctcactgcaacttctgcctcccaggttcaagcaattctcctgcctcagcctcctgagtagctgggatttcaggtgcccagcaccacgcctaacttatttttgtatttttagtagagatggggtttcaccatgttggccaggctggtctctaattcctgacctcttgtgatccacccgccttggcctcccaaaatgcgagattacaggcgtgagcaaccatgcctggctgccagatgctttttctatgtgtgttgagatgatcatgtaattttgttttctattctattgatatgatgcattgaattaattgatttttggatcttaaaccaaccttgcattcctgagacaaactccacttggttatgttatatataatttttaaatgttgctggatttgttttgctagtattttgttgaggatttttgcatcattctcatatgagtatcagtctgtagttttattttcttgtgactttgtctgattttagagtatcatagtaatactggcctcataacatgaattgggagatgtcttccctcttctaatttttagaagagtttgtggagaattggtattaatttttttaaaagaagcagcaattgcttatttttctaatcaggtgtctatgctgctgaatcttaaggcctcaacaaatgttgcaccttattatttcattgaacaataagaccttctattctgattattcccggtaaataggaataatcactggtttctccagtggtttccacttgccaaaaactcatgacagatgacttaacaaggtggcacctgctttcaggggattgtatcagatgcatactcatttccagtgcagcagctgttggcaatctaggacttctctatcatggttggccaagtagtcctgctttggctgccagagcttcattctgctgaatattacattcctgaagtctcatggatattctttttgtcatttaaaaatatttccataaagtgttctgaacaggctggtctcttcaggttttacatctgttgtgcagtcttaacacagtccaaaaagcagatttctgcaagtttattgtcagtcccaagaaattccttcaactgtttaatctgatcagattctggtatttgtgcacccatattcttttggtacatttattagtcatcttctctgatgcatgagtttcctttctgttcttgtaaagtagtgttccaacctttgtttgaatgtcttcagtgagacgtgatttcttacctaagcacaggctctcacatctgacgtcagtacaaggctggaggcctacactgccagtcgagtctgaggatggaggatcaggatcagggcaagcattgcagccgctttatctaattcttctttaaacgttcattagaattcaatagtgaagccattcagggctaggcttttctttgtgggtagtttcttgattactaatttaatctcttgttatataggtctgttcaagttacctattttttcttgaaatttttttagtcatttgtgcctttctaagtatttgtccatttcatctaataaataatctaatttgtttaatggctattctttctgacattaatatagccactttgtctttcttgtgggtgttgtttgcatcacgtatcttttttttttttcccagacagggtcttgctttgttgcccaggctggagtgcactggcaagcagaggttgccactcactggaacctctgattcccaggtttaagtgatcctcccacctcagtctcctgagtagctgggattacaggtgcataccatcatgcttggctaatttttaaattttttgcagagacgaggtctcactgtattgtccaggctggtcttgaactcctggctcaaagtgaaacccctgccttggcatctcaaagtgctgggtttacagatgtgagccaccacatccagcctgcatgatatatttttccacccgtactttcaatctgttagtaactttctatctacagtgtgtctcctgttgacccacataactgtcttttatgtatagttattagaactattgataagaaaatgtgaaagtatagtcccattatcttatttgagtggaatcagtagactatttcataaaatgtattctagtttatagtttagaatagtttgtttttcatggcttttgagaaaaacatttgaatgagcttacattttgttgcatttaaaatttctgggtttttgttgttgttgttgttgttgttttgagatgcagtctctctctgttgcccaggctgaagtgcagtggtgtgatcttggctcactgcaacctctacctcccaggttcaaatgattcttgtgcctcagccccctgagtaactgggactgcaggtacatgccacgacctggctaattttgtatttttagtagagatggggtttcgccctgttgggcaagctggtctcaaactcctgacctcaggtgatctacctgactcagcctcccaaagtgctggaagtacaagtatgagccactgcgcctggccaaaatttctgttttttaatgaatccaaagttcatgtttttttttcttcccaatgccatggtacatatcatcaccaaaaaaagtagtgattttgcttcagtgaacactgaattttaatattattgatagaatggctatatcgatcagggttttacacttatagtacagtatacttgcaatgtaggtaggcctcatcctttgtaattaattaattagcttgtaattatgtaagctaatctaaattttcatattttcagttttaacatttgggcttttgagttacatttcttatattttgatttttttctataaattttaaaaccagaaagacaacactagaatcaattaaatgcaagattgaaagggtttcataatgtaaaagagcaatcttgtttttgaaatgttcagtttacagtaaggatcgagtagctctgcagctaccgatttgggaaatacctgaggttttttttccccttgcacttacaggctgttttagccctgaaggtggctagtaaggacacagactttagagtgccacgacagttccataacaggaatgaattgaagaagagaagcagtggagtcaggagcctcacaaattaaagacaactggtgaagagaaaaaccatttattttcgatacttaagatggctgagcctgtaattccagcagtgctttgggaggctgaggcaggtggatcacgaggtcaggagattgagaccatcctggctaacacggtgaaaccctgtctctactaaaaatacaaaaaattagccgggcatggtgggcacctgtagtcccagctactcaggaggctgaggcaggagaatggtgtgaacccgggaggtggagcttgcaatgagcagagatcgcaccactgcactccagcctgggcgacagagcgacactctgtctcaaaaaaaaaaaaaaaaaaaaaaaaaaaaaaaaaaaagatggccgaataggaagagctccagtctgcagctcccagcaagaccaacacagaaggtgggtgatttctgcatttccaactaaggtacccagttcatctcattgggactaattaggcagtggttgcagcccacagagggtgagcagaagcagggtggggtatcacctcacctgggaggtgcaaggagctgggggacctccttcccccagccaagggaagccatgagggactgtgctatctggcccagataccatgattttcctatggtttttgcaatccgcagatcaggagattccgtcgtgtgcctacaccaccagggccttgggtttcaaacacaaaactgggcggctgtttaggcagacacttagctagttgcaggagttttttttcgtaccccagtggcacccggaaccccagcgagacagaactgttaactcccctggaaagggggctgaagccagggagccacgtggtcttgcttagagggtcccactcccacggagcccagtaagctaagaaccactggcttaacattctcactgccagcacaacagtctgaaattgaccttggaccattgggcttggtagggggaggggcatctgcaattactgaggcttgagtaggtggtttttccctgacagtactaaggtggcggggaggtttgaaccaggtggaattcaccacagtgcagcaaagcagctgtggccagactccctgtctagattcctcctcactggacagggtatttgtgaaagaaaggtagcagacctagtcaggggcttatggataaaactcccatctccctgggacagagcacctgagggaaggggcggctgtgggcgcagcttcagaggacataaactttcctgcctggtggctctgaagagaacagctgatactgacaaggaggattctcccagaacagtgcttgagctctgcttagggacagactgcctcctcaagtgagttgaggagactccgtgccttctcactgggagagaactgccaacaggggccaacagacacctcaaacaggagagctctggctggcatcaggctggtgcccctctgggacgaagcttctagaggaaggaccaggcaacaatctttgctgttctgcagcctccattggtgatactcaggcaaacagggtctggagtggacttaaagcaaactgcagcagacctgcagaagaggtgcctgactgttaggagaaaaactagcaaacagaaagcaacaaactcaacatcaacaaaaaggacccccacacaaaaaccccatccaaaggtcatcagcctcaaagatcaaaggtagataaatccatgatgatgaggaaaaaccagcgcaaaaacggtgaaaattccaaaaaccagaatgcctctttgcctccaaataattgcagctcctctccagcaagggcacaaaactggacggagcaaccccaagacacctaatagtcagattctcctctgagctgaaggaccatgttctaacccagtgcaaggaagctaagaaccttgataaaaggttataggaactgctaactagaataaccagtttagagaggaacataaatgacctgatggggctgaaaaacacagcacgagcacttcatgaagcatacacaagtatcaatagccaaatcgatcaagcagaagaaaggctatcacagattgaatatcaacttattgaaataaagtgtgaagacaagattagagaaaaaaaaaataaaatggaatgaacaaaacctccaagacatatgagactatgtgaaaagaccaaacctatgattgattggtgtacctgaaagtgacagggagaatggaaccaagttggaaaacacacttcaggatattatccaggagaacttccccaacctagcaagacaggccaacactcaaatttgggaaatatggagaacactgcaaagatactccttgagaagagcaaccccaagacacctaatcatcagattctccaaggttgaaatgaaggaaaaaatgttaagggcagccatagagaaaggtcaggttacctacaaaaggaagcccatcagaccaatagcagatctctctgcagaaaccctacaagccagaagagagtgggggccattattcaacattcttaaagaaaagaattttcaacccagaatttcatatccagccaaactaagcttcataagctaaggagaaataaaatccttttcagagaaggaaatgctgagggattttgtcaccaccaggcctgccttacaagagctcctgaaggaagcactaaatgtggaaaggaaaaagtggtactagccactgcacaaacacaccaaaatataaagaccaatgacactatgaagaaactgcttcaattagtgtgtaaaataacctgctaacatcatgatgacaggatcaaattcatgtataataatattaaccttagctgtacatggcctaaatgccccaattaaaagacacggactggcaaattggatgaagagtcaagatccatcggtgtgctgtattcaggagacccatctcacttgcaaagacacacataggctcaaaataaagggatggaggaatgtttaccaagcaaatggaaagcaaaaaaaaaagcaggggttgcacttctagtctctgataaaacaggctttaaactaacaaagatcaaaaaagacaaagaagggcattacataatggtaaagggatcaatgcaacaagaagagctatcgtaaatatatatgcacccactacaggagcacccagattcataaaacaagttctcagagacctacaaagatacttagacttccacacaataatagtgggagactttaacaccccactgtcaatatgagatcaatgagacagaaaattaacaaggttattcaggacttgaactaagctctggaccaagcggacctaatagacatggggttgctacagaactgtctaccccaaatcaacagaatatacattcttctcagcagcacatggcacttattctcaaatcaaccacataattcaaagtaaaacactcctcagcaaatgcaaaagaatggaaatcataacaaacagtctctcagaccacagtgcaatcaaattagaactgaggattaagaaactcactcaaaaccacccaactacatggaaattcaacaacctgctcctgaatgaatattgggtaaataatgaaattaaggcagaaataaagaagttatttgaaaccaatgagaacaaagagaaaacgtaccaaaatctaggacacaccaaaagcagtgttaagagggatatttatagcactaagtgcccacttcagacagctggaaagatctgaaatcaacaccccaacatcacaattaaaagaactagagaagcaacagcaaacaaattcaaaagctagcagaagacaagaaataactaagatcacagcagaactgaaggaggtacagacatgaaaaacccttgaaaaaaatcagtgaatccaggaggtggttttttgaaaagattaaccaaatagatagactactagctagactattaaagaagaaaagagagaagaatcaaatggacacaataaaaaattataaagtggatatcaccactattctcagagaaatacaaactaccaacagagaatactataaacacctctatgcaaataaaccagaaaatctagaagaaatggatacattcctggatacattcctggacacatacaccctcccaagactaatccagggagaagttgaatccctgaatagaccaataacaagttctgaaattgaggcagtaattaatagtctaccaaccaaaaaaagcccaggaccatacagattcacatccgaattctaccagaggttcaaagaggagctggtaccattccttctgaaactattccaaacaattgaaaaagagggagtcctccctaactcattttatgaagccagcatcatcctgattccaaaacttgacagagacacaacaaaaaaagaaaatttcaggccaatatccctgatgaacatccatgtgaaaatcctcaataaaatgctggcaaacgaatccagcgacatgtcaaaaagcttatccaccacaatcaagtcggcttgacatgtaaggctggttcaacatacgcaaatcaataaacgtaatctatcacataaacagaaccaatgacaaaaaccatatgattatctcaatagatgcagagaagtcctttgataaaattaaacatccttcatgctaaaaactctcaaaaaactaggtattgatggaacatatctcaaaatataagggctatttatgacaaatccatagccaatatcatactgaacaggcaaaagctggaagcattccctttgaaaaccagcacagacaaggatgccctctctcaccactcctattcaacatagttttggaagttctgactagagcaatctggcaagagaaagaaataaagcgtatttaaataggaatagaggaagtcagattgtctctgtttgcagatgacatgattgtatatttagaaaaccccatcgtctcagcccaaaacctccttaagctgataagcagcttcagcagtctcaggatacaaaatcaatatgcagaaatcacaagcatttctatacatcaataatagacaagcagagagccaaatcatgagtgaactcccattcacaattgctacaagagaataaaatacctaggaatacaacttataagggatgtgaaggacctcttcaaggagaaccagaaaccactgcccaagaaaataagagaggatgcaaacaaatggaaaaaaaattcagtgttcatggataggaagaatcaatattgtgaaaatggccatattgcccaaaataatgtatagatccaatgctattcccatcaagcttccattgactttcttcgcagagttaaaaaaaaaaaagaaacaaaccttaaatttcatatggaaccaaaaaggagcctgtgtagctaagacaatcctaagcaaaaataacaaagctggaggcatcatgctacctgacttcaaactgtactacaaggcaacaataaccaaacagcatggtactggtaccaaaacagatatatagaccaatgaaacagaacagaggcctcagaaataataccacacatctacaaccatctgatctttgacaaatctgacaaaaacaagcaatggggaaaggattccctgtttaataaatggtgttgggaaaactggctagccatatgcagaaaattgaacctggatcactgccttacacattatacaaaaagtaaccaagatggattaaggacttaaatgtaaaaccgaaaaccataaaaaccctagaagaaaacctaggcaataccattcaggacataggcatgggcaaagacttcatgactaaaacacccaatgcaattgcagcaaaagccaaaattgacaaatgggatctaattaaactaaagagcttctacacagcgaaagaaactatcatcagagtgaacaggcagcatacagaatgggagaaaatttttgcaatctatccatctgacaaaggtctaatatccagaatctacaggaacttaaacaaatttgcaagaaaataacaaccctatcaaaaattgggcaaaggatatgaatggacacttctcaaaagaagacgtgcaaccaacaaacatgaaaaattgctcatcatcattggtcattagagaaatgcaaatcaaaaccacaatgagataccatctcatgccagttagaatggcgatcattaaaaagtcaggaaacaacagttgctgttgaggttgtggagcaataggaatgcttttacactgttggtgggagtgtaaattagttcaaccgctgtagaagacagtgtagcaattcctcaaggatctagaaccagacataccatttgaccgagcaatcccattactgggtatgtacccaagggattataaatcattctcctataaagacacatgcacacatgtgtttattgtagcgctatttacaatagcaaaggcttagaaccaacctgatgcccgtcaatgatagatagagaaaatgttgcacagagacaccatggaatactatgcagccataaaaaaggatgagttcatgtcctttgcagggacatgatgaagctggaaaccatcatttttagcaaagtaacacagaaacagaaaaccaaacaccacatgttctcattaataagtgggagttgaacaatgagaacacatggacacagggaatggagcataacatacctgggccagctggtgggtaggggtcaaggggagggagaggattaggacaaatacctattgcatgcagagcttaaaacttagatgatgggttgataggtgcaccaaaccaccatggcacatgtataccaacgtaacaaacctgcacgttctgcacatatatcccagaacttaaagttaaaaaaaaaaaaaaaaagccaggcgcagtggctcacgcctgtaatcccagcactttgggaggctgaggcaggtggatcacaaggtcaggagatcgagaccatcctggctaaaatggtgaaaccctgtttctactaaaaatacaaaaaattagccaggcgtggtggcgggcatctgtagtcccagctacttgggaggctgaggcaggagaatggcatgaacacaggaggtggagcttgcagtgagctgagattgcgccactgcactccagctctggcgacagagcgagactctgtttcaaagaaaaaaaaacttcagtttacttgattttgcttatagagttctttgagaatttaaatcatcctttctgaattacagaaagtcatagattagaagtgtagctttaaaatgctctagatcactctgaattaagaaaaagggtttcctttgtccagaataagcatcaatttaaaacagcatttaaaaacaagtattcaacaaattggtatacgaattataacacaagcaactaaatcactgactttgattagtctctctactgattactactgttgaacagaagttgtgtgtaagaataggagaaggtgaactcattgtcttgagcatgtggaattagttcttgtctgaggccagatagcaatttttatcttattttcagtatagcagatcctatgctgccctgataagaatcacctgcacagcctcattgactctcacggaagtattccagtaactctttgaattttttcctagaaaaattggcatctgttacccctacacaattccttcataaacagtagaaatttcccccatgaaacctttcctttaaccttaacattcttcgataattatttatgaagtccttaaataattattaaaacaagtattggttttgaatacgtaccagctttggaatactgcttaaggaaaccatgataaactccaactcctttatgattatttagaggaatatatctatttgttatagtcttaaggaaaaccttgtcaacatattagatgatagaaacagtcataaccagcgaccaccaggtttggtgggaactcatgatgtgaagggtctactccatgttctgccaaccaagtaactaagtcattttgggcaaatgattcagctgacttgatctgttacatgattcctaaggtctgttatagctccaatatttcatggcatcactccactttaatgtattatctatcttaaaaaagttaaacagaaagatcaattagcacttatattaaatttgagttgctgaatattttattttttctcacttccactcactgcttccactatttgggtaatgattgttggagctgtatgcatttataatgcattaagtacagtgtggtatatcagtaaaacttcattacaaatattcattccatacatttgtctgtactggggtcagtttttttccccttcttcttctttttaaagacagggtcttgctctgtctcctcctgtcttggtctcccaatgtgctagaactacgggcatgagacactgcacctgctcttttctagttttatttgtctatctgaagagtttattatttggctaagctcacatggcaaggtaggtatcatgaagtgttaaaacccagcttttctgctaatgttcttgtgagataaaccaactattagtaaagatacttgcttcctaatcaagattacttggaattgttaagagagtatgtatgtatgtataagttaactttttaaaaacttctctgctgcctggaggaataatgaaatgacccaaagggatagaagcaaaatatttcagatagtacataacgtatatacttagccttgtgcaatcaagaattaatgatataatgtgtatggagtaatatttaactttatttcgttataagcccttttgggatagtggttgttccacataacttttatcttctttaatgcttagtatctgctagaaatgtagtctgtgggatcataagagttggggaagatttacagatagcattttcagagactgaacagaaaagcatattgtcatttggaaaaattttaaaagtgtctaacttttattcaggaccatttgcttttattttcctgttgttatttatttctattatcttgtttacagttgaaatttggacaattggtctgtatcttttctaattttcattatatataaagacttaggtttcctctttccttatgtgtttgttggtaaacattaggtgctatttttaagttttcaattctcaggcatagtgctacttatccatgttatttatataagcaaatgagcatatttgccaatcaatccacggtaagaaacacaatttaagttcctaccaaggatacctctgtgtgtgtgtatgtgtgtgtatgtatctgaaatatttcactaaataattcatttttttttttttttttttttttttttgagacggagtctcgctctgtcgcccaggccggactgcggactgcagtggcgcaatctcggctcactgcaagctccccttcccgggttcacgccattctcctgcctcagcctcccgagtagctgggactacaggcgcccgccaccgcgcccggctaattttttgtatttttagtagagacggggtttcaccttgttagccaggatggtctcgatctcctgacctcatgatccacccgcctcggcctcccaaagtgctgggattacaggcgtgagccaccgcgcccggccaataattcatattgttaatacctcaaccatatcttgatattctgttagctttttaaatgatggttgtgaccaactacagttcacatttttcactagtggatcacactctgcagcattaaaatcaccgtgaaatagattaattagaataaatgaagtgttcttttttcattctgtttgtacagtagatattattggattattttataaaatacccattttataaattggatggtatgttataaatggatagtaggatttttcctttcttcattttgtaccaagagaataaaaaacactcctgttcagtacatctctagcaagcctatttcaacatccaatgtctcaaataattaatttttctatactttagtcacccttacacctaaacgttacagtgcttcagtataacttctatgtaaacattattaatcccatttacagatgggaaccagagtgttgggagacaggtcatggatttctcatgttcctgcacagtctaagtgttctaaggagaggcatttacagtgccaattgtataaggagaaatttcaggacagtaaaactactgacatgtccctccctggagacgtccaaggataataaaaataaaagaccttctcttccccttcccagaggagatttgcttatatttgagtgtaatgagcaatctttctgggcagagcagggtggcaaaccaatagaagatcagagttccttcatttgggggttactctcctgtgatgctctctactgtatgcactagtaacatccatcccttactgcattgcctcatggagattggagctcagggaactggtctaaatatattgttctaggtgctgcttttgctacgagtaataaattgtctttgtttctgatccacagttcttgtgtccttatgtcattgtgtgtgtgtgcatatgtgtatgcaggagaacgaatgcggcagattgaagagcagttgaatatcagacctttgtagtgtggtggtggtgattatggtgttgagacagaattttgctgtgttacccagtctggtgtgcagtggcgcaaggctcatttcagccttcgaactttcaaactccatgggctcaggtgaccctcccagctggtactgaaggcacaccccaccatacccagtgattttttttttttttttttttttaagagacagggttttgtcatgttgccgaggctggtctcaaactcttgggctcaagcaatccacccacctcagcctcccaaagtgctggggttacgggcataagccaccatgcctagccctttgtgatttttttaacttaactctggctcacacaatttaactgtaggtctgtttgtaaacctgaagcgctttctatgctttcttccttacatagaccgataaaataagtagaaaatatggtgctaatgactagtatttggtataagtagataaatgttttgtatcacatttgcatgcttataatctgtgatcaatgagcagtctgaatatttttccctccatcctcataagttaaactaaaaaaaagttatagattgaggctgggatatctggtggcgaaattatatttatttgaacagagtttgtgtatatacatacatatttcagaatatattgaaaaataaaagtgtaatgaccttgataaaaatgaaatattcacttaaaaactccatttaataatgcccacaggaaagaaatgcttctagaattttttaactaatcatttttctcagtacttttgattgtcatgcaaactaaagaaatggacttaatgaacaatttagttacaataataaagtttcaaaaattctaaatttacctcataattgcaacagatgcaaaattatttcatatctttatactcgttatgaaattacctcatatccaaaaatatttatgtcaagtgacaggctttttgcagcatttttgatattattacccttgtaatatataattaactttgtaagttaaccttgtggaacttttaagggaaatgcattaacttagcattaatatagacttctaaaatttactgtgatgtagaacatttgatttaatgttgtctgtgtctaatacaaaataactgtggtccacttacttatttcaaattttattctcaaaggtacctactagattatgtgtgaagaagtttgtgaccaaagtaatataactgattctgttttgaaaatctagaataaagtttatgcaaaagcatatggattatttctttatgaatgcagttttatactaaaaactcctccatacccacgtaagtagatatattctcatagtgatgtagaaaactgacaaaacttttcatcctcagagctaggaattcttgtgtttggccacaagggaaagacaaaggtattagaattttaaataagctatcatcaacaaatactacatctctccagctccattcataaatatagcaacattttggaagtgcagatgaatcgaacatagttaagtgagaaaaatttttagtaacatacataatttgtaaatattgaatcgttttttaaatgatactctgagtcataattatttcaaattgtacataatgctagaagaaactaggataatagcagaataagttacagtgactaaaatcataggtttttttaagagattggggagtctctgtggtgcccagtctggagtgcattggtgcaatcatagctcactgtaaccttgactcctggcttcaagcaatcctcctgtctctgccttccttttgtagtttcaggtcttaacatttaagtctttcatccattttgagttgatttttatacatggtataagatgaggatctagtttgattcttctccatatggatatctttggtctatatatttatttatatgacagtaccatgctgttttggttactgtagcttggtaatataatttgaatttgtgtagtgtgatgccgcagctttctctttttgctcaggattattttagctatttggggtcttctgtggttccatatgaattttaggatttgttttttctatttctgtgaagaatgcctttggtattttcatagagattgcatttaatctgtagctcactttggttagtaaagatattttaacaaggccgagcatggtggctcatgcctgtaatctagctctttgggaggctgaagtgggaggattgcttgaggccagggattcaagaccagcctaggcaacatggcgtgaccgtccctacaaaaaaatatttttttaattagctaggcatggtagcatacacttgtagtcctgtctacttgggaggctgaagcaggaggatcctttgggcccaggtggtcaaggctgcagtgagctataatcatgccactgcactctagcctgagcaacagagagagatcttatctctgtgtaaaagaaaaagaagtgtaattaaaggaaaaaaacattttaacaacagtctttcaattccaaaacatgggatgtctttttttccttttctcttcagtttctttcatcagtgttttataattttccttgtatagatctttcatctgcttggttaaatttatttcctggttattttatttttttgtagctattgtaaatggtttgctttcttgatttctttttcaggttggttgctcttagtgtatagaaattctactgacttttgtatgtcgattttgtatctgacaacttaataaattcacttaccagttctaatataatatggtctaattaatatattagactagaagtataagatctctcctggagaatgttccatgtaccgatgagaagaatgtgtattctgtggcagttggatgaaatgttctgtaaaggtctgttaggtttatttggtctagagtatagtttagcttcactgtttgaagttaaacactgatgttcttacatttcttataagaacattttatgtttcttatgtataagaacactgatgtttttatatttctagtctaataatgtattattaaactaaaaatataagatttgtcctggagaatgttccatgtcctgatgaaaagaatgtgtattctgtagcagttggatgaaatgttctgtaaatgtcttaggtttatttggtctagagtatagttttttacttcagtgtttgttgattttctgttgggatgatctgtccattgccgaaagtaggaaattgaaatcccctactattattgtatttatctcttgctcttgctcttatgtattcacacttgctctctctcatgctctctctctctctctttccctttgtatctaataatatttgctttatatatttgggtacaccaatgttgggtgcatatatatttactattgttatatccttttgctgaattgacccctttatcattatattatgatctcctttgtccctttttacagtttttgacttaaagtctattttgcctaatgtaattataggtattcctgcccttttctggtttttatttgaatagaatatctttctgcatcccttcactttcagcatctatgtgtctttataggtgaaatgagtttcttgtaggcagcatgtatctgggtcttgtttttaaaatccattcacccaccctgtgtctttatttgggttttatttgagatggagcctcactctgtcccccatgctggagtgcagtggtgtgatctcggctcactgcaacctccaactccctggttcaagcgattcttctgcctcagcctcccaagtagctgggactacaggcgtgcaccaccatgcctggctaatttttgtatttttagtagagacggtttcactatgttggccaggctggtctcaaactccggacctcatgatccacccgcctcggcctcccaaagtgttgggattacaggcgtgagccactgcgcccggcctatcctgtgtcttaattggagcatttagttcatttatattcagtattattgatagataaggttttactactcttattttgttacttgttttctagttgtttttaacttttcttctgcttcttttcttactgtctttctttgtggttaggtgattttctcttaagagtacattttaatttattgctttttatccatttttgctctgtggttaccaagaggcttataaataaacatcctgtagttatagcaagtatttaaaactgataatcaacttaactttgattggaaaaaaaacacacaaaagtgaacattaacttccttctcccccttcattttgaatttctgatgtcacagttcacatttttatattgcctatcttgtaacaaattgttgtagttattatttttaatagttttgtcttttagtcgtcttactacagatattagtgttttaaacactgcaaatacaatattaatataacactcattttagtgtttcttccagtttgaagaagtttttaaagcatttcttattggacaagtctgattatggtaaattccctcagcttttgtttgtctaagaaagtctttatttctccttcagttttgaaggataattgtgctgagcacagtaatcttggttgacagtttcttctccaccagcattccaaatatattcttccacattttcctggcttataaggtttctgctgataagtctgctaccaggcatattggatcttccttgcatgttatttacttctttcctttcagtgatttcagaagtttttctttgtgcctttgacctttgtgagtttgattataatgtgtcctagagtagtcttctttgtgtttaatctaattagtgatctttgaccttagtctacctgaatatttatatcttttttcaggtatggaaagttttctgttatcatttccttgtataagttttctacccctttgtctttctcagtccttctttgacttcagtaacctgaatatttgcccttttgatgttgtcccatagattttgtaagcttgcttgcttccttttctttttttttctcttctcaccatatttttaatcatttttctttgaactcactgattcttttatttggttaattctgcttctgttgctctctattgagattttcgcttcattaattttttttttttagttgcaggatttctggttttttaaaaaagttatttgagtctcttatatttctttcataattttctgaattgattcttcatgttttctttaagttctttgagctgtcttcaaacaggtattttgaatttttggagagatcacatatctcggtcactttcaggttagtctgtggtaccttattttgttcttttggtgtgatgtatttccctaaatgttctcaatgctttagaagtgtgatgatgtctgagcattgagggatttgtaatttattttagtcttcccagcctggctttgtttgtgcctgtccttcttcaagaggccttccagggattctaaagctgacttactattgcattctctgagcctctgaccaattacagccatctcagcactagagtatgctttaagcccaggttttctgagtcctgcaagggcaccaaggttgacacagctttctggcccagatggacctcgggaagacccaagggaggtagttgggctgcctgggaatgctgtccagacacctgaagccagaagactctcctagtggtcctgataggtatgcctcccaacaaatctctgcacagatgggataggtccctgactacaaagagagtggctggagttgagactgtgcgtctttggaatctactgtggaaaggaggctgattggctcacctcattggctcagattggcatgcatcacccaacaggtcccagtatctgggcagtttcttgactgcagcaagagggcttggagccaagactgggccccttcagtatctactatggatatgcctgtcacatggatccagttgggcgtgtgtctcccagcaagtccctccatagatggaatgattccctgactacagcaggagaggctggaggtgtgactgtgcccccttgggatttgctgtgggacagaggattgagagcctggtcttggctcagaggggtgtgcatcgccctgaatgttcctgcacatacaggatatttccccaactgcagtgagacgagccaaagctgaaactgcaccaccctgggatctgctgttggatggaggttgatgtgcttgtcatgttggctcagatgggcgtatgtctcccagcaggtctctgcatagacaggagggttccctaacagcaggaggagggtctggatctgagactggaccctctcaggatctgctgtgggatggtggctggagaacctggtctgagcatgcatctcaccagtagaccctgtagacaagatagtttcctggttgcagcaggaaaggctggagctgagactgggctccctcaggatctcctgtgttgcagaatctggagagcctgtcttgtttgcccggacagatacccctcttccagcagatctctgcacagaattattttcagaccacagcaagaagggtcagagctgagaatggaccacctgaggatctgctgtgggatggaggttggcgtgcctgtctcattagctcaaatgggcacccatctcccagcaggttcctgtttctgcacagataggatgcatcccctactgcagcaggaggagctgaggctgagtctggggcctcccttgggatctgtggcatggagtctggagccccttgtctcattgactcagagacacacccacaggagataacttttcaacttctagtaagcaatcatttgaatcattaagtatttttggtgtattatacataaccacacttaattacaattcatacctgtaccttcttattgctacccatatttgaggaataggtctttcccttctttccttctatatttaaaaccttttatctatattttcttctcatgccttgagtctaatctcaaaccttgttctcttcttgatctttgctaactttgttgtaaatgtgctcctatcccactattgaaacaaacaggcaaactctccaacattcgccttatctatcctcatttcagctgaatttcttgacagtgtagttcacacttctttatctctgatgcattcagctgctctcaccacgtttttaaaatccagtgggcacgagtcacccatgaccttttagttgccaaatccagtgaacacttttcagttcttgtctgacttatctctggcatttatcagtgttgaccttaccataactctgaaacttttcctgtcttgcttagcttatgtgataccttttccctcaggtttttcttcttttctggctcctcttcttccttttccacagctggcaattcctactcttacagctcttctaatgttttcctttcctttcctttatctttaggcaaaggctatggtgtgtgtgtgtgtgtgtgtgtgtgtgtgtgtgtgtgtgtgtgtgtgtgtgttctagcaacctctttcaaatgaattccaatggattctaacactaagctggagtgtcaggtactacttgtgatttcttctcttttatcttcctgggagttttacagaatctacagtagtgatcactacttcccacagtcttttcctgacactttctttctccctttctccagtttattcacttctcttttagattacaggacaattttcctctgttctccgtacatccagcctggctgtcctccagtctgtgttccatagagctactgaaaaccctactaagaaacaaattttgtaataccatttccttacaatgcttcagtaattaatgttaacatttaggttaaaaacagccttatcattaagaaaacttttaaactgatttaaaatttatataatgtgaaatcattttaaagtatacaattcagtggcatttactgcattcacaatgctgcacaaccacaaccataatttctaaataattctaagttttcatcaccccaaagggaaactccatacccatcaagcagtcatttgtcattctcccctccagctagccccgttcatccattaatcagctttctgtgtccgtgggtttacctattctggaggtttcatatacatgaaatcatcactatatgtgaccttttctgtctggtcttttacttagaataatgtcgtggaggtgcatcccattttgttgcatatattagcacttcatttttttgattgaataatgttccattgtatagctataccacatttgttattcattcatcaattgatggacattcgagttgtttctgccttttgaatgcctgattttgattcatttttgtagagtccttaggttttcctaagtataagatcatttcgtctgggaacaaggctaatttaatttcctctttttcaatttggatgccctttatttctttgtcttacctaaatgctttggctgattcattttgggcaaatacctgggaagagtgtttaattgctgggtcatatggtaattctatatttaactttttaaggaaatgccaaactgtctactacaacatctacaataagataaattttcaccagcaacttatgagggttccagtttgtgtacatcctcactaactcttgttattttattttccagttttaaatactattaatatctaactcagtgggtataaagttatatctcattgtatttatgatttgccttttcctaatgactaatgatattgtaaatgttttcatgtgcctgttgcccatgcatacatctttttgggagaaatgtatattcaacttactttcccgttttttatttgagttttatttttaaccaagaaataccttttaagtgatcagacctggaaccttgccaggtttaatgattatcaaagcagagccatattttgacttttgatgttatctattattatagtcttgttattcataattacttgaatattatcagcatctctagatcctttgtagttaaaacatagtaaagtattttaagtctttatactaaaatagtacgtcttgaaagttttaatatagaacactctgcttagcatttctttataacctaaaatgcaattaataaaagggtgtcatttcctctgccaattaagtagccttcattggttgatattgaacaaattgctgatacttatttctgtgatgtttactttttaaaaaaaatattttttgctttctttttaacacttccaaacaattgctaggttaatttgtcagttgcaaatctgaaataaaattgtttttagcagtctttcaaataaaattttcgttgagactaaagagatcctggattacaatcaacatttgtagatatgtcatacatagagaaccaaaaaaaaattataaatctgatataaatatcagtgtgccatacaggcatggtggctcatgcctgtaatctcagcattttgggaggctgaggcaggtggatcacttgagtctaggagttcgagattagcctgggcaacatggtgaaaccccatctctataaaaaatacaaaaattagccaagcatggtggtacacacctgtagtcccagctgtttgggaggctgaggtgggcggattgtttgagcttggtaggcagaggttacagtgagccaagattgtgcctctgcactccagcctaggtaacagagcgagaccctgtctcagaaagcaaaacaaaaacgcccaaatatcaatgtgctatgaaaccacacattgtatgtgttcattcccacaaattggagcattttaagaagcgctctaaattagtttatgtcttgcttttcttcttatgttctgtagattctttagtactccataagaaaaatttgctatagaaagcataaaaactgcaaatgcattatatcctccatgaaaccagctttaatttagttgctaaaccctgatcattgttgcactatacactcagaaaatgtatagcagtgactattttgtaaatatgaagagttcatattcagcacattcagcaatggtttatatctaaaatgatttttgaagaatgctttaaaaaacttctttgcctagagtctttaaagctggcactttaaaactatgtttcatggattgtcagttggaatggacttcaggaggtccataagtccatgaaattacagttttttaacatgaatttttctgaggatacatgatttttatcatactctcaaaagaatctaaaactcaaaaatggttaagagacacttaaataaaatgttgataaaggccatggtcattgattctcattcttcagaagctttgcatgtgtgagtttacctactcactaaaatgtacttgtaaatccaaaaccagtactcggtgcttttgcagtcatttgtaaacatatttggagaagcaaaaattttgagttaccttatgtgttcattcctctctgaggtcaaagaaggtgatggtttgccttgtttcagctgtcatactgtaaacaagtgtccttttcaatgcgtatttagtgccatattaatcacattttttgttgttgatttttctgtttaaaatggttcccaagcatagtgcagatatgctgtctagtgtttctaagcataagaaggctgtgatacacctgagagaataaaaatctgtaatagacaaacttggttcaggcatgagttacactgctgttgactgtgagtttattgttaataaatcaaatatgaagtatcaatatctgtataaatagttaaatataattatatatagatgtaaatataaattgttaaaatacggaatctttaaacagaaacatacattttagaaattatgtattggcattggttgaccaagatgatgtttggagaggttttcaggaaactaaccctgtctttttcccaggaacaataattctgcaggaggcagaacctgttgtctaggttggagtacagtggcatgaacatggctcactgcagttttgacctcctgtgcttcttctgccccagcttcccaagtagttcaggctacaggcacatgtcaccatgcctggtaatttttgtattttttgtagagacagggtttttcttgcccagactggtcttgaatttctgggctcaaacaatcctcccatcttggccccacaaagtactgagattagagatgtgagcctccatgcccagctatagttaaccttttgcagtgtttttttttttaacttaatgtttctaaatttcttctagggtaaacatttactacgtagaggctgtgtgtcatttacctcttcatggtatcacacatcagatacttctaacataatcatgataaatgttagtggtttcatggtcttatttacactccagctctaccagaattcactaatctacttcaagtttctgtctgaaatattctttttttttttttgatacagagtctcactttgttgcccaggctggagtgccgtggccccatttcagatcactgcaaactctgcctcctgtgttcaagtgattctcctgcctcagcttcccaagtagctgggacttacaggcacacgccaccacacccaactaattatatttttagtaaacatggagtttcaccatgttggccaggctggtctcaaactcctgacctcaagtgatctgcctgccttagcctcccaaagtgctaggattaacagacacgagccaccgcatcctgcctctgtctgaaatattcttattgttcatcatacagtatattgggctacagtactgtatttttctccagggtgttggtaaccatttatgctgagtttagccattttacttaagagtctactaattcactgtagataaagagttactactttggcatggtggagcatgcctgtaatcccagctctttgtgggaggccaaggcaggtggatcgctcgagtctaggagctcaagaccagccaagacaacatggcaaattttatttctacaaaaattacaaatattagccaggtgtggtggtgcatgcctgtagtcccagctactgaggaagctgaggtgggaggattatttgagaccgggaggtagaggctgcaatgagccatgattgtgccgctgtgctccagcctcagagacagagcagtaccacaaaaagagttagaagagttctttatctaacaaatatgagttgtatatttgcatagttgattgcattcatgaagtctaagtatttttttattcattaaatctaaaggaagttggggctctctgctttcgataagatgaagtaacaagtactgtacttatccttcacctaaaataatgattaaagaaaatttgtgtgtttatttcttaagacacagaacaagcatttgataaaatccaacatccattcctcataaaatcactcctgaaactggtgatagagaggaacttcctcaacctgataattagcatctataaggaaccaatggtaatattatatttactggtgaatgtctgaatgctttctcactaagatcaggaataagacaaggatgtctactttcactacttctgttcgatactgtactgcaggttctagccagtgcaattagttaagaaaaagaagtgcttctagattaaaaaacagaagtaaatcaatcattatacttcagtgatatgatcatctatgtatattattctatagaatctacaaaaaggtactagaatgaataattgagtttagcatgcttgcagaatataagatcagtatttaaaactcatgtagttttctgtactaggaacaaaaatttgaaattaaaatttaatagaagaaatattttctatcacataaataataggctatacttggggacaaatctgacaaaagatctggaagacctttactctgaaaactgtaaaaacattactgaatgaaaataagtgtgcagattctttacatatgatactaatagaatgatctgtttaaaattgattaattgtgcatcagctatatacataagccaaaacttaaacaattgtacaccttaaatatgtacagttaattttgttaattcaaatccctatactactgttaaaacaaattagaaaaacaaactaaaggaatttatgttcatatgacagtgaatgagttgtctgaactcacctcaatttttaatcctaagatgaatccatctctaaaaagtactgaacatctctgaaaagttatgaatatggtgtatgttttctcccataacctcatatatagcaattattgttattaggaaatcagaactagcttaaataatcataacattgaccatctgctttccttgttaaatacatttgactactaacttaatgttttcagttagccctctaaaatttgagaaagcaacatcttttttacctttttgccagatttctacaggctttctgatatatagttggccctctagatcattgctggcagtttgaaatatgtgtgattatgatagagtatttaaaatattttattataaatatttgatcaattttttattatataaattttcttcttttaaaaaaatacaatttagagatggggatcatactatgttgcccaggtcttgaactcctgggctcaagtgatccttctgccttggcctccaaaagtgctgggattatagatgtgagccactgcacccaggctagggtaaacttttgataaatatttttgattatgtagaataattttatggtgagttcaaagtagggttttgcaatttttattgtggagatgtatttatactgttagtttcaggatatctgtactgatcatctcctgtgtttttaatcatgatgtttccttttcaaacaacacattatgatgaaagatcaattttcaatgaaatcatttataagtatatactagctattgcaactttggggtttggaaaggaaaaattaaagtgtgttatgtttacatgttggaaacatgttagaaaaatcagtctaggattggaaggagatgggaagatttaggagtaactgctaatgggtacaaggtttcttcttagggtgagaaaatgttctacaatgatttgtggtaatggttacagaagtatgattatacctaaaatcattgaatcatatgctttaactggataaataaaaggcatttatattggaaaggaaatagtaaaactgtatctgtttgtagataacatgatcttatataccaaacaaaaatcttaagcagtcccctacagatctattagaagtaataaatggcttttcacactacccacatagacgtccatacggcgttctttctggattcccatcgtagcttaaagcgaaacttttcaccatgtctggagcccttgatgtcctgcaaatgaaggaggaggatgtccttaagttccttgcagcaggaacctgcttaggtggtaccaatcttgacttccagatggaacagtacatctctataaggaaaagtgatggcatccacatcgtaaatctgaagaggacctgggagaagcttctgctggcagcttgtgccattgttgccattgaaaaccctgctgatgtcagtgttatatcctccaggaatattggccaaagggctgtgctgaagtttgctgctgccactggagccactccaattgttggccacttcactcctggaaccttcactaaccacatccaggcagccttccaagagccacggcttcttgtggttactgaccccagggctgaccaccagcctctcacagaggcatcttacgttaacctatctaccgttgctttgtgtaacacagattctcctctgcactttgtggacattgccattctatgcaacaataagggagctcactcaatgggtttgatgtggtggatgccagcccgggaaggtttgcgcgcgtgtggcaccatttcccatgaacacccatgggaattcatgcctgatctctacagagatcctaaagagactgaaaaagcagagcagcctgctgctgaaaaggctgtgaccaaggaggaatttcagggtgaatggactgctccagctcctgagttaactgctactcagcctgaggttgcagactggtctgaaggtgtgcaggtgccctctgcgcctattcatcagttccctactgaagactggagtgctgagcctgccacggaaggctggtccacagctcccaatgctcaggccattgaatgggtaggagcaaacactgaaaggtcttaagctgttattgcacacgctcttaagcaacatggaaataaggttgacggaaaataaatgtcagtttaaaaaaaaaaaagtaatgcattcagcaaggttgacagataaaatatcaagatagaaaaatatattggatttttgagcaatattaatgggcaaattgaaaatgaagttatgaaacaatttcatttaaatatcttaaaaagaaataatgtacttaagtataaatataacaacagaagtgtggaacttatactctaaaaactacataacattgaaagacattaaaggaaactaaatggaaagacattaaatgttgatattttgaaaagatttaatatttttaggatggcagttctcccccaaattgatctaaaataaatttcctactaaaatcacagctaaattctttgcacaatttgacaagctgctcttaaaattaatatggaaattcaagggacccagtatagccaaaacaatcttgaaaaagaccaaaattgtgtttctcacttcccaattaaaaaacgtatgatgaagccataccaatatgtagttctggcataatgatagacatatctattaatggtatagaattgagaacagaaataagtcttcacatttatggtaacctgtctttctataagtgtgccatggcataaagaatagtcttttcaatgaagggtactagaacacctgcccatccatatgggaaaaaaaaaaagctggacccctatctcatatgcaaaaattaactcaaaatgaattaaagacttaaatgtaagaactaaaactgcaaccgttagaagacatagggatacatgtttatgactgggcatgggatatgagctggcaaatgattcttagataggtcaccaaaagcatgagcaataagagaaaagaataaataaattagatttcatcaagttttgaaagttttgtgctttaaaggacaccatcaagaaagtgaaaagacaacccacagaatgggagaaaattgcactcacatatctattttatcttgaatatataaagaattatttagactcaataatgatgaaaagacaaataactcactttaaaaaatgggcagaatatctgagtaggcagtttcccaaaagaagatatacaaatgactaaggagcacataaaaagatgctcaacataattagctatcaggtatattaaagtcaaaactacaatgagataccatttcactcctgctaggatgatgggtataatcagaaggacagagttttggcaaggatttggagaaccctaaggcattgctggtgggaatgttaaatagtgcagcctttttggaaaagagtcttgcaattccttaaatattttaacatagagttaccatatccagcaattctgctcctaggtatatacacaagacaaatgaaaatgtttgcacaaatgtttatagcagcattatgtataatagcctaaacatggaaacaacccaagtgtgttactgataaatgaataaacaaaatttggaatatccatgcaatagaatattatttgacaaaaaagaaatgaagtactgatacatgctacaacatgggcaaattttgaaaatatcgtgctaaatgaaggaagccagtcataaaagtacacatgttttatgattccatgtctgagaagtggcctgaacatgcatatttttagagacagaaaataaattagtgtttgcctgggacttgtgaagatgaggttttcggaagtgatgactcaagagtgaactggtttttttggggggtgttgaaaaatgttctaaaattgatgtggtgatgcctatacaactccaaatatactaaacaccattgaactgtacacttcaaagggatgaattgcatagtatgtgaattatatcttaaggagctgataaagaatatatatttattggtctgttttaccctttgaatggattttacccatatgtgatgtttttaccatgatacattaatcatttgccagagtttttgttccttaaattatgcatatcttacaaatgtaaaatgtcttatttgtcaatatcactactaaacaagaaaatagtctttaagcattgggaacctcactggtggatatgagttttacacgatcataattttcagagacccagggagaattatctcccattttttgattagttttctgtacactgttgcctaattatctttctgaaatacagattgatcaggtaactctctgatcccagcctgcttgtcattgtcatgcatggttagtccttcataaaatatgctattatggaccccatcttttactaaattcagagaaagcatgcccatgtctctctgtgttttttgtgtgtatgagtttctctatgtataattcactttagtttatttttcttcttttcgcctggtaaaatcttcaaacttcaagaaacagcatatctgttatttactctttgaccttttcattataccccatattccttggtgctttccaagttttttgttcgtacctttattataacactcctcgtatgttgttttcatgcttactcctccagtagagctatgaacttctcatgactttatttgtgcttctattccctcacagagtactttagatataataagagtctcttggattaatgagttcctaattttattgtgggtgctcagtaacatttttattttgatgatgttataattgaggtatgaatcagactccccttacactttctgcatataaatcttttttgtaaaagaattctatacattttaattatcctataaaaacttaattaccaatattgtttgtagatgtctgttgccagatttttaaaaaatgatgcattaccatccccataaatgataattgccttttgctttttttaatataaaaatgacaactttgcctgtcaaattataaaaaatgttttctcattattttcatttgccattctttggttactgtgctagagaatatatatgtctattgtttgttagtgtttatatcattgccctttaaaaaaattgtagttgtgcaagaatggatgtaggcaggctaaaatatggactctccagagatgtggatatgcctgggaaattgtcatttgatttacctgtcttcacaatcagcattttggaccgtgatacagttgttactacctatttacacttggctgataggcaggctcaaagctgtagcctcttattagagtcagtcaaggggggccagaatggcaagagccatttttttttttaaactgctggtcctacctcagcagcaccaggagagtggcaaagggggcttcttcaaagattttatggtatcttcactttatgtcaaagtctaagctatcagtatttttctttgtagtagttggtgtatgtgccaaagttagaaaatctttctctgtcttggttattaaaataagtggctgaattttctaatacctttatgggttctgttttgttttggtttgttttttcatttgtgtggggtttttgttgttgctgctgttgttgtttttacacttttggttaaagtgtgacaggaaaaacttttctttttttccctgaaaatggttctgtttttatgccagcttaatgtactaattccctcatttccgtctaaaaaaaaaatcacctttattttaatactatattgccataggtacttggatccgtgtttgaactctgtatttttctgttgatctgtatattagtaccaaattgtttctaaagcaattaacaaataatacattttaatacctggtagtaaactgctcccttaatcccatcattattactcatctatttcagaaggtactttcttattattcttccacatgaatttaaaaatcatattgatattttcaaaatatcacattggaatttgtaggttctttaggaagaaataacattttagggtacatttttgttttcttatcatatatcaagtttttcattttaattatttatttcatagctttttattatcgaaagtttcaaacatacacagagaaagaatagtaggtataatgagctccacgtttctattctctatctagcttcagtaattatttacatttgccaaacctgatttaagtacctctcctatgaagcaagtcccagatgtcttatcatttcatcctcaaatgctctagattgcctgagaatggtctcaaaaaacccaccatcatattattcacaatggtaatttcttactgctatttaatatccaatttagatttgcatttcataattgtttcaaaaatagccttttacagtaagtttatttgaatcagcatctaaagaattcaaacactatatttgtaccttgtgtcttttattattactgcttttctctctctcgtcttttttttttttttttaatactgtcattgacctttttttaaaagagaaactgtgttatttttccaggagaatatctcactttctgaatttggttagttgcttcatatttagtatttgctgagaatttgagctagagatttggttaaactcaggttttatttctttaggcaagaatcttcttaaagtgatgctccatcatttccattttatctcatctgtgagccatcatatctggtggttccacttttaatgatgctgagattaatcaatatgttcaggtgtaggttttttgtttgtctggttttctttctgctattgtatatagaacattttccttactgtttttctagtaggttattattggtatctgagaagatttttaaagcatgtgttttagtaactggacatctgaccaaactctcattactgtgtcaacttaaaaatcatgagatctgtaaatctggaaaagagaactttatttctgagaagggttacaacctgtaggctgggaagcacagcctctggattagatcaaaagtagccatttcaaagacgatgggtgagagaggagttttacactaaatgggttagctgaacatacatatttaacaggttataggaggagctatgagtattcatgaaaggggttacatgtatgtatgataagcaaacataacatgttacatatgtcccatgttcgctttggaatggagacttaacattaaaaatgtggtaaaatcagactctatacatcaaaggtgaaacttaggactcaaaggtgctttgtgcacattctctgtaaactgaccagtccatggtcaattgtcgtttatcaggaaggattgctttgtaagttggtcagcagtcatgtcaaaaccatgaaaagggaggggaatctggccacaacatcaggcagttggtcagtggaagaattttccattctttcttttccagggctggtgtttgtttaactcttaggaaaaatagtctaatgacaggtagtgaggaagagtgtatactgagacgtgaccaacctcctatctcatcaaggccgggaaacttcgtttttaaagtttttctggggcctccttagcccacagacatctgttcagtaggttggggcacttaggattttactttatctcacaaatatctaataaaatttttgggtgatcctcttcagtgactagtatagaattgtcacacttgagctttggagatgaggtgtctcaaattaaaccctaggatggttatttagtctttctgtgcctcagttttttttttttttaatctatgaaatggagatcatgtgtctacctcataggtttataatgaagattgaatcacttcccataataatcagaaactacatatttgggctgggagcagaggctcacacctgtaatcccagccccttgagcccaggagtttgaggttatagtgagttatgagcatgccaaagcactcagagtgagattctgtttcaaaaaaagaaagcagatgtttgttttttaatttttccatatcttttgcagattgtgatattgtgctttccctttttttcatattttaggcctttaattttaggatgtaattatataggccataacagttaaaaaatagcagtgataacatgcatcctacaataacatgaatagctaatatttattttagtataattttcttcttgtataattatgttgttttagtagtatgttttgaatatcaccagaataaatttttggtatctattaaaataatactataatttctttacattgatcttttaagatacagtttatccaatacttatgatgccaggttccagaatgcattagaagagtgtttgtggcatagggaatgttggaacagaagcaacactttacaatgttaaatagttttattgagaaggtgagatttgggtaaagactttcaagatgagtgaggatccatatgggtttctgggggaaatccagttcagtggaggggttggcatttgctaaaggagggcatgtttggtgtgtttcaaaatccagtagggagccgggtgtggtggtgtgcttctggagtcctagctgctcaggaggctaaggtgggaggattgcttgagcccaggagttcagatctagcctggacaacatagcaagatcccatctctaaaataaaataaaaatttaaaaaattgtttaaaatcctgtagagagttcagagtggttggagcagagtaatggagaatagtagacaatggagttagagaggcaatgagaggtaaagggaagtggcttgaacctgtagggcctcatagactattgtaaagatttttgctttttagtgagtgttgttggaagcattacagggttttgaacaaaggaatgacatactttggcttgcatttaaaaaggacagctctatgtgcgtggagtcaaggatggaagcagagaggttaggaaatcatcgcaacagtctaggcaagcagttatggtaacttggatgggtggtagcgtggagttaatgaaaagtggttgaaatctggaaatagtttgagaacaggcttttcaaatggactggatgtggtgtgtgaataacactcttctcactggtcttgttgcctctccaatccagttatacacagtagcaaaaatgatcttactttacatttgataatttcaccttcttgattaaaatccttcagtgacatactattacactgaataaaatttatccttcttaatataaccaacaaggcccacataatctagaactgcatatttttctaaccgttttcatctccctgagctccagccatacaggtgttaaattgttttaatatgccaaagtttttcctgcctcagatgctttgcattgctcctccctctggaaacttcccctaaccgtaaggtcactctttacccaatcagctcatttgcatgtttcacgtctcagtttaaatgtccttttgtctatttaaaatatattttagctgagtgcctttaatcccagctacttgggaggctgaggcaggaggataacttgaggccaggagatagagaccagcctgggcaacatagagagacctggtctctgaaaaattgaagaattagctgggtttgatggcttgcacatgtagttctagctacacaggaggctgaggcagggaggatcacttgagcccaagagttcaaggttacagtgagctatgattgtaccactgcactccagtctgagtgacagagtgagactccatctctaaaaaaataaataattggttccttctttgcctgcctcccactctttgtctttctcaaacatttttttcttcatagcatttcttagaattatgcattttatttctgtgtaatgtttttgtttgctatgctttgcattttatattgtgtggaatctccatgaaaataaggaccagcctgacttgttcaagtttgtggtcaagtaacaggatggtacctggcccttagaactatctttataaatatcattagattggattgactgactcaattaatgaacaaatgaacaaacaaaataaatcattatatgctgaagtagcagtcctggacattgtatctaatttagattttaatttaaccttgttattttgatactcgcttcccttaatcagtcattgcatgttccttattgtaaggtggttgtttttctttatcatgagaagaatagttcttctccgggcgcagtggctcacatctgtaatcccagcactttggggaggctgagacgggcggatcacaaggtcaggagattgagaccatcctggttaacatggtaaaaccccatctctactaaaaatgcaaaaaattagctgggtgtggtggcatgcacctgtagtcccagctacttgggaggctgaggcaggacaatcgcttgaacctgggaggcagaggttgcagtgaatcgagatcgtgccactgcactccagcctgggcgacagagtgagaccctgtctcaaaaaaaaacacatttttttatttagctattagcttctaggcaaaatcttaaatttcagaaaataattatactcatatagtcatactacctgtcagggaaatgtgtcaaaggaaatatgaaacaatagctttaaagttgtcccgcaccctcaccctgtttttcttttgaaggtattatactaaaggaagaaagggaaaaagagaaatctatggtgtgagttcaagtttactactgtaagtgtttaagaaagggctctgttaccatgacaacaaatgcatgaatttcatgtggaaaattttcagtgtatgggactgataaaattgtaacattctgattttctctggtatagaattgttctttgtcaagttaaaaaaaatctgttaatatatgttaaaattaaatttttaaatgttttatgatattgttttctaattgtttattataacttaaaatcatagccaaaagagtgtactttcgtagatctgtcaagcagaaagttaagtatttgatttgacattaaaaattacttttctaatctgtattagatttttgctaaatggtaaataaaatggtaaatagtttcatgtattgggagttcttgacaatagaaaatgacctgccactttatagattcctttgccttaaatgcttactaactcaggtagaggaaagctgttaagctttaagtgctttgtcatatttgcaggcttttatagtggaagagaacagcagtcagcaatgatgatggaaaactgtggcaggtagacttaaaacaccataaagcacagacgattgtgtgtaatgccttgaattgaatcctttttgaatgaaatgatcagccatatgtgccacccttatggaccctgtaagaagagtagaagaaatgtgccctaatgctaactgtgcatgaaattgcagtgttaggagatattgaccagatgtttcaatctcagcaaatggcttgttatgtgactgagtgaaaatatctttgctgctttgatcacatacaccttgaaggaaggggtaatttaatagaggctgtcatagttcatcattgtcaataaactttgacttgacctttgccttacgtttttgatgttgctgctgttaagtgttgttgggcagatgtttactgccttgagggattttgctttttataaagtgtatactagaaaaagtaaaggagaaggattttctcaattcttttcttattctttggttattagttggcatgcttctctgtggattttgtagaatttctgggcagatgcatttgagtgacattcttatgtctaaagatcactgtggtgtttctctaaaggtttcttcctttcctcaccttcctttttcttttctcgagacatggtctcactctgtcactcaggctggagtgcaagtgatgtaatcttggctcactgcagcctctacctcccaggctcaggcgatcctctcacctcagcctcctgagtagctagaactacaggtgcacaccaccatgcctggctaatttttgtattttttctagagatggggttttaccacattgcctaggctggtctcgaacttctgagctcaagccatctgccggcctcagcctcccaaaatgctgggattgcaggtgtgagccaccgcacctggccctttctcaccgttttgtcctggttttaatttaccacaataaacttccttggtggtttttctttcttattttatatacagcctattcttttgttctgatgaaagtcacattgaattaaaacttgacacctattgtaacaccataccaggtgctgtgttatttttttatccctagttttggagacctttggagataaatccatgctattttgtaatccatttttgttaatcttaagaaattgagtgaaagtttcagtaacacaatttttttaaaattataagatacagtattttaaaattttggtaaatagctttggattaaatgagtttcttgtttaatttgatgaatttgactcagttctgtaacctttttgctctttttcttgaaaagaaaaaggcttcctcactggctatatctgggttctgcctacactcttccctcacttccccttggtgtaggtggcctagaccgtgttagtcacctaatgaaatctgtgaatcctctcttgaaaaacacagcaaagtttccttacaatttcaggatgtttattggattttccccccctcctctcacacataccctgcaatgataggggcccctggacttcaagcagactaacaaagcttagaaaataagattcatactccttcttagtattctagatatataacaatttgacttagaagtaacaataacaatagtattagtgatactgctacaataattacaacagtaataataataataataattaaaatttactttctgccaaccttatgccagattctatgctgaacctttaacctgtattactggttatattgttaatgatacctctagatagagtatatgcagcatacttttattctgtactttaggaaatactatatctttagaatacagatttgagtaagagattataagcattttgattctaagactttttggaatactgaacttttagttttctgattccagtagtcagtctgtctgtctctgtctctgtctctgtctctctctctctctctctttctcggcctctctgccattcatcttcttctgaaaattagctatcccacgtaagcctcatatatcccctaattcctatttgtagttgtgagggaggaaaaatattttccttctaagttctctgctgtaagattcttgtaacaaaagacagattaacaaaagttaagtacactaatttatattctaagttttatgtaacatagagggaaatgaagacttgaagaaacaattaaacctggtgtttttacattaggttttatgaagagtggaagggaaaggcaataggacaaaaaggggtatgaactaagagtagtaaactgaggggaccttagcaagacctgtttgtttagattcatctcatgtccttacatcttctgagataaggatgttctttttttctgcatatagtaaacatcctctcacatggatggtcttatgatttgcttcagaggaaatcagaaagtccttcctgcacctgctgttctcaaattccttcagcttaaaattttcagtatgtcaagtgccatattttgggggtagtgtgtcctgatctccatcatagttaagtgtcagcttggacacagtttctcatatttatcttaggaaatcttctttggccactctgcaaagactaaggtgctacttgcatgttctgcaacaactcctattatatatatatcatctcttaaaataaatagtaacatatcttgtatgtaagctttatgtacccttaaattgtaagttttaagaagatacaatcctggctttcctgttcacttatttgacaattatttaattgcatagaatgtagcaggcactcttctagatttggaaacacaccctacaactcttttaaaaaagccaagaaaacagtcttgaacagcaaattaccattaagtggaattaattctatgataggaatgatacagtttgttgcggcaacataaaatgcaggcatataggctgggcacggttgctcacacctgtaatcccagcactttgggaggccgaggtggatggatcacttgaggtcaggagttcaagaccagcctggccaacatggtggaaccccacctctattaaaaatgcaaatattagctgggcatggtggcatgcacctgtaatcccagctactcaggaggctggggtaggagaattgctcgaacctggaaggcagaggtttgcggtgagtcaagatcgcaccactgctctccagcctgggtgacagagcaagactccgtctcaaaaaaataaaaaataaataacaatgggtatatagaacagaatttaggacaacattgtctcagtaagtgaaacctgaaacctaagtaggaagctagaaagaacaaacagaaacagaatgaagtattcagtgtactggaacattgcattcaagagtgttaatgcttaggattaacttggagaggaagttaatggttcaatcataaagttgtttatgttgaacttgcttaagatacttgggtaacgattgaaggacattttaggaagagcactcaaaatgcagtggattggagaaaaacagaactaaaggcagggagatgatctaagaagcttttgcaaatggttgcatggttgggaggatggagtgacagagagaatgggaaatgacatccaatgggtagaggtttctttttgagataatgaaaatgtgatggttgcacagctatgtgaataaacaggaaacaactgaattgtatattttaaagtggcaaattgtatggttatatgaatatatctcaataaatttttttaaaagagacttttatagtagtctaattgagagtagatggtggcctgtactaaagtggtgttaatagaggcaggagtaaaagtgtgtcaatttaataggcaaaatagggttgagtaggtatttggatattcagagcagtcatttgaaaacaagtataagctaaaaatgagggggtctcagcatatagatgataattgaaaccatgagagtagattagatcatatccagagaaagtatatacggtaagaattgtaggtaacctgggaatccaggcctgagaaatgctaaggaatggggagaaggaaagaagcctacaaaagagatagagaagacttctttatccattattaattacaataatgtccaacaaataataggtgatcaacaaatattggtggaatgaattgaatgaatatacactaaaaattctgcattttatcacagtctcagggcactgttgtcatcgtcagctgtactctgtaataggcactgccttgaacactttgcttacattatcctattcaatcatcacaataattccacaagaaacatagtctctgaaatagtagcttgtttaccatcacatggctggatgaacttatatatctgagtctaaagtttattttttctactaggcctaatattccccgaatctgttctgagaatgttaacagatatttactaacaaaaataacaatagaactatttcagggaaagaacaggattattagaaattgatttttattaataggatgcttgctggcaggggcaatggagcagttttttaaggaaagaagcataacatactagttattcagttagaatagattcttaatatttatgaaaatcttgtgttttgccctgtctcacttggtggtattgtaatcatctgagaatctatcctataagttatgtgatatatgctattttccttatcaatctatttcagttttgatttcctcatcatcctttgcagtctgcttgttgctgtttctcagttttgacatttaatttcttttagttgtgctttacagtttttctgagatgcctcattgagttttctgtataaaatttcatatctttggcttatcttgcaactcttttagtacctaggtgtcattcttcatcattctattatgaattgaattaaagcatatggcattatttcagaagtgactgcctcttgggcatcattgtcagttatattgtcctaaatattgcatttaggtaataaaaaggaaatcttccttgaaggtaaagttaatattaatagaaatctttccatatgttgttaaagactcttgttatgaagtttaatatgccatttatttaggccttatttaaattcagttgtaaattttttccttctggctccttaccttagtgaactgtcatctcttatcatcatactctttgctcgaaaaccttcatgtgttgctttctaccctcaggatgttgcctaaatttcttgaagtggtatttactgatctggcctacatctacctttcccattagtctcttccttcccacatagttgctttgtcggtatactcctaatagtcttttatttctgtttttcattgtttttgttaatattatattcttgtttcccaatctgtgcactaagtccccttggggtgctgtagcaaacccacagagagtcttcagggtatttcaaaatttcaaggtaaacacagtgacgtctatcagacacagcatgaaccactagctccagatatttcagtttttttttttttgagatggagacttgctgtgtcacccaggctgtagcgcagtggcgggatcttggctcactgcagcctccacctcctgagttcaagcgattctcctgcctcagcctcctgagtagctgggattacaggcatgtgccaccacgcctgggtaattattgcatttttagtagagacggtgtttcaccatgttggtcaggctgttcttgaactcctgacctcgtgatccgcctgcctcagccttccaaagtgctgggattacaggcgtgagccactgcgcctggcctggtatttcagttttaacattagattactacattccttttggtggcattatactgtgcgaaactgaatctttgacggtttctgtgataaaaagcaaatcagtgtgaaacaaatgagggtgatggttaccagtctgattccaagatttgagaattttgcagtgcctaacaggtagaaaatcattaggaaataaacacttttggctgaaacgaattatttaataaatggaatttctttcatcctaggggcaccatgataaaatttctaacataggaaaggaggcatgtgctatatgctgtatgactcttttttctttctagtttgtaaccattttggaagatcatacccatccttcaaagaccaattgatactgctacctgtctttggaggcctttcctgatcccctccactgcagttgatctctctcatgggtattttccagtaatatgctgcttttttactattgctgtttaagttaaactaattgaagtatttatttgaagttaccaatagtggccgtggttttcctattcctccagttaggtataattacttaaagtataacaagagccctttccttctttgtataaaggtgatacaaatataataatagaaaccctatactgtactaaactgcgtaggttgttagtcaatttctttttatttcttttttttcttttttctttttttttgagaggagttccactcttattgcccaggctggaatgcaatggcgcaatctcggcccactgcaacctccacctcctgggttcaagcgattctccttacctcagcctcctgagtagctgggattacaggcatgcgccactatgcctggttaattttttgtatttttagagatggagtttttccatgttggtttggctggtcttgaactcccaacctcaggtgatctgcctgcctcggcttcccaaagtgtcgggattacaggcgtgagccactgcacacggccttgtttgtcaatttctaattcttacaacatccttaaaagatcataggttatgttatccacattttatatttgaagaaattgacgtttagcagtgttagtttttctcacacccacatacctcctgacctttagctattctagttccttttcctttaatattgattatagaatcaactttttgatatcctcaaaaatccattgagagtttggttgggattgcattgaacttatgaatcaatttggggagaattaatgtcttaagaatattgagttttcaaatccatgtacataatatagctcttcgtttatataagttgtttttttttcctcagcagtcttttgtagtgttctacatatatgtcttgcacatatttggttaaatgtgttcctacatgtttcaattttggtggtattgtaaatattgttttcttaattttaattttcaactcttctttgaaaatttatagaaatacattagatttttatatattgatcttaaagtctgagaccttgattgacttacttttaattctagagcatttatgtggattccttatgattttacatatattccttaaacatgcacaggttggtatctagccatagcctcaagggttactctgtagatttcaactcattcttctctgaaaatctttttcacaatttctagtctcctggctctccttgaacacatctctttctcctcattttagtgaaaatgccaggctctatttgccttctttctccctctccatggtgtggaacttgcctcctggcagagtacctgcatgatgtcagggcacaccttgtttctttcctatcagagatcacagtcctaccatgcctgttattcaatgtctgaaaattctgtaggtgtttccttttggttttctggtttacagcacaacagtaattctagagcctgctactcactcatggccagagcagaagttaaagtttttaaggtatactgtacatatgtgaaccaagggaaggtaggcagtttattttagctaaaagaaggagcataatcaaaggttataaacaaggttgaatctccatcctggagaatcaaaatctagtagttgtgactttgtattaggaacatcatcatttttatctttttattccctggcagacatgcattaaatgtttgttgattgagtatcaaaatgataggaaatagattagttggatgttggtgaaacattgtgttttagatgcttacagatgtactaaaattttaacagaaatctttgcaaattacttgttaaattttcctaaactgatttttaaaaatctatttcattctcaattataacatctttactgagattattaagtgctttgaagcagttaacgtggcttttttttttaatggctgtaaaaaaactgaatttttaggcttgttaaactctggttttagaatgacttttgagtggaaatcactgatcaaaagcaaagttctcacattttgtcaatatctgaatgtcagaaatagaatgtcaggcagtttcccatgttgaaatattcgatagtaaaaggatagcaaagttgctgaatatttctactgtttatcaatttttgccttgcaggttcaaataatatttatttgtagtggaaatatttcaattcatttaaatcctgattatggagtagttagtaaatcaggtttaagcctgacagtgagttgatatagctcttatttcagactgtagtttgaacatgtagactctctgattataactaggctaaattatataataatgactttattttcactgaacaaagtttgctattattttgatgacaaattatttaagtaatcatagtaaaagttgctattggctctgggttttatttattttgctatatatagtagacatggttgatcatttaatcatgccttatagataaataaaagtaagttatagaataacacagaaattttctgctaaatttatactttcactaaatttaataacaatagaaattctctgttaaatttatactttcactaattgtagaataaagtattttaagttaggcatttatactgagacattttatgatattaactgcttcatgttatttactcattttgataaatggagtgataatatccaaaatggaataaattaagtttaaattattgttattctttaaaggaatgatttagctacagtatgtttgtcccaccttttaattttgaacattttctaacttacagaatagtaaaatgaacttttctatacctttcacattgatccaccaattgttaacatttcaacacatttgtgttctctctttaaataaatgtatgtgtgtgtattttcctcagaaccattctgaagtatttattccttattcaagaaattaagcattgatactgttttctgatgtgtgatcaagattccagatgtcacagttattctggtagtgtccttgatagctgtttaattttattctcagtccaggatccaataagaatcacacattacatgtattagtactatttctttaatatactttcctcccacctttttggttaaggcattttcttcaagagtccaacccagttgattgtaatatgtgccaccttgtggacttaatctcatgattttaggcaataatagtacgtaagtgacactgtgtatttcccattgcatcacatcgtaaggtttatggctttattgataatgctaattgataatggttaagatagcatccctcagattttttgcttagaaccttcttccctttccccattccatgtttgtgttttccttatcctgttcagcaaacctagttcccaacagcatcaactttatattcatttgctctatcctacaatacgcacaaaatagtttcaccaataacataaccaacaataaacctactaaataaagtttgatttatttgttgtttttgttccttataattattccattaagactgtattgtcataagagcatactgaaaaattatttgcattattttttctatgtgcttatgttacaatttgataccttctttgatttttcattcttgttatactcaacttcataatttgtttttcttctaatggaatttgaaattaaaattaaattttattatttgaaaatgcaaaattttaacatgtttcagaagtcaaatttgtatggaatgctatattcagagaactcttctattcctattcctctactcctttcccactcactctcatagaaaagcatttttcatttctagtttattctttctgtgtttctttttataaaattagcaaacacaaaattatatatacattctaatatatgtatatagtatagtatctatactaaaagaatatatatggttgagtgaggtggcttgcacctatagtcccaactactcagaagactgagctgggaggatctgttgaattcaggagttcgaggcaagaatatacacacacacacacacacacacacacacacacacacacacacattctcttttatgtaataaaaaccataacattaactctaccatcttaaccatttttaaatgtaccaattagtatacgcatgttgttacatagtcaacctctagaaatttttcatcttgcaacactgaaactctgtacccattaaactcttaattctctgacttccctccctgacgtccttggcaaccaacattctacttatgtttctatgattttgactacttcagatacttcctatgaatggaatcatacaatatgtgtcttttttgtgacagaccttatataacttagcaagttcttgatgttcatctatgttgtagcatgtgacaggatttccttcttttgtttctttatcctttaattgttgatagatgtctgggttgcttgtacttcttggctatcatgaatattgctgcagtgaacatggacatgcaaatatatctttgagatcctgctttgaattcttttgactgtatacccagaagtgaggttgcttgattatatgttaatttaatttttaatatttctttcaggaacttccataccattttagtagtggctgtaccatgttacatttccaccaacactgcacaagggttcattcacttctccacattttgccagcattttttgttttctgtgttttcggtagtaaccatcctgatcagtgtgaagtgatatctcattgtggttttgatttccctgatgattactgatgttgaacatcttttcttgtgcttattggccatttatatatcatttttggagaaatgtctattcaagtcctttgcccattttaagatcatgttatttgtatttttattgttcatttagaagtttgttatatattctggatattaacctttcattggatatatggtttggaaataagttgccttttcactctgttgattgcctcctttgccatgcagaagttaagcttgatataatcacatttatctatttttgcttttgttgcctgtgcttttgttccatatttatgaaatcattgctaaatccaatgtcctgaagctgtcccccatatttgaaaataatatatattattaagttttattttttaaacaaagctttttacctttgagacttgatttttttttgaagttaacaaaatatcctggaaattactttgtatagaaggagtgttccacagagcttttcctttttttgtgttgttttgctgggatttttgaatggctgtgtggtattccattgtgtggatatatcataatttaatcgactgatcttctacaggtggacttctagtttatttccaacattttgccattacaaataacatctcaatacttatatatgtgttgttttatattgtggatgagtctgtagaagtgggattgctggtcattaagctgttactatgtctcattcttacagttctgtctttgttactttttcctctcctcatccttttacctctcaaatatgcatgtatttcttttctattccaaatatttgagaacagattttatcaaaatctattttgatatcttttgactttgtatgtagattatttgtaggttattttgctacctgtaagtctttgaaactaaacaggtgttacctatagaatcactatagaatattagaaccctcagggatttgagctaattataaaaggtaaaaagttcaaatctgtgaaacatatgcatcttacaagaaatccattaaagcttataataattacttcaatgaaaaaatgagatatttgtaactagaactgtaacactatttctgaatttttaaaagaatttttttagatatgagcatgttttagcttaatttatatatgaattactacaataagtatgacaatcatagtaacagccacagctaatatatgttgttgactatgtgctgggtaccatgctcagcaatgcaagtacattaatttacatcatttcaattagtcctcaacgaccttatgagatgtatttgtaattatatctccactttaaacatgagtgaaatgagaaatgttaagagatatgctctaacatgctctaactcatgcagctagtaagtggcagaagcaagatttgaacccagagagtcttcaatcaagatggattctgctctttttatgacaatgctagacttcttatattgggacccactattattttcctatatcaggccagcatttgtcttaaggtctgtatgattttagctgctgagtccttaacaactttatgtactttatttctctccccaaagcagtataagatattacatggttgttatattaagtttttttaatcgtaagtgatagcacagaattgaaatcccattcataacagctacagtttctcacaaagcattcttgtcacatcactatctgtggcagaatattaaactatgtgtaccatttttttgccccattaaattatttatgttcctgttttacagtggatgattcaacagccacacaaagcagcaacattttttggatgcattgggatagataaatttggggagatcctgaagagaaaagctgctgaagcccatgtggatgctcattactacgagcagaatgagcagccaacaggaacttgtgctgcatgcatcactggtgacaacaggtcagtgtaattccaagggaaccactatactaattggctattttaacactggtaaaatatgaattccaatgtgaatttggaattttgactttataattccttttaatgtttgataaatgcttattccttatatcagttttcctgtattgtttttaaatttacttttgttaaacatgcagttgaattcatgaggcataatggaataaaagtttgaggttatttagtccagtctctactttttataattagaatcagaaaaggctgatagcttgctcaatgccttgtagcttgctcaacaccttgtagctaatttgttgcaaaacttgaattagaaacaatgttcttttcaccatatcctgaggttggaatacgagagagagagacagagagacagagagagagtgtgtgtgtgtattttatgtatataaaatacaacattacattcaggctcgtaagacttagtcatctaaatggtcatctaaaccatttctggcaaatagtaattcattcatattgaataaactcagtcgtgggtagtataccactaacaaaacaaccaagtatatttctatacacccttacttattagaaaagtattcttaatatgaacttgaaatatctctctcaggcccctccatatattggttggttgttcttttgtacccacatggagatactccttcagtgtattcatgcactgctaacgttattaccatatcagcacaggcttttttcccctttgcaagggaaaaacaaaataactgccctagctattatattgttgggataatcaaagatgacctctttttaaatagtgattcactagaaattttgcattacttatagttggaaatatgtagtctgtcctcctccattccctatctcctttcttttcccatcttctcttcctttctttttttcccttttcatcctcctttattttcttccccctctccaccacgaccttgctccatttcttctatttacccactttattgctcactacttgaccttcagcagaggtatattaaggaatggactattctagagactggggatcaataagcacagtatttactaaataaccaaaatacaatattcaaaaattattagggtatgaaaggcattttcagatctttcctttaattttgttttttatatacaggagaactttatggttttaagattacagtaaacattgaaatatgggattcagggattttaaaaaaaaacaactaaaaatgttgaaatatgtttgtttagacctttgcccttagttttcccaagaccagccttaatctgtaggtgcaaagttttcccattagtgagaagtaggtcagattttcttctgatatcacttaggctacagtaaaattactaaattgttttagtatgctaaattgctgtcctaaagaacagttatggttgggtgcagtggctcacgcctgtaatcccagcactttgggaggccgagtcaggtggatcacctgaggtcaggagttcgagaccagcctggccaacatggtgaaactccgtctctactaaaaatgtaaaaattagccaggtgtgcacctgtaatcccagctactcgggagacgaaagtaggagaattgcttgaacctaggaggtggaggttgcagtgagccgagattgtgctactgcgctccagcctgggcaacagagcaagattctgtctcaaaaccaaagagagagagagaacagttatgataatattagatcttctggatgtcaaaaacttaacttttatactaattttatggttatagtgatattgttgagatgatatgggactcaaaaattggggagaaatcttcagtatctaaatcattatctaaattctggaagctaatacagttggatcaattgttttggataggtccagtaacctttgctgccactatcaaaaactcagaaattggccgggtgtggtggtcacaccttgtaatcctaacactttaggagaccgaagtaggctgatcactcgagctcaggagtttaaggccagcctggccaacatggcgaaactccatctctacaaaaaatacaaaaattagctggggatggtggcatgtacctgtggtccccgctgcttgggaggctgaggtggaaggattgcttgagcccaggaggttgaggctgcagtggactggggtcgtgctgcccactgcacttcagtctgggcaaaagagtgagcccctgtctaaaaaacaaaaaacaaaacaaaaaatttcagaaattgaagtgtttgggtaatgcagtatctttcttgatccaggttcttcctcttcaaagtcagaatcaaatacgttgggataataagaatactcatatttttctggtcgggcatggcagctcatgcctgtaatcccagcactttgggaggccgaggcgggtggatcatttgaggccaggagtttgagaccagcctggccaacatggtgaaactccacctctactaaaaatacaaaaaaattagccgagcatcatggcgggcacttgtaatcccagctacttgggagactgaggcaaggaaattgcttgaacccggaggcggaggttgcagtgagccaagacggagccattgctcttctctagcctgggcaacaagaacgaaacttcatctggaaaaaaaaaaaaaagaatacttttatttttcttttggagaaactgtagtttcccatcaaaaagtagttttattatcagaatagagtttagtatctggtaccagaaatgtttgcttttatttggtagccattttgtcaaaattttcctaaagtcataattactaaaatatttttataaattaggtctaaattttcttaagtttgtaatatagttattttgtatatgaatatgttgatgcatattactctttctttccttcatttacttgaacataaacagatgtatcctttagtagtaaattggcagatggatgagtggaaatacgttttggaagagaattgaggtttttttttttaacagtgtaatcgaacatattaccaaagtctgaaatgataagattttttttgtaagctataactgttacaatttaattagaaaaagagaaaaattggcaagtaattttttaaattctggagcagtatgaggaaggaaagtatttttatttataatgtaaataattattgtatttatttttaattaaacaagccaagtgacacttgtagcaggattttatttatttatttatttattttttagagatgtggttttgccttgttgcctaggctggagtgcagtggcatgatcatagctcattgcagcctcaaactcctgggctcaagcaatcctcccacctcagcttcctgagtccctaggactataagtgtgcaccactacccccagctaatttttaaaattattttgtagagatgggatctggctgtgttgcccaggctgacctcaaactcctggcatcaagcaatcctcccaccttggcctctgaaagagctgggatttcagctttgagctactgcacccaacctgcagcaagattttaaatgcagtatcctgcttagatattccatttctaaaattggaccagtcaggggacttttcaactatagaaaacaattctaattgatttcagcccttagaatgtaatggtttacaaattaattcctcttagcgaatatggtctacatttataagtgtcttttacgaaattaattccatatttggcttttaaaggcttcgattaaatagacaattatagtatgttgatatttatttttataaagatatttttctacttaaaaaatgtttttagttgcatagatttctttttatataatgagttagccttatttcttaactgcattttgaactattaaggtgtaaaaagtaggtcctattttactatcaaaaggcaacttaaatgccaatttctttctcaaaataccaggtgttgtttagaacaaaaattatcatagatgcctcagaaagttctcaaaacaaaattattatttatatttatttaaaaatcaataacattagttttgaagaattaattaaaatgtaaattttaaactttgcaaaaaatattggtaattatctattgaaatatatgctaagtttgactataatattacttgcttattctttggttgttttaggtccctcatagctaatcttgctgctgccaattgttataaaaaggaaaaacatcttgatctggagaaaaactggatgttggtagaaaaagcaagagtttgttatatagcagtaagtacttacctaattcaaatctctagtacatatttacatgatggattatagttgttgtctgatatatattttaaaataattatcttttatttaccctgcaaattatttatctctctcaaagcatatgttagattcactattgtgaaaatagaacagaaatcattatctttctatgggtaacataatttgtattatttatcttcaggtctacctatttttggatacattatgcataggtgcttgccaaccaagcgcagaattctatattaaatcagtttccaaatatattttaaaataattctacaaacttacatcttacatttgtaggcaacttgcattgtgcagaaaaatattagtagtataaatattcactgcaaatagtttgagctgaattgcttaaaaaacttaattgctatttattccatagtaattaccatgacacctcttaatttaatatttcagaaacattgatcgtgacaaatctcttaaatctgggaacaagggcagggtgtaatttgaattattaagtcttctgacacaaaaataattggttaagaatttatttctaaaataggatggtactaaaaattctgaattaatcaccccatgattaccttgtttttatttaatatgtgttaaatgtggctttacacaaataagtagatacctatgaaaaaagcatctcgtatgcatgtaatatatggttttggtataacagctgctgccatttcattacctgagctctgtgaaatagctggtaagatgtgtaaaaaattgattaccctactaggaggaacatgtttattgaaaatataattatttctttcagtctaatgttaatgtctcctacagcatgtttgtgtgcactgttctaggctttacaacattgttattgattcctctgtataccaaatcctatccctttataactgtcaaataaatgcttacattgagaagattatataatggaaagttatgctatcttttctgccagtatgtgagaaaaacatttcaagaattaaatattttacccctttattatttccatttcattttatttctcaaattggtctcatgttctttccatttttcaaatcttgatactgtatttcttgtagtgtgattctttagaggggatttatgtactatttcaaaccatcttacacttgaaagtctgattttcaaaaagcaccatgtttagaatttggcataatttatatatacttgttgactatgaaataagacagtgtattctgatgaaaaagtatatttaacttgacaattacagtcttctatgtttcaatatatagttgttcaatcctgaattgtgagccaacttgcaaacaactcatagttgtaatgattatacagtataacatgtctagccaactttgggtgaatggaacttttatgaaagtgtagattcaacttgcagacaactcatagttttagcatttatgcactatattgtatctagccatatttgggtgaatggagttttacagtagtattaaatatttatacttacgtgcaattttgtacagcataaagtgatcagcttttggtgaaattaataaggcaaatgatattatttttgagatttgggtggtgtattcagccagaagaaataacaaaatggatttcagttgttatctgtgatacaagtgttagcttgtagcttctgtttcagcagtttcataaaaagaatgatctcttacattgccaggtaaatctgtactcttctcctagcttggcttattccaaaatagttctgaaaatagtagactcatattggatacctgggacgctgtatattcttagtgaacattcaacaaatatttacttggtgaataactaagagcataattcgtatttattgaaatctgtaaacttccttttgaaatacaatgttatttccacaaagacactgcaggttttgcaaatctgtaattccctttgatttcagagcattccgaaatgatgtgtagtctagtctagttttttcttagcatatggtcaaaccataaattaagtgggctgccccatactttctggttctatgaggtcaacagtctcattacattatcatcataaactaatgaggtttaagaaattaaagttctgggggctctttaattctaaaatgtttttgatctaaggaagcaacgcagtttatctattcaacaaatatccgtaactaaaacatctgtctgcatcacataagctaaaccagatctacatactcagctctgcttcttcacactattctccaaactagcagtgtttcatgaatattaagaaaattccaaaccttcttcttcattttcttcaccatataatttactgagtaagttcacactggaaaccttcctgactgaaaagctaaaattgaatatggatacaccagcatcctcttttggtttaaatacagtgccaagatcttttaaaatttattttttacctttcataataaatgtctcattttatgccacgtaaactcagtttttccatgtttaaaccagcttctcagattctttgttagcaggtaattagggactactggctatggtgactaggtaattatgtttttgaaaacataagtctcaggttctcttcaccttagaatcagattgggatatatctgttttttctcacttaagaaataatatttcctggcatagtggtttatgcctgtagtcccagtgctttgggaggccaaagccagtggattgcttttggtcaggagatcgagtccagcttgggcaacaagtaggtctctaaggacttgctttatgaatctgggtgctcctgtattgggtgctttatgaatctgggtgctcctgtattgggtgcatatatatttaggatagttagctcttcttgttgcattgatccctttaccattatgtaatggccttctttatctcttttgatctttgttggtttaaagtctgttttatcagagactaggattgcaacccctgctttttttttttgttttccatttgcttggtagatcttcctccatccctttattttgagcctatgtgtgtctctgcatgtgagatgggtctcctgaatacagtacactgatggatcttgactctatccaatttgccagtctgtgtcttttaattggggcgtttagcccatttacatttaaggttaatattgttatgtgtgaagttgatcctgtcattatgatgttagctggttattttgctcgttagttgatgcagtttcttcctagccttgatggtctttacaatgtagcatgtttttgcagtggctggtacccgttgttctttccatgtttagtgcttccttcaggagctcttgtaaggcaggcctggtggtgacaaaatctctcagcatttgcttgtctgtaaaggattttatttctccttcacttatgaagcttagtttggctcgatatgaatttctgggttgaaaattctattctttaagaatgttgaatattggcccccactctcttttggcttgtagagtgtctgcagagagatctgctgttattctgatgggcttccctttgtgagtaacccaacctttctctctggctgcccttaacattttttccttcatttcaactttggtgaatctgacaattatgtgtcttggtgttgctcttctcgaggagtatctttgtggtgttctctgtatttcccaaatttgaatgttggcctgccttgctaggttggggacattctcctgaataatatcctgcagagtgttttccaacttggttccattctccctgtcactttcagatataccaatcagatgtagatttggtcttttcacatagtcccatatttcttggaggctttgtgcgtttctttttactctttttttttctctaaactactcttcttgcttcatttcattcatttgatcttcaatcactgataccctttcttccacttgatcgaatcagctactgaagcttgtgcatgtgtcacgtatttctcgtgccatggttttcagctccatcaggtcatttaaggtcttatccatgctgtttattctagttagcctgtcgtctaatcttttttgaaggtttttagcttctttgagatgggttcgaacatcctcctttagctcggagaagtttgttattacctatcttttgaagccttcttctctcaactcgtcaaagtcattctccatccagctgtgttctattgctggcgaggagctgtgttcctttggaggagaagagacgctctgatttttagaattgtcagcttttctcctctggtttctccccatctttgtggttttatctactttggtctttgatgatggtgacctacagatagggttttggtgtggatgtcctttctgtttgttacttttccttctaatagtcaggatcctcagctgcaggtctgttggagtttgctggaggtccactccagaccctgtttgcctggctatcaccagcagaggctgccaaatattgcagaacagcaaatgttgctgcctgatccgtcctctggaagctttgtctcagaggggcgcccagttgtatgaggtgtctgttggcccctactgggaggtatctcccagttaggttactcagggatcagggacccacttgaggaggcagtctgtccattctcagatctcaaactttgtgctgggagaaccactactctctccaaagctgtcagacagggacatttaaatctatagaagtttctattgccttttattcagctatgccctgcccccagagatggagtctacagaggcaggcaggcctccttgagctgctgtgggctctacctagttcgagcttcctggccgctttgtttacctactcaagcctcagcaatggcgggcacccctcccccagcctcactgcttccctgcagttgatctgatagcggactgctgtgctagcagtgagcaaggttccatgggcatgggaccctccgagccaggcgtgggatataatctcctggtgtgccgtttgctaaggccattggaaaagcgcagtattagggtgagagtgtcctgattttccaggtaccgtctgtcatggcttcccttggctaggaaatggaattccccaaccccttgcgcttcccaggtgaagcgatgccccgccctgctttggctcacactctgtgggctgcatccactgtccgacaagccccagtgagatgaacctggtacctcagttggaaatgcagaaatcacccgtgttctgcatcactcacgctgggagctgtagaatggagctgttcctattcctttttttgttttgttttgttttgttttgagatggagtcttgctgtgtcatccaggctggagtgcagtggcacaatctctgcccactgcaacctccgcctcctgggttcacaccattctccttgccttagcctcccaagtagctgggactgcacgtgcctgccaccatgcccggctaattttttgtatttttagtagagacggggtttcaccatgttagccaggatggtctcgatctcctgacctcatgatccacacgctttggcctcccaaagttctgggattacaggcatgagccaccacacccagcctaattgttttttttttttttaatcagctttgttaatatatgtctcacaacttacaatacatacattttacttctacatatatattataaacatcgtaaccttgctgctatttttgtttaaattgtcaaatatatattttaaaagacttaataagaaaaaattcatatttttactcaggtatttatcatttctagttctctttattccttttggttagaattagatttccatctggtatcattttccttctgcctagagggcattctttaacatctcttgtatttggatctgtcagtaataaattctttcagcttttgtatgtttgaaaacatctttatttcaccttcatttttgaaagacatttgtgccagatatatagttctagtttgacagtttttcagtacatgaaaaatgttaccccattgccatcttacttgcatagttcttgataagaaatctgacattcttttgttcttcaatgtttcacaacccccattccccaaattttgctgcttttaagatttttcatatgagaccaggtgcggtggctcacacctgtaatcccagtgctttgggaggtcaagatgggaggatggcttttgaggcatggagatcaagattagcctaggcaacatagtgagaccccatccttacaaaaaatacacacagagaaaattactcattttgatcagtttagttatgatgggccttagtgtattcttcttcatgtttcttgtgcttgggttttgtttaacttcttagagctatcggtttttagtttttattatgtttggaatatttgcagccattatacatcttcaaattggttttctgacccttttatgccacttgaagttgtctcatagctcactgacactctttttttattttgtttctttctctatgttttattttggatacctcctttgctgtgccttccatttcactaatattttcttctgtaatacctgaactgttattaatctcatcaaataaataaagctaaatatttcttactactgggggaagacttttcttagtactccatggcacagagcactaaggggtccctaatctctggtactgcaactatatcagttcctgttaggaaccaggccacacagcaggaggtgagtagcaggccaccaagcattaccacctgagctccacctcctgtcacatcagcggaggattctttttttttttttttcaaatgtgaaaaatctaattttattcagtttagattaatgtatagctatacactctggactcttaatgaaacctttcccattctttttttttagattttattattatactttaagttttagggtacacgtgcacaacatgcaggtttgttacatatgtatacatgtgccatgttggtgtgctgcacccagcagaggattcttataggggtgcaaatcctattttgaactgcacaagcgagggatctaggttgtatacgtcttatgagaatctaactaatgcctgatgatctgaggtgcaacagtttcatcctgaaaccacgcctcctacccgtccgtggaaaaattgtcttccacaaaactagtccctggtgccaaaaacgttggagactttgatgaaaaaaatgatgagtttttctgctctaggtctttgaaacagccactatttccaaatgtgtatgtgcctcaggtactgttccttctatttttttttcctcttaatacttttggatgtttctttcccaggtactgaccttaagaaaagaccctctacagaattccaggtttctctgtaaatctttctgttctctgatattgtggtctttcaactcttaactgctctgaaattcccagactctcagttgtatttcctcaactcactggcatctactacagttctccttataccatattctggaaactcttgcaataaactgctgtagtcatatggctgacctccattgtttcccatctctcagagatacgtattttttattcttgatgtccagtgtattaaaaaccattgtttctagttttgctattgttgtttcatgatagggagtaaatctagtttctgttcctctactgtcttctgctttgcattgtttttgaaaggaagcctgctgccattcctatcattgttccctcttacctaatatgtcttttaacctcctttatctgcttttaagatgtttatcactgattttaaacaattttattatgatgtaccttggcatagttttatattttgtgtggttggggttttttatagtttcattcactttggaaattattttacaataaattttctctttccacctccatctacctttgggactccgattaaaataataataataataataataataataagaagaagaagaagaagaagaagaagaagccacttgtagttgacccatgtctcagtgattctgttttcaatatttttgtttttctatctgttcttcattttgaataattactctctcccctattttgtcttttcttttttatttttatttttatttttattttttgagatggagtcttgctctgtcacccaggctggagtgcagtggtgcaatcttggctcactgcaacccccgcctcctgggttcaagtgattctcctgcctcagcctcctgagtagctgggactacaggcacacctcaccacacccggctgatttttgtatttttagtagaggtgggttttcaccatattgtttcggctggtcctgaactcctgacctcatgatctgcttgcctcggcctcccaaagtgctgggattacaggcgtgggccactgtgcctggcctctttcttttttttttttttttcagacaagttctcgttccgtcgcccaagctggagtgcagtggcacaatattgggtcaatgcaacccccacctcagcctcccaagtaactggaactgcaggagtgcaccaccatgcctggctagtttttgtattttctctagagacaggttttgctgtgttgctcaggctggtctcaaactcctgaactcaacttatctgcctgtctcgacctcccaaattgctgggattgcaggcatgagccgccatgtccagcattgaataatttctattactctgaagtttactaattatttcatctacaatgtttaatctgccattaatctcatccagttgacattttatctctgacattatagttttcatctcttgaactttgatttggacctcttttactcatgccatatctctacatagtatgcttatgttgtcatgtgctttcggaatgttgttataacaattgttttaatattcatgtctactaattctgtcacttttttttaatctgattaccttggtattggtttttcctgattacctgggtattcattgtttcctcatacatgtgtactgaagactccaaaggaatcccttgcatatctcgagttctcactttccacctctttcttctccaagcagctctgtcctctccagtactctgccccagcatgtggtagccagcttggcctccctgaatggaaactacttgactctatttaggttcttccttcccgctctgcagcctgggaactctattcaaggtgtaagtttgagtaattgtagcgcttaccttattctgccccttctttgattattatccaatgcctgaaaattgtgttttcatgtattttgttcattgttagttgtttaagatgggaatataaatctgctccctggtccttcatagtggctggaagtgcaaatctctaggttgattttggtttttccctttttcaggtaactcgctttttttttcaagaatgcctaatttttttatttgaatttgagtctcagtctgttgcccaggctggagtgcagtgacacaatctcggctcactgcaacctccatctcctgggtttgaacgattctcctgcgtcagtctacccagtagctgggattataggcacctaccaccatgcctggctgagttttgtattttttttttttttttttagttgagatgaggtttcaccattttggctaggctggtcttgaactcctgacctcaagtgatccacccgccttggactcccaatgtgctggtattacaggcatgagccactgcccccagcctgaatttgaatttgataataactatgatttatctctatgcgaattctgtattgagttttcctcgaacaatgtattcattttaaactgtagatttcattcccagttaactttcttgtccccaaatattgtttctcctttacttgacctattggagtgtcagaaaatgatcataaccatcactgataaatgtgttatggggaatattagagtaaaagcagaaattccaagttgtggtgagaaagtacagtagacccttgaacaatgtgagggttctgggcactgaccccttcgaaaatccacatacaatgtttacctcctcaaaaacttaactactaatagtagttaattggaagccttactgataacgtaaatagttgattaacacgtattttgtatatgtattatattctgtattcttacaataaattaagctaaagaaaaaatgctataatatcatatggaatgaaaatatattattattcattaagtggaaatggatcatcataaaggtctttatcttagtcatcttcatgttgagtgggctgaggaggggaagaagaggaggagtggttggccttcatgtctcagaggttggcagaggcagaagaaaatctatgtataggttgacctgcacagttcaaattcatattgttatagtatcagttgtaatcttaaattcatcttcaggttgatttagtgtcaaaattccctcaaatattattctagattctataaaatgttctagataccattttatcgcttaaaaataaatgtgaaagctctcagctaagatatagttgttcatctatgtgtaattactagttttgtaattttttgtaatttcttagtcacctctgcatagtgtttggattacattgtgagtacagtaggattttgtttagaaatctatgcgttatttcaaataacatctctttatgataggaaaaaaggttccaagtttgaaataacactgtgaagaactaatcaccatgcaagtttaggcttattatggggaaatttttaaactttaggtattaaaaagatttttaagaaatagattttaacaaactttcagtaccttgtgacttaccctgcgtaaacaaggtcagccaaatttgtaccctgtttcatggattagaaattaaacactataagtgaaagaataataagtcatatcttgtcaataattttgtgagagtatgagacttgtggtgagttttcctttagcactcatgcctattttcttttttaaattattttttcagttcctatgtcttattacaggtcttctcttttcctctcttcatttatttataactctgtcttgaccacttatatctgttttcggtctagaattttactactttggagaatgtggtttttgtgagggtagagttttcaaatgtcactaatgtttgcttctggaataagggaagtatgattataggtcagtagaagaaacatggtatgaagaaatgtacagccttggtggtaagcaatagaattcatacttacaaagaaacagaagtatatgtatattaaaggcaagtaagaatcactaccaaatgtttacattttacatctcctgctttgtttgccctataggtttttcatacctatgccatgagtaacaatttttcttagtaaaactttcatttatactcagttacaattaaatatctttatcagtaatctaaaagcaataaagcccttaaaatgaggtagtgtgataaattataagaaatctcatctaagaaatcatatgtttgaaattttacgtgtcagtaatgtggtttgtgtccattgaattaacaagttagaatgaatttataattaaataaataatttctatttttttaggatttggttatcttttggcagtatttaccaaaagacatggttacactaaaacgtgactagaaatttaaaaagattgctcaaaatttcatgctcagaatttagaacgtgccatctagtattctttgctctgtcatgaaaagatttgagaaagtttcagtgaaagtgaattaagttgttttgtaatggtaacctaatggaaattgaagtaatttttttttaaaaaaggtaagtattatttaggccaggcacagtggctcaagcctgaaattccagcccttcgggaggctgaagtgggtggatcacctaagatcaagagtttgagaccagcctggccaaaatttttggtagagaccagaccatctctactaaaaatacaaaaattagccaatcatggtggtgcattccttagtcccagctgctggggaggctgaggtaggagaatcgctcaaacccaggaggcagaggttgcggtgagccaagatcgcgccactacactccagcctggctgacagagtgagactctgtctgaaaacaaacaaacaaacaaacaaaaacttacttaaagtgatagctttaaaccttattcgaccatggaacaagcctttgtaacataatctatactgttacaataagtacactttggcagagtaagtgaactaatgatttttttttataatttaagctagtctgtgaatgacagttgattaaataatgtcacagctctttatatatagcattaaatagagttcaaagtatttttggaatttattaatttataatattcttctgtgattattaaagaggtgggatagctaaactttttctcaccttttatcattgttccaagtgcagttttgaactcgtatgtgttagaactcccattatattggtcaaatcgatgatcaccatatgactttattcctgcatttttgcctcaaatttttaactatcctattctggactgcttcattaacttcattagggattaactatgaatgtttaagcctttattttacaatgtccttgcaggtgtccttaactgtttcatttataaacacagagaataaaatgaaaaaaaaatctgtagagttgtttgttctatttggagcttttcatgttggtgtaaaattcctgacacttaacacatatgaatctttttcattcatgtttaataattttatttgagagtcacttcaagtaaagcccaaactgtgttaacatttgagttaagcaaagacatctttgcttaacaataaagcaaatatcacaataaagcaagtcacatgaatattttggtttctgaattcatataaaagttatgtttacactatatggtactctcaagtgtgtggtagcattacatctttaaaaataaacatactttaattaaaaatactttgttgctaaaaaatgctagtgatcatctgagcctttagcgagtaataatctttttgctgttggagggtcttgcaccagtgttgatggctgctgactgctcagagtggtggcttctgaaggttggggtagctgtgacgatttcttaaaataagacagcaatgaagtttgccacatcaattgactcttctttcataaaagatttctctgtagcatacaatgttgtttgatagcatttacctacagtagaacttctttgaaattggagtcagccctctctaactctgttgttgctttaacagttatgtttatgcagtattctgaatttttcgttgtcatttcaacagcattcatagcgtgttcaccaggagtagattccatgtcaagaaaccactctctgtgttcatctataagaagcaatttctcatccattcaagttttatcatgtgattgcagcaattcagtcctatcttcaggcttcacttctaatactagttctcttgctatttccatcacatgtgcattgacttcttccactgaagtcttgaagccctcaaagtcatccatgagggttggaatccacttattccaaactcctattaatgttaatattttgaccacctcacatgaatcgtgaatgttcttttttttttaaacagggttttactcctgtcactcaggcagggaagtgcagtaacaatcactgcacattgcagtctcaatctcccaggcaagctcaagcaatcctcccacctcatcatttattttatttttgtagagacgaggtctcaccatattggccaggctggtctcgaactgctgggcttaagtgatcctcccactgcggcctcccaaagcgctgggattgcaggtgtgagccaccatgcccagcccatgaatgttcttaatgacaactggaatgatgaattattttcaggaggttttcaatttactctgcccaaacccatcagatgagtcactatggcagctatagccttatgaaatatattacttaaataagatttgaaagtcaaaattactcattgatccatgggctgcagaatgaatgttgttttagcagccgtgaaaacaacattcatcttcttatacgtctccatcagagcccttgggttaccagatgcattgttaatgagcagtaatattttaaagggaatctttttttctgagcagtagatctcaacagtgggcttaaaatattcagtataccagctgggcacagtggcttatgcctgtaatcccagcactttaggaggccaaggcgggaggatcacctgaggtcaggaattcgagaccagcctggtcgacatggtgaaaccacatctctactaataatacaaaaatgagctgggcatggtggtgcacacctgtaatcccagctactcaggaggctgaagcaggagaattgcttgaaccctggaggcggaggttgcggtgagccaagattgcgccattgcactccagcctgggtgacaagagtgaaactgtccccaaaaaaaaaaaaattcagcataccatactcaaacaggtatgtgttcatccaggctttgttatttcatttatagaacacaggcagagcagatttaacataactcttaagggctctaggatttttagaatggtaaatgagcattgacttcaactgaaagtcaccagctgcattagcccctaaaaaaaaaagagtcgtcctatcctttgaagcttcgaagccaagcatttacttctttttagctgtaaaagtcttcaatagcatcttctgccagtagaagactcttttgtctatgttgaaaacctgttgttcagtgcagccaccttcatcaatgatgttggcaagatctgggtaactcttcagcacctgctattttaccttgcacttttatgatatggagattgcttctttctttcaacctcacaaattagcctctcttagcttcagacttttcttgcacagcatcctcacctctcagctttaacagaattgaaaagagttaaggttgtgctcgggattaagctttgacctaagagaatgctatgctggtttgatgttctatacagaccagtaaaactttctccatgtcagcaataagcttatttcactctcttattcatgcgttcactggagtagcacttttaattttcttcaagaactttttctttgcattgagaacttgcctgtttgttgtgagaggtcaaactttcagcctgtctcacctttcgatatgccttcctcactaaactcaatcatttctagcttttgacttaaagtgagagacatgcaactcctcctttcacttgaacacttagagaccactgtaggattattaattggcctaatgtcactattgttgtgtctcaagaaatagggaggccttaggagaggtagagagatggggtaatggccagctggtagagcagtgaaaacacagcatttatcagttaagttcaccatcttctatgggtgtggtttgtggcatcccaaaacaattacaataataatatcatagatcagtgatcactataaaagatataaaagtttgaaatattgaaagaattaccaaaatatgacagagatccaagcgagcacattctgttggaaaataatgacaccatactcaaggcaggcttgccataaaccttcgatttgtaaaaaaaaataataaaaaggtatctgtgaagtgcaataaaataaggtatgcttataccaaaacagacttaattatgctatttcttaccattagtgttagagttcagtttctaatgtttttcattttccatatgttattgatgttcagtgagttacacaaattatttactgttgttacttccaccttagtagggagaatctttgatttttgctggataaattttcaaacaagagtgtgattataggctggacgtggtggctcacgcctgtaatcccagcattttgggaggccgaggtgggcagatcacttgaggtcaggagttggagaccagcctggccaacatggtgaaaccccctctctactaaaaatacaaaaattagccgggcgtggtggcgcatgcctgtaatcccagcacttgagaagctgaggcaggagaatggcttgaacctgggaggcagaggttgcactcctgcctaggtgacagagtgagactccatctcaaaaaaaaagaaaagaaagaaaagtgtgattacagagatcctatttgtgtttatttttaatttctctagaatttgttttcttcaataaataaaattctaataccagttttttttgagtaacactgtgatttttatacagaaagactttctccaaattggagaatgtactcttttattcctgtaatttttcttaactcttatttttggcagctaccaaaagtaaaactctctaccaagacagagaagaaatctttgggaatattaagtaatgttatttttcattacacggactaacctttttactaagaagaattgggatagtattggttatgggagcttaggagccctaaagataaagattggaagattttgtgttgtggacttgtggcactgtaacaaagtctgggaattttatgtgagattggaaaccacactatgtgctaattgcctcagaatggtaagaaaataagcatatgtatagcatttagttgttaagacagtaggcacttatgcagagccccaaatgaattaacaaatcatctactgaaatattttcacttctgtttactttatgtattttagaccaatcagcagttgcttgagaaaatgaaatgtttactaaatctctttaataaacatgtttaagagaggaaaaacttataaacattcagatggcagtgtacatttttaagtgctagttgtcatatctttgaaattgtatgtaaactggacataaacaatcaagtgtctacagaatggtatctgtcttccaatatatttactgaagatattatagaatctttatagtttaatatgatttaccccacatgttctgttgttgctatcttttcagataaagttgaatttaatctttcttatcagcttttattgaggtatttatgaaccattgagttcacccacttaaaaaatatcattcagtggctgttagtgtatttacagagttctgctaccatcactgtaatctaatgttagaacattcacatcaccacagaaggaaatgttatacccatcagtagtaatgctccataccccctggatttaatcttatatccacatctctcataatagtttcagtggtatctagttattatgactacaaatgatgcaattgttcctgattacacaaataatgtatttatgtctttattgttggcatgtaatggaagacataataagtctgctttgatctcttgctcttacctatttctctattgcaagtgttataaagagtcttttaagcttttgctcatatatataaatatatatatacatacatttatatatacacacacatacatatatacacacacacacacacacacacacacacacacatatatgtaatgctaccgtgtttgagggtcatgagggtcagttttttgaaataccagtttttttctgatttaggtggatgacatggtacgtgaagcttaaaaaaaaatttggtaaattggtatgaaaaaatgagaggacaacgtttttcctttctggtacttagcaggaaggcaagttcttgtatgaacccatatttcctgttacccattttcagaccaatattggtttctcatctatataatagggatcttttgactctaacctcttaaatctatcatgtgttttctttcttcaccttggaaatagcttcttgaagccccagacttctagagcacattcatattaactaacattgtcctggtttactagttagggatattagtaaatcctaaatagttgaagacgttctgaaagatatattgctgctttttaaaaatttatttatcttgttctctatatggatttctggcacaaggttggtttttgtttttgtttttgtttctgtttttttttttgtcaattgtggtaagtccatggatgcttttctctataactttcccattttcccttatcacaccgtcactgcaaacatctaatttctgtccagtctctcaactcttttcagctctgctgtcctaactaatcattttttgtattcatctttcaaagtatttgtttctgtcttcattctataagtaacaagattatttaaggttattttgtattacagaaatagtaaaaatcaaataaaatatcaaatgtagaatagtccaccaaaaatattttatttcatcttttccagagaggtacacatataataaagtaaatgagcattatatattttattattaatcctcaataatatatttttcacaggtatgttgcttcttgtaagtttaccttttttaatgtgaaaactacaataaactaaattaaattttaaaaatattttacttactaaagtcaactgatgttttcctggtagattgataggcttcttgtggtagcttttaatcatttgcaagttttgagcccatttctaaaacttttctcattgtaaatatgtatttcctttcttatattaactgagaatttgtttttataaaaataaagtggggaatcagactcaaggtgaaatgttgtagacttagtgccagcaataagcagaattatttaaaatcattcaaatatctttaattcccttgttgtctttttcaaaaactgtacattttaactacattaatataacggaagactttttaaggcttagttttcctttatagatattccctaatttcatttttatttcagtctgtcagggttgtgaatgtgatgttttaaggtacactgtagtgttttcacatcctcagatgaactgaattgggacaatactttgtaggaagttttttaatatagtatgtagacacattggtaaaaatcagtatgtccactggcttattagtttcacagatgcttccataattcttagtgtactcttgggtattttaaattatcatttcctgacagcaatcctgaaacatgccagtcttttaaagccttatttctgagaactaaagcaaggcatcagcgaaccatatctgacatgccatgttaatttccataactatcatttctgggaggtggtaggatttctaaggcatggagaatctcagtaaatctactttaaaaaaaaaaaaagcaaaatatctgttttattactgggtttccattcacgagccctgactgcttcattcccacttaaataatttcaaaaatagtgataagcatattttttctcttatagattattaaatatttactcacgtgcacaatatatcaaaacatattttgaattctatattcttagtgttgggtgttcatgttgtgaatgaaaacctcattctgttatctcatagcatatttatatatacaaataatttttgccttaagtaggaaagaaacagctaaaagatacataggttattttgctttttaaaattttagcaaactattctgtgaatcttttgtgtgtttggggctgtttgtagaggaaaatttcatcaagcaacattttgggaacattggccttttgtactctttcctaaataaacagaaacttgtactccccaaaataaaatgtttctttgtatattgttacctgcaagttattgataatggaaggaacaccttttcaatccttagtcccctttcccccaacacagcttttagattgtcgataaacttcccagctcagtaattaactgagctcagtcattgcaccctgtatcatgtgatttttttttccagtggaatacattattagagcacttacacagccagtctagctgcagcagcccaggcggcaacagcagtgccatttttcacaaagaaaatgttgaacaggagccaaatgtttggtggcagtctgttgctaggaaatcaaggtcctgaggcgattaatgacaaagcaagcaataacaagaaggcagaattacagatttaaaagagaaaaaagtggttggtgttataattacccaaagaaatccgcactcattaaattggctgtttttatgattgactttaattggaggttagctcagatatttagctcctttcccacccctttaaacacacacaggcacataatctgtagaactgcagacttgtttttctaagcattgagaggagcttgccctgtaatttgatccccactgacagatgcattttctatgctgccattttgaattaacctattgtagaacaattttcttcagccctgttgaataaaacatccagtctgattacctccgatggatttgatagagtaaaagaatgtacttctcattgaagtagattgtttgcatggactctactgattgtgaactctgccagtaagcacaatcatttgtaataaattttcaaagaaatttgtgaggaaaaggtaatgagagtcacccttttatagtttaatgtttggcacctccatcaaaataatataattcttataagacagtgttatttttccagtaagcttttcacgtggttttagaaaaaatttctgaatcttcatttggactattcatatatttaggaatagagtcttgtatttacactctaaaatgaccattcttcctccccaacaacagtattttagtgcaagactcaatatgcaaagcactctattgcaaaaatatttttggtatgtacaatatttaaagtgattttaagattggcctatttcagtctttgaagtatttcccccccccaaaaatcccttatttaaattttttagggtgtgataaagcatattactagaaaagcatcaatcggtctttcaggtacaataccagaggaaccatcacagtttatttacctttcagaagctttaaaaataaagttacatgatgcctctgctctccagatttctaatcaaaccctggaacaaaagagccaagcacattctatctgacaatgcacacactgctaatcagatgccaatgccaagctgtctgctttgttaaatacttagcttcctagaggcaggaagacagctgctataagtatgatgaaattttgtagttcaatctatttttgctacccttgggctaccaagatactgttaatttagaccaccccaattggtacattttagggagttttttaaagagtttgtaattaaaatgataaaacatcgttattacattgaagaccttctgtaagttttacatttggcagatacctactgagataaccccagcatgtaatttacaatgatgtaatggttgtaattgcattttagaaaaaaagaactataggaggcaagtgcttccattagaagagtttttaaatctgcttctgtttcatttaaatctacttctatccccaaattacttacttataattgactagagcagctataaaccttaagatgctatctgaatatttttaaaaagttatcaccccagacactgccaccagggggaggaagctaaaatcttaaagttcttaactgatgatgatactgccagtaggtagattatattgcttagccctacatagttaactacttcctccagataataccgccttttgggacatgattctcacaacctgtaatatgtgatacctgtagacttagcacactattaattgtaaataaaatggaaactttcgtactctggtggttggggtcaggaaggggaaagaggaagtacaaataagcaacctggacatttttattgtttttctcttatctgttagtctacttgaagagctatccttgaaagtgagtgctttagatctatgaaactgggcagctatcatagcacatctattaagatctaataatcacataattaatgtagcaaaatgaatagactgtaaggtagttttctattttttgttactacactgtggttttgtttttaataaatagttttggctttattttaaacaattaaaaattcaaaatatttttatgaccaaagcttgtaggttctatccctggaaaatattttataaatgcagaaaatagttgcttaggattggaatccaactctgtttaccatgaacaacttaaaagttgatctcataatcttgcatgttgtggaataataccacgaaaaagttaattaaagaatttagatgtttgttctcctgtctagaactcaataacttttaagtagtaactctccctacagtttaactgttaaacagtaactcttctgacagttttaggttttattctgtgaagactcatgatttttaatttttgcatcttaatttttcagttatttcaggtattgaaattacaaacgacgggaaagaaaagtggttgactaaaaaggggatacaaaaggcaatttttagggcgatgtactgttctgtatggtactgtggtggtggatacatgatactatgcatttgttaaagcccaaagaactgtacatcacaaagggttaattttaatgtatgcaggttttttaaatgttagggatttcaggatagaatgcaagctgtaacaaatgaatctaattgtattacaaatgtatggcataacttcactgaatgggtgggggaaaaggagctgacctaagtaactttggaaaatggtgttttgattggacaatgtaaagctaaagactaaggaacactatagaaacactctattctagttggtaaatttgtttctcataacggtatgggtgaacagttctgaacctctttacatgtatcctggggttgaacaaataagtaaatggatgatgaatggtggaagctaggtttctcactgtcaggaagggatgttacagataaataaacaagaggggagagccagaatgaaacctgtggtactggattagagttggagatataagtatttactcatgtttagcttaatatatgcagatggatagatgcagaaataattatagatgcatgtgtatatgtggattagtatacatgcatatgtttcctagctgtgtttactgagaaggcctagaagcagtgatatcccagtagccacaaacacatctaacgctcacatcctggtttgtaaatcctattctccaataaaaggatccaggactccttttaaatatgactgattctggggctggtgatgggaaaatacaacataagcatggaatatcttgtagtgccagaaggcaagagatttcttaaaaataataaagattaagcatgccaaaagggacacatgagccaatgtgaaagaactccgagtggccgtagctggaataattagagcaacaaaataaaacatgtagcattggattaaggataaattattgagtaaatatacatgagttcacagtgttatgtataaattgtataaataagtaaatggaggagaagagataaatctccctgacagaagaattccaaataacatattgccccctccagaagggggatcctacttcccttctccttgagagtatgagctggattgagtgagtcatatccaaaaattgagtttggaagacagcgaaatactgacttgactatttccattggagaaagctggtaaacaactatgttaactaagtgatcaaggttaacatcacaaatgggaagtcatgctgatgtgaagaggtggaaacttcatctctctgatattctttccctaaacctgtagcctcaatctaatcattaggaaaacatcagacaaatcccaactgatggacattctaccacataagttgagcattcctgaaaactgtcaaggttgtgaacaatgaagaaagactatgaacatctcactgacaagaagagactacagagtcatgacaactaaatgttacatagtttcctggatcaggtccagaatagaaataggatattagtgtaaaaactggtgaaatctaaataaagtcttgactttagtcaataatccaccaacattggtttcttggtttggccaaatgtaccacagtaatgtaagatgctaagatagtgacattagaacaaattggatgaggggtacataggaagtctgtatattaaacttgcaatttttctgtatatctaagttcccaaatataaaataaatttatttgaggttgatcaatgggctgactatattgacaagatactgataggttacatgttgaagaaaacatacaatataaaatagagaaaaagtcagttccatcccttcccactccccctttacctacctgctccccagtactcatcattgtgatttagtcagaacagggtttagtgccagaggtcagggtgactgagggtggaggagttgtgagcaatgggttcatggctgtcacaataatgctgtggcaattctatggtttcccagctgggagttaggagtggggagggggctgcagcctgatgacagccagctgaaggaagagctacctctcccttccctagctgctcatcacctgaacccaagaccacgccaaacaagatatggatgtagatgctcttgctgagtctgttccgcaagagggaaagaaagggtagctgctccaaacacgccgtcctcatatacaagggtgaggggaacagaagcatgtggctgctaccagcaaaggaaaagtaggagagcaatagaaaggggaggaaatgggaagagcagaaaatcaatattatttaaaaagtgacctaagacttaaaattgaattagtatttgtacagaaagatgcaggtggaataactcactctggcctgtgatcaaaattatatggagaaatcatggtgggccccttcctctgtccccagtggtggcaccagttgctgagtgtgattagttagaatggattccagtctagtcgttcaggcagaggaagtagttgcagtgggcaggcaagaggggctcagttgctgcagcactggctcttgctggctgggtggttcttctggaggtccgtacctcagttttggcctggagcaccaggtgcactctggggcttattaggaatcttcttagctctcgccgtgtaaacttcattcacgttcattgcagtctttactgatgtctccatagtcaactgtcgtcgtctgcatagtcctgtgcttcgtggaattctggggctttcttgctggccaggtctgccttgttacccacaagtacagtgacaatgttggggctggcctgcctctctagctccttcacccatttcttggctggtgcaaatgtatcttttttggtgatttcatagtacatgggggctgggctatgataccgctcctgtccagcgctgccccagatctcaaacttgactattgtgtcgtctaagcagacagtctgtgtaaggaaggctgctctgattatgctctcctggtactcttgaaattgtcccttgacaaagtggaggacaaggctggatttggccaccatagactcattgttcccagtggctggtccaccaggtcgtgtgctgtgccttgccgacccgccactacccgtccagctgttgtgataccagagagcatggggacgggagccattgctatgcaaagaggcacttagttgggaagggggtctccaaaatgacgcaagggcagtagtattacttggggctggggctcacacaggctccgcttctctccccccacccctggtggtatctccatataaaaattttacttaaacgcagagaccatatatgtacttaaacacttgtctaaagaaataaaatatggccgggcatggtggctcatgcctgtaatcccagcacagaggccgaggcaggaggatcacctgaggtcaggagttcatgaccagcctgaccaacatggagaaaccctgcctctactaaaaatacaaaattagccgggcatggcagcacatgcctgtaatcccagctactcaggaggctgaggcaggagaattgcttgaacctgggaggtggaggttgcggtgagccaagatccccgccactgcactccagcctgggcaacaagagcaaaactccgtctcaaaaaaaaaaaaaaaaaaaaaaaaaaaaaaaaattcccctgcctctctccaccccagagggtaaccattatcctaaattttattattattattcacatgcttttctttataggatagccatacatgtatcactaactgttctaccatatctcataacctcttatatagtttcccttttttgtcatatttgctgtgttctggataatttcttcagatctatcttccgatattggtaattgtatcttcagcagtgtctcatattctgttttacctgacattgaattttatgtaataatcattacttccattttcatttcttcccctgaaatcagtttactttatcattttgataaactcatttcattctcatatatacaatcctcttgtttatttaaatatattaaacttattttctattttgtgcctagcctaatatttaaagcttatgcagttctgattttgctgtctgttgtttctgctggctgttactcaaactgccttattttcctgtgtgttagcttgtattcattatttgtggtgatttctgagactgagatgaagatacgtttccaaagagagtatttacatttgaatctgccaaaagcctggggatactgtcaacctgggaacacattcaaataaatgttgggcttaaagttttgtgggctgcataggtaacatgagttccagatccataaaccttcatgagggtgggcttgtggttaaattttcagggaagatgtatttacctgcacccagcatcaagtttgaaagaggttaatttccttgtttattccttctgtagggtagacatcattctattcaactcttacactaaacatgtatgtagctctttaggatcccaactttatgtggagagtctaattagacttcgtatcgttaatgtaccctagaatttatcccctaaaccttgggttcagtagtgtcctggtaaatattttaaagctggctgtccagggcaaaaaaaaaaaaatcctaatttctcacatttttctatttcacactatggctgatttcacgataccagcctgaagtcattgaacgtggagttgggaaaagatatgtacagttagctttctcaactccagtgtatcactgccagttctgtacatggctgtgaaaactgaagctcaatgcacagggcttggcatatccctcagaatgaaagaatctgagtgtttgcctacccctctggatttccatttttactttgttttaaccttttgagtattctgtgtcaactcagcaatatacttcaaaaaaagattcttttgttttctttttattttaacccagcatttgttgttgtttttagcaaaagtcctgtgttagggtacctatttagtcagaaatagaagtctctgtgcttgtttgtaagtataatgtattatttttctttttggggaaatatagaaagaaatagaagtctctgttcttgtttgtaaatttaatgtatttttcttttttgagaaatagagaaaagtacagagaatattaaaacacccataatcctatcatatatgttcattttatgtgcatgtatgtctctatacatttttatataatttgcattatatctactatttcagtatatgatttttgttaatatataatgaatgtttgctcatgccgttaactattcctttaaaacagcccccattatatatgagactaaacataaaatgctgcacacataggagttagtataattcagaaatttagtctgtattgcatttggaaataattttgtgaaggttattcatgcagcattattaataattgcaaaatattggaaaccatataaatgaccagttctagaagattggttgaatatactctggaacatacaatagactactatgtttataaaagctatctgtttttataaatatatggagtaatttccaggaaatattacatgaaacaaaaagcagaaacaaatacccatagtgctacttgtcatacaagaaaaagggagaattaaagaatgtgtatgttcaggaaggataaagcagaaaacagtaaaattagttacaagaggtagaagggagagtgaggtggaagggatgtgggagggagtgagacttggatattggggtatactttcttggcatagtttcaacttttgaaagcatgttaatgtccaacatattcaaacagttaaataaaaatgatatcactgggacagggacctaaaattgtaaacaaacaagtgaacttaattcatttttttttcttatttttttattattatactttaagttctgggatacatgtgcagaatgtacaggtttgttacataggtatacatgtgccatggtggtttgctgcacccatcaactatcacctacattaggtatttcacctaatgctatccctcccctaaccccccaagcctcaacaggcccctgtgtgttatgttcccttccgtgtgtccatgtgttctcattgataaagttaattttaaagtaaaatgaatactatatccataccgaaaggggataaagaagaaagaaatgaaggaagaagggaggacagatttatgaacaccagattcaactatatgtccttagcttggggtgggtgggagagaaatgaagaattgcaaacaaatcctgaactcacttttgtaggtttattttattttattttatttttttgaggtggagtctggctctgtcgcccaggttggagtgcagtggcgtgatctccgctcactgcaagctcgacctcctgggttcacgccattctcctgcctcagcttcccgagtagctgggactataggtgcccaccaccacgcctggctaattttttgtatttttagtagagacggggtttcaccgtgttagccaggatggtctcgatctcttgaccttgtgatccacctgccttggcttcccaaagtgctgggattacaggtgtgagccaccgtgcccggcctataggtttattttaatggtatgggcaaactaaatcagagactattttgagcaaatgagtgagcctggtttctcactatggaagaagggacaaacatatagacaggaggaagacaggtaagaattctgtgtagaggaattggattggaggtgtctgtgtacatatggacatttctgtgtgtgtatgtatctgttgatgtgtgtgcatgtatttttgtatatgtatatgtatgtgtgtgtgtgtgtgtgtgtgtgtgtgtgaagagacattcatatatttcttagctctattgctgaaagagcaaaggagcgaagtcacaatagtagtgacacacctagcgttatttcccactgttagtttcctaaggctgctgtaataaattaccgtaaacttaacagaaagttattctttcatagttcaggcggccagagctccaaaccgaaggtgtttgtggggttggttccttcttggggaggcagagggagaacctatccatacctctctcctagcttctggtggttgtgcataatccttggagcttgatggtttgtgacattataacttcaattcctgccttcattgtcatatgacattcaccctatgtttacctgtccaaattttactctttttatcagagtaatccactcattagggccgactctaattcactgtgactttatcttaacttccaaagaccccgtttctaaataagctcacattcacagggttagtacctgattatgactttttgaggagcacagttcagtccctaatgcctactaaaactaaagctcttcactcaaatgactggcttcagtctggggcagggtaggtacaagatgaacctagaacatgttgtaatgccaaaaagtaaggaaatgctaaaaagtaagataagttgtttgttaagtatacagaatctagcttgaagagttccccactggtcaaatctagggcaatttgagcatcaaataattaaatacagtaatgaattataagctgttggaaataaagaactttataagaccattccaatcactaatgggtggatggatagaaaatgaagatattttacttacagtggcatgctgaaagttgaccagcaaatgtggaggttgtgctagagttgggaaaaaacaaaacaaggaaacctcattttgcagtcatcatgttaaagattagatcaggcaaaaatcatcaatggttgtaacatctaagaggacagacatgttgatgaagaacagaatatttacatggtcttgaaatgttgtatgggagaagagaaaaacagcaacaatgcagtggagaaatcagacaacacattgacagggtgatcacaagtatcacctccagtgagagtcaaatgaacattgtttgcctccttatgtgtttatctgtccctgagaagtacacaacatcatctatgcagtttctggcccagaatgcatctcaactcaatcacaagagaatattatgcatacatacagaaaaagaaagaatacaactgaacatagatgataaagaaaatgaggtaaaaatgtgacaacagatgaaaatggataaaggtattttctgtgtttttatttttggaactttttgtacattgaaatgattgccaatggaaaagtttagataaattgtcctaaagttacagagaacttgcagggaaaaacatcttaaagtagactaatagtggagagtcataaaagacacttggcaaatcttcttagttgaatattattcaaactattcagtcagggaactgattttgtgctaattatgaaatgcattattgcattgactttatgtctcttacaacattaaattatgttacctaggatcaatttgagattcaacacatgatagtagtttaatacagtgaagtcataacttgcaacaaactatcccaattttaagaattaattctgagcaatttttatatgcatgaaaaagatggttagaattatttgcagacacttgcatattctttagtcaagtggtcttattaccataattcatatctgttgtgggagtagggaagaaagagatttaaaaaatatctatcagttctttcaatcaagttaggtataatattaatagactttgagctaagaaagttttcatgaccagaagaggagcaggaactgtctaacatagaaaatgtttatggtataccataatcagttatacaaatataaaaggaaaaaatgtttgactagtgatactctcaaacttggatatccagaagagtgattctgtcagtacactaaaagcaaattcatctatcaggagctttcatgttttcattcaacaaatatttatccagtgcctattatgtaccagatagtgttatactgtgaatcgggagcatatgttaaaatagacaatatagtagacattattctctaaaattattaacaatagtagctaatactcatatgatacttactctgggccacataccattctaagatctttacatatagtaattcctttacctcaaacaaccttattagattggtactattattacctctattttattgatgaagaaacagaggcacggaggtgttaactttctccaggtttcacagctaaaagtagcagacccaggattttgaatccatcagactggcttgtgtccaagctttttttaattaattttttttattttgacataatttgtagattcacatgcagttgtaatataatacagagagatctcatgtactttttactcagtttctcgaggtaacttcttacaaaactatagaaccatatcataaccatcatattgacactgatatagtcaaggctccaaatatatctgtcaccacaatgatccttcatgttgcccacccacttccctctgttcacctattgaaagacatcttggttgtttccagtttggagctattacagataaagctgctgtgaatatttgcacataagtttttgtatgaacaccaatttttggctgggcgtaatggctcacacctgtaatcccagcattttaggaggccgagatgagagaattgcttgaggccagaagttcatgaccagcctggtcaacgtagcaagaccccatctcattttataaaaataaaaaattattttttaaaaggaacatcaattttcattactttagactgcctctaagcttttaattcttacattctaccacctctcaatatatagtagggaataaatagtagagaatgacttgatggttaagttgacattcagaagaggcctgaaggaagtgaagaaaaaagccatacagctgtttggggaaagcacatttcaagcagagggaacaagcacagaggccttgagaaggaaatatgcctagagtgtttgagacagagcaaggcggctggaaggagatgagttctacaaggcagctatgagccaggtctataagatgtggctgctatatagaaaatagatggtggttgggcaagtgttgaagcatggggaactattaagaggctgcccatcggagcttgcagtgagccgagatcccgccactgcactccagcctgggcgacagagcgagactccgtctcaaaaaaaaaaaaaaaaaaaaaaaaaagaggctgcccatgtgagagatgatggtagcttagacttatggtggaagtgttaaagatggttcagattctagatatgttttgaagaagagctcacaaaaatttttctgatgggctgacagttggatatgagaaaaggaaaggaggcaagaatgattccatttaccaggttccaagagaatgattacagaaaccaatagattgccttatttatttatagtaggaaatgtagttatcacatcggcccaaatgtttgtgtctgcttaatccgcatatctgtttctttaggcaaacttgcattggaatgtaatggcgactgcagaatcaggataaggggacttgaataaatcagtctttaaatgcatctgaggccgggcatggtggctcatgcctgtaatcccaacactttgggaggccgaggtgggcagatcacttgaggtcaggagtttgagaccagcatgcccaacatggtgaaatcttatctccactaaaactacgaaaattagccaggtgtggtagctggcacctgtaatctcagttgctcgggaggctgaggcacgataattgcttgaacctgggaggcggaggttgcagtgagcctagattgtgccactgtgctccagcctgggcaacagagcaagactctgtctccaatcaatcaatcaatcaatcagtaagatacatttcactccagcctggacaacagagcaagactctatctcagtcaatcaataagatacatttatctctttagtagggacctgaaaaaattaaattccatagacaaaaggctttctgagctcttctttaataagtagtgttggcagatgcagtggctcatgcttataattccagcactttaggaggccaaggcgggaggatccctgaggccaagaatttaagacgagcctggtcaacataacaagtccctgtctctaccaaaataataataataatatttagacatggtggcttgtgcctgaggtcccagctactcgagacgctgaggtgggaggatcccttgagcccaggaggtcaagcctgcagtgatccatggttgcaccactgcactccagcctgagcaacagaatttttatttttatttaaaataaaagtagcacaaacatttgcttttgtttctctttcataatgcaccaacactaccctaacccccaacataatccttttgtagatttgttaatatattcagacaggccatattccatatctgatcctacttagtggtttgatggttggctaaaaggcagtattaatatctgttatttccatgctattgagggatatctcacattgatcatccttgtattggcaatagaaataaatggtgatagtatttttttcatttagataaatttagcactgctcttagtattattgaaacttagtttaggaatgtatcatttatctataatcatttattgctgaagtgaacccttctttaaattttcctcttccaaatattgatgtagttctttctttcttcatcagttccatgcatacaattcaattttcttcatgacacgggatcatcatctataacgtctgttacttataggactattctatgagtctcttcaagtgtatacatgtatttgcttttattttaagttactcaaattgttatatattttgagtacttatatatacattttaataattttactagccctggagctggtggtgtgtcatcttcaacttcctttttaaattccttctaatttcttagggtgggaaaaatctaattcagtagattgaatttttagaaaagagtagataaactgatgtctaaatatttaggtatttgtctattctggaacctttttgcttcatgatttttcttttttactttgcattcctgagatttcctttcatgaactggaaggctttactttactaagtgactcagcagtagctctatgtatcttttagttggaaatgcctttggctctatgcatgcacacactgcccattaattagcaaaccaacatagaatcatctgttgatgacaaaattaccaaaatggatcatccataagtgtttatactgcaaacagtgtatcagaaatgtcataatctcattcattaagaaatttacatacacaccagattttagagtgctcattcatgatgaatgtctacttccacactgtttgtttggaaacattcaatagccagtcttgaatttaaaaaatttaattgaatgcttaaagaattacaagtgttcctttccttggctctaatgctaaccaaagtgcttttctaaactgctaagaatggactgaagattctgctgagggctgtagatacttatctgcctaattgagccatcatttgttgacatgaagaaaaccacgtgacctactttaatgcatttctcagtagcagcaggaggctagaatgtagttcatccaacagtaaaactagcagcagtattattagacatgtgaaaatagcattggttatgggattagttttgtaaagtaaggatagtaatataaaggtatatagtcataatataaacagtatagagtgatttttttattttcaaaattatttgaatccaataatcatttaagtcagtcattcagtaactatttaccaatgtttacagttgccagctatattaaaggaattgttgacttgtcaaagttgattcatatgagagtaacagtgttaaaatctgaaactggtatggattgctaaaacgaaatactttgagtacacagggaattactatgatcaaaactatgctggatacattaatttgaccatgtgtctttaaattggaggtgaggaagattagttacagatacattaattagaaaggtgttatattagtctaggttgaggctgatataagtaagaaagtaggaaaggatgcaaaagcccttggaaatgaatatttgtgtgtggtgaagtaaaatgaggtagaggttacccttttacatgacttgagagaatcatggctcatttagtaaatccagagggagaaatgattttctatatatataatgagtttggaatacaggaagaatgccaaaaataacatcttaaggaattcttcctaaatagtgaagaaagaaattagtatcaacagaagagacagaaaaggatggttatgaaagataggaggtcatcgctgtctaaaatgactgatggattttgattacaccactggtgatagaaaaaaaattattagagaaaagtgtagtctgagaactatttgatcttagtctgtaatgaatgaaatataaaatttgagactatttggaaactgtttaacaagtttacacccccttccagcaaatacaaaattacaacaaatttaaagatgttaattggtttttatttgcaattctaaaatcggacaacaacctcattctattaaatagaatgaatattccagtaagctgagcagaggaagttgactttatagacagaaaagggctgaggaaagcaaaaacagaaaacaaaatgtggattggtatttccaaaattacttttcttataaaggttaaagcagaggggacttccttataccagctaaaactggtctgtttggggatctggctattatctgtttctcctgatttcttggaaagtaagataaacaactatgttttagcttagtgatgtggaacttcagcttgagtgactccattttggtttggtctggtgggcctagtgcaggagcttagtccaaactaatgggatcctatacattttgtttaacactgccaacatcctggtgcacgatcatcagatttctcattgaacagggaatggatgactttgaatgttggagagcacctgtggtgagttgtttatatataatctgtaaactagttatgcacagtagcactatatatgggtctatgttggactagaggataaaaaataacttggccttcacctcagagagtttaagaatcactgtgccaccagaaagatggtagtagtaggcacattacatcgagtgaagactgttgggtgagagggaaggtttgcttaaagatataagagatttgagtttgtatattgtctaaggaagatatgatagaacagaagactgataatgcagtgtggaagagtgataactgctagatggaattgagatcaaaggtttatagatgaagactttatccttggaaaaatacatttacatttatttaatgtttagtttttaaattagatattatgtaacttgagcctcacagtaatccaatgaattaggtgacatatggttggtataattcatccgcctttacatttaagaaaattgagacacaaaaaatgttgtgtgttatccacagtcatgtggttagtaaatggggagatattttcatgcccagttctatgctataactactattatgtctgaaaataaaggcagaaaaaaatacttgaagaaaaaatggcaaaaaaccgcccaaatttattgaaaaacatttgtttatacatctaggaagctctttgaacaccaagtacgataaatgcaaagagatgcacacctggcctcataatagcaaaatcttgactatttgacaaggacaaaaggaaaatcttaaactcagcaaatcacaacaggggaacacaaaattaacagcttacttctcaccggtaccaatgaagccagaaggtaatgagataacatatttaaagtgctgaaagaaaaaaatcatcagcaaataaccttatgtccagcaaaaatatgtcaaaaataaaatgaaatattttcctagataagcaagtctaagagtgttcattgctggaacatctgccttaccaagaaatactaaagaaaattctttaagctgaaattaaatgacaacagatagcaatttaaatctatacacaaaaaacaaagagcatcaataaaggtaattatgtaagtaattacaaaagacagtataatgacatatttcttcactattctctcaactcatttaaaagcaaatgcatacagcaatttgtgtataattgtatttaggccctatgacttattagaatgtaatgtatatgatgataacagcagaaaggaggtgcatggcaacaaagctctattggagtgagtaagaaaaggacaccagatggtaaactaaattcacaagatgaaatgaagaaaaccagaatggtaaataagaagattaatataataaactctttaaatgcttgtagtcctagctacttgggaggctgaggcaggagaatcgcttgaacctgggaggcggaggttgcagtgagccaagatcatgccactacgctccagcctggaaatcataaggaatagaaaatatatttactattcattaagtggaattgaatcatcataaaggtcttcatcctcttagtcttcatttactgtctccaaaaaaaaaaaaaagtttccatgactcttcagtagattatcataaattaagatgtatattgtaacccttagggcaactgatgagaaaataacaaaaaattctagttaaaaattattaaaatgcccctataatatgcttaactgatttttgacaaaggtataaagccaactaattggtgaaaagatagccttttcaaaatgttgctgtggcaacatgacgtcaaaagtgaaaagtggccaaaagaccaaaaagtgaaccttgacctgatacaaaaatcgagtaaatggatcacagccttaaatgtaaaacgatgaaacttttatgaaaaacataggagacaatctcagaatctaggggtaatcaaatttctactgaaaattttagtagccacagcaaataagcaataaatagaaagaaatgtcattaaggttggaaagaagtgaaactactcttatttgtagatgacattttgcatatagaaaatcttaaggaatccactaagaaaaataaaggaggacaggtagtgataaatgcaaaaacagaaagtaatgaaatagaaaacaagaaaatagaattaaatctaaagcctttttaaataaaattaacaaaataatcaaagtggtcataacactaagcaagtgaaaaaagaaaagatagaagcaatattataagtgaaaaacaatgtttaatcataaacaattctaagaaatttggaccaataaaagtttgacaaaaatctgaagttctctaatttgtttatatatttttggtatttatgtatttattgtcataggtttcttagttagattcatggccaaaagtaccatccaaaaaactatttccaaatgtatatttttagcacatacctcttttctgatctccaaacttaatgaccaactggttatttagattattatatgcaaatagacttcttaatatacagtgtcaatcctgtttctcttatgtttaatacatctctgtatatggtaccactgcagggtttgactcatgtgccctagccaaaccctaggagtcatccttgattttttcttttccttcaataagtccctatctttatatctggaacccatttactcttcttttatcagcaattaccattctattacagaccattagtatttttctcctgccctactgctatagtctcctgactgatctccttctactttttaaccctttcaaaccattctccacagaatagctggagtggccttttaaaaatgcaaaccagcataaaacattttgatgtttaaatccctctcatggctgccaatgattgctcatagaataaactccaaactttctgccatggtgtataaagccctacatgtcttacatggctttcctcctacctgtctaatatcatcttattctagttctttctcattgattattcctttaacaaccaagcccttttccttcaaaagtccttcactcttactcctccttcctggaatgctcttcactgttttctaagggctgactcatgtataaccttcaacattcaactcaaatgccatcctcttagagagtcattttctggttagctatctaaagtagctttccctgttcctccatgagctgttgtcataatatccctccaacccccaacccccaccttatataaccatgcttgtctcctttgttgcagttatctccatttgtaattaacttgtttaaatcctcctagaatgccagctaataagaaggtaaggtccttgcctctctctctctttttttttttttgagacagtctcccctgtcacccaggctggagtgcaatgacgccatctcggctcactgcaacctccacctcccgagttcaagcaattctcctgcctcagcctcccaagtagctgggattacaggtgcctgtcaccacatccggctaattttttttttttttatctttagtagagatggggttttaccgtgttagccagagtggtctcgaactcctgacctcgtgatccctccgcctcagcctcccaaagtactgggattacaggcatgagccactgcccccggccttgcctctcttaataaccatattacctctggcaaccagcatagtgcctggtatttattgtgctcagtatgcatctgttgaatattattattttgtatactctatagtgatgagcatgttgtaagcaacccgatatgtataaattcattgatggtgttctctctctaaattttctttattgttttcatggtgggttcatttcctcctttaccccctctttttaggttgtataatcattagttttattttcatctctgattttatatggacatgtttcaatgcatacagacagttaatattcttttcctcctaattatctattatatatatcatcttcagtatcatcaccattcaaaaaactcttttatatgttctagataatgtggcctattttttacgttagactacctgataaggtgtcaactgaattggctgcctttatctacattctgaaccaaaatttaattctagagtttgtagtcagcgtttttccaaatgtgtaaaactgtaatccttcataaaatgtcatatgtaaaagagtaagcaattctgtgtgtactaaaaggtgagaaagttattactttagctttcactgggaagacttaaagtttatcaaaaaggattatagaaagaacagatttatagcaactgtctgatatatgaccagaacccttatgttccactgaaagagacttgccctaggctttctagagcataatgcccttagcaagtagctttcaacatctttttcaggaagcaatattttccttcagtaaaagggtcactgtactgtttttctttttccttccctgtcttatcttttgagttcaggaagtactttaaatttacaggcagctttgaagacatgaagcaagttcagccccagaagtatttcctgttatggcattaatctaattccatgaaagtagaactgatttttcatctgtaaagtagataaagtgcctagagcagccgaccattattctgggttatcatgataaagaggcttagttttgacacaaaagagtttatcagcctacccagtggaagatttcatcctttttgttgaaagatatattaatggattataatctgtcttggcttccaaaagaaagttcacctttatattgaaaatgattagttaaatcagcaaatattttcctgaatatacattttataatatacgataaatcaagcaaacattctagggatatcacatataattaaatatctaatgttaaatcattttatgttattttaatgtttaaattattgtctcaatttgaaataatcacagattttccttataaaccaacttggtttaattttaacatatagactaacataatttctagtaggcatatatgcttcattttagaagcccctgttattaggttatataatttctccttacaacttataatgtagaaatagttttcttataataaggtatttctcttaatagttaataattaaacttagttgattattttaagtatatagtacatacaaataatatataattcaaaagctataatatatttttcctatccctatttcctggttcctctctaagctaaggcatttagactaatcctagtggcttagtattgtttaaataattttttatttgaaaattgattccatattggacatatttacaatatttccttgaataataatagcttaccacatagtaatacattacatatttagttctctcagtagccttctgagttaaattctgttatccatttgaaaaatgcaggaactcaaggttagagaggttaaataattggctaaaattcacctggctgataagtgacagatttgggctggaactcaggtcctctaataccagagcctatattcatagcccatactgtaggattatagaaataaggttattcccagttgtgccttttatacttgaaaagaacaaaagattccactgaatgcttattttacaattaataaattaagttaggctttatcataccctaatgagatatcttattatttgtttaaaataaatgatctaccattatgttcataaataaaaataaagatattgttttattatagatgttaatgttttaaaacttagatcatctaaacatgaaaaatctctggcctagtcaaaggcacactgagaactaaacttgggattggaaaatttggagttttcaaatggccctaccaattcagcgcataattgtatatgcttatcatttttccaaagagggttgaatagtattcttccattgtatatcttagggaggcattataaaggtaatatgacatcagatgttaaacttacttatttaaccagcattcattgaggctgcctactatacgtatcctgtgaagcaatgtgaccaatacaaagatgaagaaaacatgggtgctgtctttagtgaactacccatcttctaggaagaataagatctattgtaatataaacaagagtgatgagtccttagtatatgtgaaggtctcctcagctaagttccaaaaagtaacaagctaactgtaatttcaccaccttagtattttatgaacaccaccttagtttttatgaactcaggaccttacctccactttatgaaaacacatatacacaaagcaaggagttttaataagcacttgaaaagatgctaatcttagccatcagacagtggcataaccatgtgagctttatcttaacacccactaggatgtctataatcaagaagacataataccaagtgttgacaaggatgtggagaacttggaaccctcatgcaccactggtggaaatattggcagttcctcaaaaggctaaacacagagttaccatatgacccagcaattccacttttagatatataccaaagaaaaatgaaaacctgtgtttacacaaaaatgtgtatatgaatgtttatggcagcattaattataatagtcaaaaggtagaaatgactgaaatgttcatcaactgctgaatggataaataaaattagattgttattttacatgagacacaaaaatgaactcaaaacagattaaagatttaaacataaaacctgagaccttaaaactcagaagaaaacatattagaaaagctccgtgacactggtcttgcaatgactttttatgtatgacactaaaagcacaggcagcaaaagcaaaattaaacaaaattgtatctatatcaaaccaaaaagtttctgcacagcaaaggagacaacaaaagaaaaggcaactcacagaatgggagaaaatatttgtaaaccccatatatgataaaaggttaattatccaaaatatgtaaggaactcatacaactcaatagcagaaaacccgattaaaaaatgagcccaggacctgaatagacattttccatagaagacatacaaatgacccaggtatatgaaaacatgtgcagtgtccctaatcatcaaagaaatacaaatcaaaagaccacagtgaagctgggttcagtggtggtggtgcgtacctatagtgccagctacttaggagactgagataggaggatcagttgagcccaggggttcaaggccagcctaggcaacataggaagaccctatctctttaaaaaaagaaaaaaaaaattactcccccacccccactttcctctccctcacaatgagatactaccttaaatttgtgactgttatcaaaaagtcaaaatcatgtggaaaaaagggatcccttgttagcgggaatgtaaattggcacagagattatgaaaaacaatacgaaagttcctttaaaaacagaactactatataatccaacaatctcatttttggatataaatctaaaggagatcggccgggcatggtggctcatgcccgtaatcccagcactgtggaaggccgaagtgggcggatcacttgaggacaggagttggagactggcctggccaacatgatgaaaccccatctgtactaaaaatataaaaattagctgggcgtggtagcacatgcctgtaatcccagctacttgggaagctgcggcaggagaatcgctcaaacccaggaggtggaggttgcagcgagctgagaacatgccactgcactccagcctgggcgacagagtgagactctatctctaaagaaataaataaataattaaataaacggaaatgaaatcagtatgttgaagagatatttgtactcccgtgttcagctgcattattcacaatagtcaaaatagggaaataccctaggagtctgtcaacagatgaatggataaagaaagtatatgtatatataaacagtggagtactgttcaaccttaaaaaagaaggaaatcctgccatttgcaacaacataggtgaacctgcaggacattatgctaagtgaaataggccagacacaaaaatatagatactgtgtgatctcatttatatatgaaatcttaaaaagtcaacctcatagaaacagggtagaaagtgtggttgggggagggaagaagggtagtggaatgatggggagattttggtcgtggggtgtaaacttttagttataggatgaatacgttctggagacctaatgtaaaacatggtaactatagtttataattatgtattgtatacttgaaatttgttaagaaagtagctcttaagtcttctaccacacacaaaaaaagataaatttgtaagttcatggatatgttaattggcttgatagtggtgtcatttcacaacatacacatatatcaaaacatcatattttatactgtgaataaatgtaatttttgtcagttataactcaagaaaattgaaagaaaaatgtattatatccacacagtgaaatattatttagtaataagcaggatgaagtactttcatccatgctgcaacatagataaacctttaaaacattgtgctaagtgaaagaagccatttataaaaggctgtctattgtatgatctcattcatgaaaagtcttaaataggtaaatcaataaagacagaaggtatattggtggttgtcttaggctgaaagtgttgtgggacaatgctacactcctaatagatacaggatttctttgggagttagacaactaatctaaaattgactgtggtgatggttacacatctccgtcaatatactaaaaatcacgaattgtatgctttaaatgcaatttatatgtgaattagatctcaataaagcttttattttaaaaaatagatggtattaacaaaacttttagactactgtgaccacttggcacacctaacaacaaagcatccaaggagattaatatttaaacgtacattataatatgaaaggcatgaatttagatgggggcatgtaacctcttgaagaaatatataatgtaaaagtgttattattgctattttatttcttattttaatcaaacactgtgatagtattattcattccactgtaacccctattggataaatacattatagtatttagaataaaactcatgtgttagtaagccagtgagaaagaatcataccagagctttatagatcaccagttctatctcctgtccctccatttcaggtatatgcaactggcctacctgttcagagtattaactctatggtgcttcatcagtcagaccatccactatgcccaaatgagtaatatgtccaaactgtatttgcaaaatgcatttcttcacagaaattaatatcctgtgcaaatgctggctaattgattattactctttcataaaggcttaattaggtaggaaacccagtacctgcagcgagagaggaagaaaagtctttcctagggctagatcctgacccaaggttttggattttaatggggcagagttgtctgttttctattaaacacatacttgggagtaagtagacttgcccatctcctgttttatactgatcttttcacgaatgtgaacctttttcttgaaagagtaaatatctttaaatttttctgtagccttccctgttacaagttaaatgttcctacttctctagagtatttcgaagtgtttatttaaataagtaaacatggatagacactattttgtagcaaggggttgggggagtatactctaaggcagcttctctctgacagcttatctttcttataagtatagtgtaaacatataatttataatgtgggaaaagagggtttgatcttttaataaagccatttctttttatttcagagttaaggagtttaaattctttttctttagcatctagcagtgagttcaggggtgatggtcattaatatcttgatccattacttttcctaaaagataagattttttttcccataatggttcatttgtctgactgctttatttcccaccagaaatcacaaaatccatttttcctgtgacagtataataattttcacaacatctgattttagtggcacatacatgcagaagattaaaggtgtaggttagaaaagaagcagtaagaaggcattgagaataaaaacatggtagaatttatttctttaatgtcataataactaatttagaaaaacaaatataaacaatgggttgtaaatagtttattcaatattttaataaagaattaattcattacatgcacacttatttttacatacttgcccagatttcttaccaaaaaaaattttctcgccctattctcaaacaaaatttatagacattatatacagcctctgttgaaaagaccttctgttaaaatcagctgcccttagcttgacatatcttgagttcttagtgattaacatgttaataacaagtgtgaatgtcattaatgttcctataattaatttcagtattaacaccttatgtttcttattattcattcctcaaatgaaggatttttccatttataactaagtggcaattattatatcatttttatataatggagcaataaattgtatctgatgttattaatagtaattcctacattccttataacatacttttatactcattcctttatatattcctttactgttatataatactttttaagtgcctttaagtgaagagaagtggttgaaatgtaaaagaagctacttggaatgtctgtaataacaaatgtgttagtatatttacacctgcttgaaggaaagagtaaagtatttcctgaaaaccccacaattatataggtagttcaacctctgatctgcactgaggcatttaacctctcttaaccttggcttccttatttaaaggaagtggctgttgagccttacctaaatcataaagtgagtgcaagtaattgtttactgagaaatctaagaaaggctaatggaaaacatcaagtatgaatgaaacagttataactgttttcccctttgaaaagaattgctgttccacattgaatttctgtcatgaatctaactctttttaaatgagctatttaaatttaaatacataaatggatgttatattttgattttaattacttcagtagtaattcagaattaattgaagctacagcttaaacatattttattacatttaaatagttgggaaaaaataaacagttggttagctaaaacccaataaataaattgggaatagattctgctagttgaatgctgaaatgaatagtatatactttaaagggctttaattttttctttcatactgatttaagactgataatttatctctttacttattctaattatttgaccctttttgttggaggagagggggcaatcttgtcactaattgtgtaacccttgtttaatttactctttcaggaacccttccaaccttccccctctccaccttaatacactgatgttcattttggatttccaagagggagatatgatatgcaactttaaaaaacctattttccagtcaagccatttttcaaagagagcttattaacctctcctatggatcaaattgtgaaatactaaactaggttgcctgtggaagtatagtgagagacgacgataggaaagaagataggatggggtcagaagaaccttacattccatgcttaggagtataaactgtatacgataagcagctgggaaccataaaatccttttaagaagtattgtgatataagactaatttgaaagaatagtgagaaggtggataattgtacatttgattttattcctttatgctaataattcccatgtacatacagtgaatgaaatataggagacaaacatcttcaactattctcatttcttattggttttagagcttggaaatatgttaaaaagacatgtaaactagttccatcaattgtatttcctcctatttagatagtacagtgattttgagcaaactgttaacattgattttaaaatccaaaatatattattagtctataaatcactgcatggttctcattcattgattttcacttaggaggctttggggggttgttttgtttttataatgctttacccaaagcattttaaatcttctactctccagtaatagtttttgtcaaatatattttgatatctgctgtactatttgctatatttacttaaacatctctccactacgtagagcaggtactataggaggaaaaacttttcctctaccctcttatgttcagtagttggtgcttgcaaattaaactgacaaaaaattaggaggataaaaggattattttgtatgcacgtgagaagcctcacagaaaagaattgaaaaccccaaaaaaccaatgagaccaaggggcttacatatcattttaagaaagagtgataaagtatggagaagagactagacaaaatgggggtttagacttctggtggggtgagggtgggcattaatgataggtgactaaggaatgagtggtaaataagggttgtttagtaaggtttattaggcagagtcaagtgagaagagtctgcttcttctcttcctggtactggagaggaggacgccattacaaatatgaatttcctttacaaaagggaaatttatgccctatttttaggaagtaaaggggagggcagagagctcctcctatgtttgctgttttaattgcctgtagttcaaaataatccttatgctgaagtggcatatttgagggtgtcatactctgatccccttcactatagactactctctaataccagggtactgagttaagataattctgaaggcttcgctaataatctactactctttgtcaatttcctatcttagttttctcatctgtaaaatggagatcatgatagcacttacctcaaaaaatgataagaagtcaattaaaaaagcaccaaaaaatgcttaataaagtggtctgacacatagtaaattctcaatgaataatgtatatactgttaaggagtcatttccctctaagagtacaaagtacaaaagaaaaagttggagcttaagatttaggtttggctgggtgtggtgtatcacgcctgtaatcccagcattttgggaggctgaggggggtggatcacctgaggtcaggagttcgagaccagtctggccaatgtggtgaaaccgcatctctactaaaaatacaaaaaatggcagacgtggtgatgcatgcctgtaatctcagctatttggaaggttgaggcaggagaattgcttgaaccctggaggcagaggctgcagtgagtcgagatcacgccactgcactccagcctaggcaacagagtgagactctgtctcaaaaaaataaataaaagagttaggtttaatcccagctacttgggagggtgaagtgggagggtctcttgagcccaggagttcaagtccagccggggcaacctagtgaacacttccctccactccatctcttaaaaaggatgggagtgttcccagtgctgattatgccacctattagccgtatgaccttggacaactgtaagcctcaactttcccatctatgcaataagaatcatttttacctcattagattgttatgaggattaaatgaagcagcatgtatatatgtgtatatatatacgcatatatacatatagtatcttgtatataataagtatttattacatgcaatttcatcttttatgtagactttctagactctaaccttgccccaggaagataagtgacttttacattaagccatgttctctttttcctttatgacactcctcaatgcttaatgaagaactctggctacacaaaaaactaaagtaaaatgttgacagactgcttttttctacatctgggcttctttaattgaaagctgacatttaggccaagaattgttaggaattcctatttaggtttataccagttctcgcttatatacaagatgtatacttgtgtatacatgttatttacacacatacaataatatatactggctttctttttttccctctcatcccataacagatagtatactgccttttttaaaaaaaaaaatgcccacttttcaaattaaaaagcagaggcacacattctttccaaatgtattagtataatttgaaataatgagattgtattaataggattcagccacagaaacagacccattagggaagatagagtgagaataagatttatttgttggttgatcgattttgaggaattggcctatgtcattgtggagactggctaagtagtccaaaaccatagggcaggcaaccaggaaggggagaaagccttgaacttcttaggcatgggcagaagctgtcattcataggtggaatttattctctctgtcaaggaaacttaagccatgcttttctttttaaattttattattattatactttaagttttagggtacatgtgcacaacgtgcaggcttttactttcaactgattgaatcaggcccctccagattatccaggatactccagtaatagaagtcaactgactgggagttttaattacatctgaaaaatacctgtatagcaacacctagattggaatttgattgaataactagagtctgtagcctagtcaagttgtcacctcaaaaaaaccatcttgggataaagttttttgaaaaaagaaatagaaagttcagggcattttggtcattatttttgtgtattgtgcctattatatctttttattttaaatttttgagaatctgtttagtgcctagtattttgccaagattataaaggaaacaaaggtatcttaatgtttttttcaaatcttaacatcttaaagttgtttcaagcattttccctgaattcattgattaagtattgttagaagaagtggaacatggatgatgcatatgctttagattgaggcaggagtatgtgtggtgactaagagagtaagaaatgatgatctcgagaatactagactgtgagctttctaaaagctggtatcgtgtgttatttatccttgtattgccatggcctggcacagtaattgaaaaagttcaacaatggtttgttgtttaggttgattaaggaatgagcaaaaacgtaacttaaaagctatctgtattgaagtgtgatctgttatatgtattcagatctgattatacttggagtcgaaatcactgtatctaaattaatattaagactcagggccaggcacattgtctcacatctgtaatcccagcacttcaggaggctgaggtgggaggtcagttgaggccaggagtttgagaccagcctgggcaacatagcgaaaaactctgtctccacaaaaaattaaaaaaataaaaattagccggacatggtggcatgtgcctgtagtcctagctacttgggaagctcaggtggaggatcacttgaatctagaggtggaagctgcagtgatctgtgatcgtatctctgcacttcagcctgtgtgacagagtgagactttttctcaaataaaagaatcaatacagcaatacagccccaatttctaaattggagaaagtcattttctatttcgtctctctctgttcctccactagattgtaaactctttgagagtaagaattatgcagttttgtctgctcttcaatgttttattgccttgcattaaaaagataataaatactgcttgatgaattaattaaaaacagcatacagaagagatccaaatttaattttgtaataaatcacctctgagaataataagaaaaccagaatatttgaaatacatcatttaattgaataaggaacagtaaactgatttttaatgttcctgtttttatgtatttgaagttaatgtttagttattttgttttaaaatctttataaaaattctctgctttatcttccagtgaacaagacatattaatagcttttctgtagagcaaggcatattaatagcttttctgttgaatatgaaagaaagcagctgtagttttatcctactgagtacaaatatttgttggggaattaaagatttattagataaatggcttaaagattaattaattaactatactatctttttactttcctatcttatctgtaggccattggtctgttaatatatataaattgctctgtttcctgctatctttccatttcttaattaaatattagaaaaatgcccaaggaaaaacaatacaactgagcttcctttctggttttcatgcttttaaaatttataaaaattgtggctctgctgcctttttttttttttttttttttttttgtagttagatgaatttggcctgagattctatgaaaaaaataaaacaatagtttttatttcatgatttttttttcaagttgttctgattttataatatctagtcaagtgatgacatgcagagattttgctgtgaggagagggagagagcaaaaagtattctgccctgattgctttttagtgattttattactagaaagataaacattgccttgttattttagccagtaaaattgtctgcaaagtaggtaacaaaatgcaaagcagtgtatttacttttccactttttcccaaaggtatgataaaagcagggttccagtggaacaatttgctgagttctttcctagggagcactggtagcccgtattaaatgattatattttggaaaatgctaatgatgaaagatgagaataatttatattctttgaaatgtgactaaaaagttggaaatgaaacctatctttctgaagtgacatccacatttgtggttcattttcatcacacctgattcacttctgccagcaattcagaaagaaaggtggaggtgggaaagcatatatgtagctaagctactaaagtgactatttgagtatttcattccatctgtcaaaagattcagtgggataaagaatttggcataaatggatgtaattcattctctttttacaaagaagtaaatgatagaacaaaatcatcctaaaatgaaggaacaaaataccagaaagtgaaagaaaacaaaatttgtattttttgatagaatagtagcagaactcaatgtaaaaataatgattacattaataattatttgctcactttttcctgtatttggtattttgggaaagtgggcttgaaaaacagtggatacattgatgaaacatttcaattttcacttgcctgttgtgtttgctcatgttagacaaactataacttctcggtgtatagatatgatgtacacaaaattacacagaaattaagccatgtataataatgcatgactagaagaaagatatatctcccttgaacaaataacagttattttagtaaatttgtaacagagaaaataggcttgattaacaaaaatatgaaagatcttttaaataaatgaattttgaattttcagagtagcccagaattttatctaaactcggattatttcattagctagaacatgaaaataggcatttattctactcacctacagcttctgtagtactaaatttatggaatgaggctttgtggtgctgccttcagagctcaatgatttgctttttctgaattttggaagtctgtctctaattgattgacacatatgaatgtagtgggaagaaatgagattaagcatacaagctttctttttcatttaaacatcattgaagccatgaatttgtaaattgatataaaaacacaatcctttggatctgtattaggaaatttataaatgggagctttattttgctccagaaatgtgataattagaaatatattcaggtgattttttccctttggtttttgttgttttttaatttatttttctttcttatttttaccaaaggttcaagtcatctgtaatattcaggtgtttttaagaatttctcatggcaagttaattgtgggtgaacatttccctattggactaccagatgtactttgtggttataacttgcatagctccaggatttttcgtgaacaagtaataaaacacatttctggtttgctttctgccatagagtattaagagtttaacactttttaaatgttactttaatctctgaaattttcaacaatgattagtggcagtatactcaaaaaaggaaatgtgtaggctttactataataaaaataagaacaacttatataagctccacactttatagatttgtatggatatacaatcaaatgtactaatttttaaattatcctcattttgcagtaattttacattttgctcatttgtgcaaaccgtggtgatagtaaaatatttaacagaaattcaagcacattcttttaactctttctgaaaaatctcacaaatgagatttttttaaaacagttaagaatttactaaatttaaaatgtatatatacctgatgccatccagatgttttattgaatttctaaaataaaagtccacctaatgaatggctaatttactcaacacgtaagacaaagatgtatttctgtgttactaagaacatgcatcctatctccttgacaatggctctaattacctcagcttggactgatcaatatttgatctttttcccaccatgcaaacatgttactttgactttgtctcttcctcttcttttcagataatttgcagccatgtgagaatggttcattttgtttgttctccctggcttgaggccaggggtctcttattagtataatgcagttcattgatgtgaatttgttgatctcctgggtaggttttcacaaatttaaggcaattaaaagcttttatatggcatttcacttgaagttattagtggcctttcagtgattttgcttttaaaaattacttcatcattttatgattatttcctttccttctcttttctctactctccccatgctataaaattctatagtaaaggattgaaacaactatttcattgatttcattaaaagtaataatttataaacttataattcaatagcttaatattttaattaccacaatttttaaaggactaatgaaatttttggttttgtgttttcaaaagctgctttgttttaagcatataaatattcatgatagaagccataatttggagaataataagaattgaatctaaaaattattagtaattgctaaaaaattcaaaaagcacatagtgtaaactttgtgtatatgagacagaactttttctaaattgcagtttcattaacatcttaaagttttctcgtagctaacagatgtccatgatatttttgcttccttaacttttacagtcaatggaccattctccagcaggtcataagtaagaatgttaaataacggccactaaatcttaaggaatgtgacaacattgattagattaaaatcctttgacttcattgacatatcttttttctttccccatttaaaaaattgtttcagttgttttcctactgtttgttggtggcatactttgttacagtacttgatccagtttgtttcattggtgtgcttggtaaatttgaagaaatgatcactggagaggatttgaaataactagcaaaagttttgaagtattgcagtgagtatatggaatgtgttactcatttatgcaaaaaatattggtgtttttatactttttattttaaaaaatatataacaataatagcaaatatttagtaagaatgtaactttatgccatactaaggcaagaatagtatattgaataagaggatataccctgaaggcagggtataaatccaagttgcgctgcttactagttcacttcttaagcagttaacttctgaatctctctttatgtgcaaaatggtataggagaggaaaaaaaatatctttccctcctgatatgtacatgactggggcctctataacaaaaacagattaacaagagaaaagtatactataatttaagtgtaagttttacatgacatgggagccttcataaggaaatgaagacccaaagaaacagctaaatctgagtgttttttatattaggttcaatggtgaaatgatagggtatgaagtaaatgtagtaaactgggtgaaacttggcaaggcctttttgtttggattcccctctgtctctttgtctttggagaaaagatgctcctttatagagagggtaccattcacataagggtcttgtgacctacttaagggaaaggtcaaaaaacagttacaaggttttatgatctgtttctagagaaaagggcaggggacagtcagagagaccttcctgcttctgccattttctcacattccttcaccttaaaattttcaatatatcaaggtgctatattttggggtagtatatcctgaaccgtgcctataggaatgatgataataatatctactttataaggataaaatgagacaatatgtataaattgtatggaacagtgcatgaaccacaataaacactcacaaaatgtttgctataaagatattttcgaccttccatggtggttcatgcctataatcccaacactttacgaggctgaggtgggaggatcacttggagccaggagttcaagaccagcttgggcaacatagcaagaccccatctcttaaaaaaaataaaaaataaaaattacccatgcctatagtcctaattacttgggaggccaaggcaggaggatcacaattgatcctcaggaagatcatgcttgtctgtaaaggattttatatccccttgacttatgaagcttagtttggctggatatgaaattctgggttgaaaattcttttctttttttttgagacagagtctcactccgtcaccaggctgaagtgcagtggcatgatctcggctcagtgcaacctctgcttccctggttcaagcaattctcctgcctcagctgccctagtagctgggactacaggtgtgcgccaccacgcccagctaatttttgtatttttattagagacagggtttcaccatgttggccaggatggtcttgatctcttgacctcgtgatcctcccgccctcggcctcccaaagtgctaggattacaggcgtgaaaattcttttctttaagaatattgaatattggctcccactctcttctggcttatagggtttctgcagagagatctgctgttagtcccatgggcttcactttgtgggtaacccaacctttctctttggctgcgcttaacattttttccttcatttcaacctttgtgaatctgacgattacattgtgtctgggggttgttcttctcgatatgtatgcacccaatacaggagcacccagattcataaagcaagttcttagagacctacaaagagtcttagcctcccacacaataatagtgggagactttaacaccccactgttaatattagacagatcaacgagacagaaaattaacaaggatattcaggacttgaactcagctctggaccaagcagatctaatagacatctacagaactctccaccccaaatcaacagaatatacattcttctccgcaccacatcgcccttactctaaaattgaccacataattggaagtaaaacactcctcagcacaagcaaaataatagaaatcataaaaaacactttctcagaccacagtgcgatcaaattagaactcaggattaagaaagtcactcaaggctgggcgcggtggttcacgcctgtaatcccagcactttgagaggccgaggcgggcggatcacaaggtcaggagatcgagaccatcctggctaacatggtgaaactctactaaaaatagaaaaattagccgggcgtgatggcgggtgcctgtagtcccagctactcgggaggctgaggcaggagaatggcgtgaacccgggaggcggagcttgcagtgagccgagatcgcgccactgcactccagcttgggcgacagagcgagactccatctcaaaaaaaaaaaaaaaaaaaaaaaacctcactgaaaaccacccaaccactgctcctgaatgaatattaggtaaataatgaaattaagacagaaataaagcagttctttggaaccattgagaacaaagacacaatataccagaatctcttggacacagctaaagcagtgtttagaaggaaatttatagcactaaatgccctcaggagaaaactggaaagatctaaaatggacacactaacatcacgatgaaaagatctagagaagcaagagcaaacaaattcaaaagctagcagaagacaagaaataactaagatcagagcagaagtgaaggagatagagacacgaaaaacccttccaaaaatcagtgaatccaggagctggttttttgaaaagattaacaaaatagatagactgctagacagactacttaagaagaaaagagaaaagaatcaaatagacacaataaaaaatgataaaggggatatcactactgatcccacagaagtacaaactaccatcagagaatactatagacacctctacgcaaataaactagaaaatctagaagaaatggatacattgctggtcagataccccctcccaagactaaaccaggaggaagtgaatccctgaatagaccaataacaagttctgaaattgaggcagtaattaatagcctaccaaccaaaaaaagcccaggaccagatggattcacaactgaattctatcagaggtacaaagaggagctgttggtgggagtgtaaattagttcaatcattgtggaagacagtgtggcgattcctcaaggaactagaaccagaaataccatttggcccagcaatcccattactgggtatatacccaaaggattataaatcatggtgctatgaagacacatgcacacatgtttattacagcactgttcacaatagcaaagacttggaaccaacccaaatgcccatcagtgatagacgggataaagaaaatgtggcacataaccaccatggaatactatgcagccataaaaaaggatgagttcatgtcctttgcagggacatggataaatctggaaaccatcattctcagtaaactaacacaagaacagaaaaccaaacactgcatgttctcactcataagtgggggttgaacaatgagaacacatgaacacagggaggggagcatcacatactggggcctgtcagggggtaggggactaggtgagagatagcattaggagaaatacctaatgtagatgacgggttgatgggtacagcaaaccaccatggcatgtgtatacctatgtaacaaacctgcgtgttctgcacatgtatcccagaacttaaagtacaattaaaaaataataataaaattttaaaaagaaaaagattgggtatttcacatcttcttgaatgtaaaactgggggaaaataatcttttttaatgtgcattaaaactttttttttttttttttttttttttttggggggagaaggtctcactctgttgccctggctggagtgcagcggtatgatcaccgctcactgtggcctcagcctcacaggcccaagtgatcctctcacttcaggctccaagtatctggactcaaaggcgtgcaccaccactcccaggttttgtttttttttttttttttttgcagagacagggggttttctatgttactcaggctgttttctaactcccagcctcaagcaatcctcttgcctcaggttgccaacgtgttgggattacaggcatgagccactgtgcctgacccagtgaaacattttagtgcagaatagttgtgaatttttgaaatagataaccaagaaaatttaacttcagatatcacctagttgtaagttatctctccgttttgtcattcaggaatgggttttctgagactttctaaagaaatatatattatcgttcagtttggctttggaaattttattattgccctatatttctagtaaagtaatgtagatctagtttgatacaaaccattctatacactacaccggtactatcagctttcacttttcacagctcccaaaacaaataaataaaagaaaatagctttcttttctatgccgtttctttctgaaatagtactaatctgccttacctttaatactatcccatagacccacctagtagctcttcccttacgagagagttcttttgatcagataaggtttaatatggaaaataaaaagaaataatcatttaaaacttgaccaaaatattttaaaaacatacacatatatactctaccttaacatatggtgaaaagcaatttttcctaaaatatattctatgaaaaaaaaattttggccaggcacggtgacttatgcctataatcccagcactttggaggctgaggcgggtggatcacctgatgtcaggagcttgagaccagcctggccaacatggcaaaaccccgtctctactaaaaatacaaaaaattagctgggcacggtggtgggtgcctgtaatcctagctacttgggaggctgaggcagggagaatcgcttgaacccaggaggcagaggttgcagtgagctgagatcacaccattgcactccagcctgggcaacagaacgagacctcatctcaaaaaaaaaaaaaatttatttccaatcagttggaaaatgtaagaatatgcaaaaatttaacagatttctttaatgtgggtttttcctagaacacctttttacatttcagaggacattagagttcagcaggacacagtttggtaaatattagtataaaaagttaggctcagccgggtgcggtggctcatgtctgtaatcccagcactttgggaggctgaggtgggcagatcacgaggtcaagagatcgagaccatcctggccaacatggtgaaacctcgtctctactaaaaatacaaaaattacctgggcgtggtagcacacgcctgtagtcccacctgctcgggaggctgaggcaggaaaatcgcttgaaccagggaggcagagattgcagtaagcctagatggtgccactgcactccagcctggcaatagagcaagactccatctcaaaaaaaaaaaaaaagaaaaaaaagaaaggagaaaaaagaaaaaaatcaggctctctgtagtcaaaagtcaaacatttttactgctaaaataaggcattattttttttccttgcttaattgccatgccaacttttattggttctttcctgtctcccaatgagttaaaaaagaaaaaagtatccaaatgtgttcccaccccaacccaagcctgtgatcacttctttgtttttttgcttccctgtaagggtatttctccctataattatactcacactttaagaagtaggagccattatactttattttcaaatttcaaattagaaagtgatttgggtttggaagcttgtttctgtctctggctatccaactgtttctcggctccaagatgtgaaactgtttcttcaccctaacggcaaaagggcacctgctattgagcgtgctttgagcgttattctcccaatagtaccctagataggtaagacatttttgaaatcaaaaataaacaaaaacttcttgttgtgatttctctgtataccaaaacatcctcttgacataaactgtgttatcctaatgacacagacaaacacaaattatcttcatttgggttgcagagttgggggtcatttcttgtgcttatgagcctgctattctgcaactgtgagatttcagacatgttcaatttgtggattttattttttattacacacacatgtgtagtattattgcttgtaataccttgtatgaatataaaaagattgtcatttttcaggtgtatattaacttcattaattttttacaattcaaatgatggagagattcctattgaaggatacttagctttttctaataattcagttatgattttatattcaatgtaaatgattttgtctctctggggccagattatcctatttaccttgaccccctaccatgacaatttaaatactgcatttaactgtagtatatgtaagattgtccttaacaaatatgagacttgaaaggttgtttttgtttgtgtcctctcctctgaagttttccttttaggatgacagcatacgatagatgtgttctagtaaagtgcttcttttattcatgaattacaaatagcttaagaaaatgtttaaagtaaagctataatgattagtcctggtagtctccattttattcagaatgtctctgtcagaaattatgtcatcactatggactgttagccaggaagttctgtctagcagatgaatgaatagggagtactgagttttctaataaaagacactgttgtaatattgaaatactgctaatggaggttgccagttttctgttcttaaatttacaggacatcttctgtgattaaagtaaggaatacttagagcaagtccttagagtaaaccaactataaacttaagaaaccggaaatagaattttttttttttaaacaatgccatttaagtccctaacttgtcttggttcagctgctagacatttgttcctttgtctcaaaaacgttagcagaaagcaataaatatagttcttgctttactcagctaacatctgattttatctgcacattgcttccatcttaaaactttcttaccttactagtctgaatggcttgtgtagcctaatactgttataattgtcagaacaaagggtttgattattttggcaaggaaaaaagcctggtaatagtatttgcatttcaattaattgtttcattctgatttgaaatgtgacttatgttagatacatctctgacccttccctatctcagtactaatactaatatgttgtatttccactacaatagcattacatcttacaaacatttatttcctttataactgacgtagagctttccacatagtagatatttaatataattgatggtttggaattcatacattttgtaggctaagtataactctcctactgtttcacctacttcctaagctagatttatctttacaggtactagactttatagaactaatggtaaattcagtatgcatatcttctgtagtaaacatagaaaaacatttttgtaatagtgctccccaaattttagtttcttgactagtaatgaaatatcttatctgtactagagttttgttatacaataatgacagcattttcatgtgctatgttatggccagttaactaaaaataagtggatatttaaaatggaaaatgaaattatcctgttgcctgaaatatcttgactcaggttctattacaggttgcatatggtatctgttagagctttgaatctatgttggttgttgagttattatgtgcattaactattgcattcaaaagttctttaaaagcatatgtctgttttaaatcttatacaaattccttgcaggttttgagagcagtctttttgtatgtctttcttgtttgttgttttgtttttataccagagcaccatgtcctaagcagcagtaaatttaaaacattgcttaggatagttttataatatcattaatagatttttatattagatagtttctctgaattattgacctattatagggaacatggaaaaatttagaaaaattagaagttatacggagtattaagaaaaaaactttatattttggtactcccaggaaaactaaaacctctttctaagagtatattttaggaaattttctaaaattttgtaaatcaacctacagagaaaaaaagtatagaaagtattttgaaatatttgtgtgtatatgtgtgtgtgtgtacacaagccacattttctcctagaactcactactgaaatttctgaaagtgattcaataagatatatatttcatatctggtttttaaaatccatagaatttttgtgttttgaccatcaggtagagtcttacagtttagtcacagtggaatcatcagcttcaaaatgaaagaacaagatagtctcttggcattcaaaaatttagcatactttaactcatatttgctgtgatgttaggtagtgaattattcttgttaactatctagcgtccaatgtgacatgtgtttgttgttacctacaacttatcaaataaacagttaccctctggaatgataagaacttgggctttttatgaaaaataccctctaaatgaggacagaaatctatattaaggataggctattgattaaatttagagatacacataaagatgactctcatataaaatttagaataaacatgaaagttttagcatgtccagactttagggatttagactttatgaaggtctcaagcctgtctcctggaattccaacgttgtgatgactcaaattttatcagtaaatatggaaaaataagctaaagttcttgagaaattgctatctaataagtgattattttattttttttctagttttaaaataaaaaatctttactatttattagattcaccagtgttttatactgggggtccccaacctttttggcaccaaggactgtttcgtggaagatcattttccacagggcagggtgggggaggggtggtttcaggattattcaagtgcattgcatttgtcgtgcactttatttctgttattattacagtataatatataatgaaataattatacaactcaccataatgtagaatcagtgggagctctgaacttgttttcctgcaactagacagtcccatctgggggtgatgggagtcagtgacagatcatcaggcactagattctcataaggagcacataagctagatccctcacatgcacaattcacaatagggttcgcactctaatgagaatctaatgccgccagttatctgacaggaggtggaggtcagacagtaatttgagcaatgaggagtggctgtaaatacagatgaagcttcacttgcacatctggcactcacctcctgctgtgtggcccagttcctaacaggccatggatttgtatccgtccatgtctgaggggttggggacccttgttttatacaattctaattgtgtcattgaatttcttttttcttttttctcattgttaggaggctaaaaacaaacttgtcttgtgcagattcgtcgtctttaccaccaaatttttgtcatggtatcttgtcttttttttacgtctttctaaactgccttaatccttgtaagggaataggtaaggtgtaaatataattaataaggtgcaaggaaatgttattagaaagaaattagattgttatttgaaaacatacagagcctaaatgtaagagaaatgtcctaagcaaaacttattaacaggaaatttactgaattggaaagtactcttgattttatgactaatatgaattgaggtattcttatagacactcagagattcctgtacacatgttacttgtgtttttccaaaactatatacgtatagtctttttacaaataaacagtggccaccaagaaaaattacagcagtacacataagacataccgtatacatgatactcaactttgtctatatcctttgtgttcaagtttctagaaattttcatctttgtaaggatatcatgtgagtgtgctcaaggtttgttctaagaatctagctgagcacagtggctcatgcctgtaatcacaataccttgagagtctgaggcaaaaggaacatttgagcccaggagttcaagaccagcctgggcaacatagggagacccccatctctattaatttaaaaaaaaaaattacctggacatggtggcatgcatctttggtcccagctacttgggaggctgaagcaagaggatcaagaggatcacttgagcctggaaggtcgaggttgcagggagccacagtcatgactctgcactccagccttggtgatacagcgagaccatgtctttaaaaaaataaaataagaatctatacacaattcatggaatgatgttgttttatagttttactgtatatttgtttctgtcataacttccaatatcccaaaaactttttaattatttttattcaagacatacatacagaagcaggccaggcacagtggctgatgcctgtaatcccaacatttttggaagccacgatgggtgggttacttgagctcaacagtttgatgctacagtgagctatgatcatgccactgcactgcagcctgggcaactatttaagaaaaaaagagagagagagagaagcagaaattcaaaggacactttttgaaatgcacttaatgtaaaggctgctttgcatggttaatttattcctattaaaggaatactacattcctgccacttttctaggtggtgaatttatagcagcgaccaggtaaatattgctgtcctcagggtgcttacctttcagtgggtaatgctttaaacaaaatatctagtatattagatggtaataagaaccttggagaaaaataaaacagaaaagagtgttcaggtctagcatgaaaggttacactttcaaatctgatcattagggaaagtctcacccaagacagtgatgtttaaaaatatttcaagaagcaagttgtgcacatattagggagaaaaacaatcagtgaataaatagcaagtataaagtctctatgccaggagcatagcatgtttaaggaatagccaggagattaatatggctagagtaaaatgagcaatgggaaaagtaagtaggagatataattacactgggaaagagtctaggggcatattaaataagactttataggtcattataaagactttgttgtttttgttttgttttgactctgaatgagatcaaaagcctttagagggttttgtgcagacgagaaacataacatgacttatattttagtagggttattctcactgttatatggacaaaactgaatggggcaaagatagaaatagggagatcactttggaggtcattgcaataatccagtgggagatatgatgacttggactagagaattagcaatggaggtgttaagatacaatcaggctctggatatagtgtgtaggtagatttaatagaaattgctgttgaattgaagaatagtttacgagagaaatgagtcaagggtggaagcttcattaactaagagagggtaaatggggataatttggtctagttttgtataaattatggggaaagtcttggtctcatagtttagcattccatagtacgttctccatagtgtataagtgataggttttactaatttaataatttttttgtctcaaacttgtgacttagactttgataaacttctgtttatgatagatggatttttaattgattttattgtttgtattttataatggattttaaggcatattagtgaaaacacaacttaaaatttattttcttaccttactaacattccaaaaaaggaacatatactgtataatgtttttttgtctcactaatatattcgtatccctcttcccccttcttggcaaacttgtctgaaagtatactgttgcatgttatgtcatggatgtaccggagcatgtgtgtaaaatacatgtcataaatggaagcagctggtttcctatgcagttaagagaagaaatgcatacagctgagctcttcaaacttcagaactcattggattcagtttctatcctgtgtaagcatgctatgatttcaaatagtacaaatgtataacaagttaccttaatagcttaaaaaattattttgtttcgatagttgaactactaaatctgttttattctctttccctctgccttcagtccctacttacctatcctacctcttgaaaagaacattacacctatagtcttagttttaaattcgaatctgaaaaggccttggcaagagttgggaaaaagttatcatctcaaagggaaaagctgaattcatacacaggaactgcaggattactctggcgttttactagtcccttgcagcactcgcaagtcccataaatacctaatggaaaaacagcagaaaatgagatctgcagcagccttttgagatcaaatttatgttgctgaacatttttttgaggttgagtgtaaaggtcaaaagaaagtgggtagattaaagttgctgatttttgcaaacttaaggccatttttaaaggtttctctttctgtagcaagaaaatttcaagataaatggctttgcttcattagctgaaatgtcatgtcttcctttaatatctgttacctgagacatttagtgatttagtggtatttatatacaacaaataaaaatctcaatccactttaacaaatctagataaatttatgaaattgcagatctttccaagaacagcatgatgataaattaatgtatatatacatgtttgtattgccatgtatatatgtatcttaaatgacatattttagatgtttttgtatgatacagaaggaaaagataataatcaaagttttgtatttttaaagtataggttattgatccagcagtgtaattataaccatctttttttaaaattatttcttatattaaactattacaatgaagataaatgacctcaaagaaaagatcgtgcatgtaatagcattaaaacaaaattcatggatgcttttaatggtctcttaccttttgaacaacattttaacacgttgttactggtgcaagcctatatctaagaaactgtgagttactagggtactgcagacttgatgcaatgaagaacaataaactgccatttctggacatctctatcctgagttgatagtacagaaagccaccacatatgttaacgtgaagttatagattatttatatctccagggcttgcttcgtgtctttgatttcgtagttcagattgcccagttattagtacttagaattcaaaagaataagataaaaaatttttacttaatacattcatttctgcatcacaataaagagttttcatggaaattatccagataatttcatagtagaataatatatgaaatgaaatcttttcttttttatggtagttgataattaatagtaaatctattcagtttatctctaagaagtcagattatgggagacttgtctctatttttctctatttaattttcccaaaaaaattcataaggaaaatattaattttcatttaaatctctatattaaacattaagtgatctttttatgccttggaatcacaatgaatataaatgttatttttattatagttgattttgcagtttcaattcatttctattaaatattttaataaacatttttatgaaactaggtagaggtcacaaatctcattagtcactgacagccaattctcaaacccaggtcttttcctgtataccacatttcctcattagttctcactacactgtatggctatttccgcctcttaactttttatattttattacactcttaaagtacaactgtacttctcttctcaagtgcccttttctattcagtaagggtcccaggtgagcaatgattctgactggggaagagggagaagatggtgttgtagcaagtagtattaaaaggcccttaggaaggtagatagatgtataattttgtctctttcttctcactgttttcgtaaagacaaaggctatgccttaacttttttgccattcttatttttgagactacccattagggattgtttttgatgttgttgagatgaagtatttggtgaagccaaaacctccttgacttttatagttttaataagtttgtgctctccaaaccttcataaagtaatgtctagtgatcctttcagatatggcatgctgtcatgtcagctttaaataattgttaatggcatgatttttaacattttacctagttagaatcagtaaaatttattatatatactctttgctgatcagtagagcctcttatgaaggagtcagtatgatgtgctggatagagcattagatggcaaattgggcctcagatattattaggcatagttttgccactaatttgtataatgtgcaagtttaataacctttctgggcctacagttctcctcttctgaaatggaaagatgaataggttatctctaaagtctatccagatctaaagatctattttattatagaaaacttttaatcatacacacaaagatagaataaaaataaatggcattatgaatccctgtgtattcattacctgtcctcatatgttatcaatagtaaccccttagtatcttctaatacctagttcatattaaaatttcaattaaagtatctagtccatattaaaatatcatctcagtaataatagtttctagttgctttgttttgttcaaattataatctagacaaggggtgtgtgtgtatgtgcatgtgtgggtgtgtgtgtgtgagagagagagatctagttgtgtttttaagacttatggtcaaaaatacatatcataaaatttcccactttaggctgtacatggtggctcacacctgtaatcccagcactctgggagaccaaggcaggaggattgcttgagcccaggaatttgagaacagcctgagcaatgttgcaaaaccccatccctacaaaaaattatgaaaattagccgggcatgatagtgcgcacttgtagtctgagctactcgggaggctaaggtgagaaaatcacctgagcccaggagtttgatgctgcggtgaactgtgattgcaccactgcactccagcctgggtgatagagtgagcccttgtctcaaaagaaaaatattttttaaccttttaatttattttttagagatagggtctcactgtgtcacccagaactggagtgtagtagtgcatagcatagctcactgtaaccttgaactcctggggctcgagtgatcctcctacttcagcctccagagtagctaggactacaggcacacaccacctcacccagctcattttaaaaattttttgtagagctggggttttgccatgttgcccaggctgttctcaaactcctggcctcaagtgatcctcctatcttggcctcccaaaatgctgggattataggcataagccaccgtgcccagtctatcttaaccatttttaagtgtaaagtacagtaatgttaattgtatgcacattgtgtgcaatagatttcttgtacaaacaccttgcaaaacggaaactctgtagccattgaacagtaattcccctttgcccccttcatacagccccaggcaaccaccattccactctgattccgtgaatttgactattttagatatttcatgtaagtaggatcatggtttatggctggctttttatggctggcttatttcacttcccttaccatgatgtcctcaaggttcatccatcttgtagcatatgacaggatttccttctctcttttttttaggccaagtaatattccattttgtatatataccaccttttttttttttttttttgagatggagtcttgctgtgtcacccaggctggaatgcaatggcgcaatctgagctcactgcaacctctgcctcctggatttgagcaattctcctgcctcagcctccggagtagctgggactacaggtgcgcgcaaccacacctgactaatttttatatctttagtggagacagggtttcaccacattggccaggctggtctcgaactcctgacctcaggtgatccgccttccttggcctcccaaagttctaggattacaggtgtgagccaccgcgcccagccacattttctttatacattcatctgctgatggacatttagattgcttccacttctttgctattttgaataattctgcgatgaatatgggtgtgcaaatatctcatcaacatcttgttttcagatcttttggatatatttccagaagtgagattgctggcatttttaattttttgaggatacttcatagtgttttcatagtggctttgtcatctaacattgtcagcaatagtgcacaagcgtttcaatttctccacatcctcactagcacttgttatttttcggtttttttttttaatagtggtcatcctaatgagtatgcaatatctcattgtggatttgattttcatttccctaatgattagtgatgttgagcatcttttcatatacctgttggccattctgtatcttctttgaaaaatatctattcaagccctttgacaatttttcatttggattctttcgggggtgaggtgttgtggagttccttatatattctgaatattgatcccttattggatatatggtttgtaactattttctctcacttcataagttgcctttttactctgttgtttcctttgctgtgcaatagtttgtaagtttggtagtcccatttgtcttatttttccttttgttgcccatgcttttggtgtcttatctaagaaattattaccaaattcattgctgtgaaacttttttctccagtgttttcttcttggagttgtgtagttttaggttttaaatttaattgtttaattcattttgagtttatttttatatacacaataaggtaagggtctaactttattcttttgcatgtggatatcctgtttttcccaccaccatttctcaaagaaactatcctgtatgcattatcagtactatactttttctttttttttttttttttgagatagattctcactctgttgcccaggctggagtgcagtggtatgatctctgctcactgcaagctccgcctcccaggttcacgccattctcctgcctcagcctcccaagtagctgggactacaagcacctgccaccacgcctggctaattttttcagtttttagtagagactgggtttcaccatgttagccaggatggtctcgatctcctgacctcgtgatccacctgcctcagcctcccaaagttctgggattacaggcttgagccaccatgcctggcctatcagtactatactgttttgattgctgttgctttgtgtaatatgttttgaaatcaggaactctgaggcctctatctttgtttttctttcttgagattgttatggtatttgggggcctttgcagttttatatgaattttagaatttttttctatatctgcaaaaaaatgtcattgggatttgtataggaattgcatgtgcaaaggaatctgtacattcctttcagtagtatggatattttaacagtattaagttccaatccatgaacacaggacgtcttttcatttattggtgtcttctttaatttctttcatcaatgttttgtggttttcaatgtaaaaatcttgtgcctccttggttactcataagtattttattcatttttaatgctattattaatatatttgttttcttaattttctttttgggttgttcattgttagtattttcaaacacaattaattgttttatgtttattttgtgtcctgcaactttgctgaatttatttattcctcctaataggtttttttgtatgtgcagtctctaggctttttatacatacaagattgtgttatctaaagaaataattctacttctctgtttccaacttgtatgcctcctatttcctctttcctttctttctttctttagctgactgctctggatacaacttccagcactactgtgttgggcctggtggtatgctcctgtagtcctacatacttggaaggctaaggcaggagaatcacgagttcaggagttcaaggttacagtgagctgtggtcataccactgcactccagtctgggtgatagagcaagatcccgtcggtaaaaaaaagtggcaaggggggcatccttgctttattcattgtctttgagggaaagctttctgttttttaccatcgagtattatattacccatcggcttttcatatacagtctttattgggttgaggtgatttcctctgtgccttttttttatttaattataaaaagatgttgaattttgccaaatagtttttctgcatcaatagagatgtcatctagttgtgatgtctgataagattcttctttctgtaagtcattttcctcccctccactccattttttagctttcctttggtttgtcagagaagccaggtcttacatttgtctcatataatgttctacaaggttcagtgcttccttttgtagtgttgttcctctatcacctaatttcctaataagacctagaaatgcattgtcgtctggtagctactagctacatgtggctctttacctgtacatttttaaaaattaaagtttaaaattttcagccattgtagccacttatcaagtgctcatatagccaaataggggtagtggctaccatattggatagtgaaaaggaacatttccatcatcgcagaaagtggtctcatataaagaactgatatgacagtgttttttccatactctattttgtctttttccacatgccagctatctcaacaccatttggggctatttttagatgtcataattttagccaatactaatgggtatttattgatatctcattgtggctattttttcatcaatagttttttgtttgttttggggggcagattttgtttgtttgttttcatttttttgagatagggtctcactctgccacccaggctggaagacagtgatgtgatcatggctcaccgcaaccttgaactactgggctcaggtgattctcccacttcaacctcctgagtagctgggactgcaggtgtgcaccaccatgcctaatataaatatatatatatacacacacatacatatacacacagacacacacacacacacacacacacatatagagagagagccactgtgcctggcctaaatagttttattttgaaataattttagatttatagaaatgttctaagatagtaaaaataagttccatgtactcttcacctagcttctcctaatattaacaccttaaataactgtaggatcttcatcaaagctaaattaacattggtacaataccattaactaaactacaggtttattttcccagtttcttaagtaatgtcctttttctgttccaggatctgttggaggatactacttgacatttcattgtcatgttgctctgtcttgccttctcttttgtggccttgacacttatgaagagtagaggtcagatagtttgtaggatatctttcaatttgagtttatctgttgtttccttgtaattagactgaaattatggggttttgagaataccaccactgaggtgattttgctttcccaatgtatcacatcaaggtgtacatagtatcaatctgttactgttagtgtgaaccttgaacatcaagttaaggtggtgtccattgggtttctccattgtctatttgttcctttccatatacagttcattagaaatgaatcactaaatccaccccacacttgggggtgggggggtaaatacaaaatgaatagtgtttagaaacctcatagaggaaggatatagccaccacagtaattaataaatattagtggagagatattatgaaattatgcaaatattctagttttttaaagttttacccactgatttatagcatttattagtggatattgcctataccaattacaactatggtgttctaatggtgattttctatttccctcatttattctatatttaataattcaaattctttaaggaagatttgtctctttgcttccatttttaatattctttaatttttttttcgagatgggttctcactctatatctcaggttggagtgcagtggtgtgatcgtgactcactgctgcctcaaccttctgggctcaagtgatctacctgagtagctaggactataggcatgtgccaccacgcccaattaactaattctttttttaagaggcagggcctcactgtgttaccgagcctagtctcaaatgcctgaactcaagtgatcttccctcctcagcctcccaaagtgctgagatcacatgtgtgacccaccacacctagtctgtattcgttttttacaaattcagtagtcttttcttttctttctttcttttcttttcctttattttctttctttctttttctctccccctttcctctcctttccttcccttcccttccctttctttcctttctttcctttctctcctttctccctcccctcccctcattctctctgtgtcatccaggctggagtgcagtggcgagatcatggctcgctgaaacctcagcatcctgggcttaattgatctcccaccttaggctcccatgtgtgtgggggtgtgtgtgtgtgtttgcatgtgtatgtagatggaatttcactgtgttgcccaggctggtcttgaaccttctaggctcaagcaatcctcacaactcgcccttccaaagtgctggaattacaggcctgagccactacacctggtttgtttccatttttcataaattctgcctggtgcggaggctcacgcctgtaatcccagcactttgggaggctgaggtaggcagatcatgaggtcaggagatcgagaccattctgaccaacatggtgaaaccccgtctctactaaaaatacaaaattaactgggcgtggtggcacgcacctgtaatcccagctacttgggaggctgaagcaggagaatcgcttgaacccgggaggcagaggtttcagtgagccgagttcacgccactgcactccagcttgacaacagagcaagactccatctcaaaaaaacaaaaaacaaagcaaacaaaaaaaaacaaaacaaaaaacccttaattgtcatttatatcaatagggctcatggatatttatttagttctttgggttataatctaaaactgtgtcacttttactactcaaattcgagatttaactattgagagctttgtcacattggcttctgtatcattgtgacagacctgtcatctttttattactttcttactttctggcactacaagatcatctagactttctgtaccccagcttgtttctccaaggatcactggttcactttatcaaagagaaggaccaggcatggtgactcaattctctaatcctaacactttgggatgctgagacagaaggatcacatgaggccaggagtttgagaccagcctggacaatgtagtaagacccccatctcttaaaaaaaaaaattagccaggcatagtgacatgtgcctgagacctagctacttgggaggtttaggcaggagaattgcatgagcccaggaggttgagcctgtgtgagccatgatcatgacactgcactccagcctaggtgacagagcaaggccctgtctctaaacagagaaagagagagaaagagagagcgaagagagaaagagagaaataaaagaagaaaagagagagagggagaaagagaaagaaaagaaagaagagaagagagaaaaaggagggagagggagggagggagggaaggtaggtgggaaggtgtttcaaaaccagcatctgagcactgttttctcgtaagctactggcagtaattgcttctaggttctctcagcagatagaattaggaaatatgcttatgtctgctaactcatgtatacatagacacacattgtatttaatcctgttacctatgtgtgtttataatatatataaaatcgtgagtttataatggtatctcttactctaattcagtaccacagagttcatgctagcatttccctttgacttattttaacttccttctctgatagtgagaaagctggctctgattatttgacatgtatttacttatttatgcaaacctagtatacatataaagtcgtttaaaaattgctggctgggtacagtggctcatgcctgtaatctcagcactttgggaggctgaggcgggcagatcacctgaagtcgggagttcgagagcagccttaccaacatggagaaactgcgtctctaacaaaaatacaaaattagccgggcgtagtgacacatgctgtaatcccagctactcgggaggctgaggcaagagaattgcttgaacctgggaggcagaggttgcagtgagtcaagatcgtgccactgcactccagcctgcgtaacaagagcaaaactccatctcaaaaaaaaaaaaaattgctgaatcatacctctgtgataaaccaatttaccagaatacaatgcttatatatagttctttttgtctttagcactatagtatgtaaaggaaatactgttggctacagttatttagggtcttttcattcccaccactttcagtaagtttatttcatacatatttaatacatttagactaatttatcacagtttgcattccatcttgggttcccttaacatcctaattgatatttttaaattagtatttgctgaaagaaacctaaaatattgctcctttacggtagttggtcccttccacctgccaaccatgggaaaagttaatctgtttttcatctctgtagtttggcattttctagaatgtcacatacatgaaattataaaatatgtagactagtggttctggcttttttttacttagcaaaattcatttaagattcattcttattgtgtgaatcaagtttgtgtttagtatgtaaaatatatagtttaaaccagatattttggggctgatttctgttattgtatggtatgctttctgtactatgaggattttttaatttgtttctatcttttgccatatcctcccactttggtttgtgtgtatgtttcttccaataatttgtgagacttgtatttttattcaagtgaccacatttagatctgtaacttcatgtaacatgattaagatttttttatttaaaaaaaggtcttttgagacatggtctcactttgttgcctaggctggagtacagtggcatgatctcagcttactgcagctgcaacttcccaggcacaagcgatcctcccacctcagcctcccgagtagctgggtttacgggtgcatgccaccaggactggctgttgttttacaatatgtttttagagatagggtttttccatgttgcccaggctggtctcaaactcctaggctcacgtgatctacctgccttagcctcccaaagtactgagattacagtagtgcaccactgcacctagccaagattttttaaaagataataagtattctttttcggggaattcttcattctcttttcctagaagatttttctttcccttagtgtttttaagaatacttagacctcaattacatgatttatcagcttttcaggatctccttgacccctggctataaaagatgaggaaatctttcttaccctcatagtctcacaccttccctctcccaattactctattttgtatatttgttcccgagatttataacatttatattgttctgtaaccaaacatattctcctccctcctgcaaatttttgatcttattcataacagttaaaaggcaataaacagaatcaatgtttatagctaagcctttcataatagtcattttatctcttggtttgctgaggtttgttctggtggtttcttcagaaagtcacatagaaactatatttcccaaattattttatgttctaaattttgtctcttcatttatacttacatggtagtttgaccagatacaaaattaactaggctatctttccttgaggaggtaatagacattgctcttttattatagggttttttggtttgtttgctttaatgagatagggtctcactttgttgtctatgctgatctccaactcctggcttcaaccaattctactgcctcagcctcccaaagcactgggattataggcattagccactatacccagcctatcttagaactgtatttatttatttctagagacagtgtttcattatcactcccaggctagagtgcagtggagccatcacagctcattgcagcctcaacctcctaggattaaatgatcctcctgcctcagcctcctgagtgtcagggactccaggcatgtgccaccacacctagctaatttttaaaaaaaattttcatagagatgagtgtcagtctgttgcccaggcttgtcttgaagtcctggccccaagcagtcctcccaccttggcctcccataatgctgggattaaagacatgagtgaccacacccagcaattctttaaatgatactttgaagaacctgagcacgcacatatatttcttccctctttgttagtaactctcagttccttatctagctttatttttctgtcacctggtgtatatattccttggattatttgtttgctgtcatctccatctatagaatgcaactatcaatagtaaagggatttggtctgatttgttctctgttgaattccaaatagcttgttagtgtttaatacttagcatatagctaatacacatttattgaattaataaggtcagaattcatgattctgccccattctccatccttataagtactttgatgggtttgattgcttacaaaaggattcgtttcacattttgaattcccgtgcctttactcagatatgtcttggtcttcactactgtgtgtcagtgttgtgctctttccaactatatttttctgtgctatttctagaaagttcttccacatgtatctttttttaaaaaatatttttttgagacagggtcttactctgtctcccaggctggagtgcagtggcatgatctctgcccactgcgacctctgcctcctggtctcaagtgatcctcccacctcaacttcccaagtagctggaaccacaggcacgtaccaccacacctatctagtttttgtattttttgtaaagacgtggtttcaccagttgcccaggctggtctcaacacccgggactaagcagagctcacctcggcctccaaaagtgctaggattacaggcatgacccatcgtgcccagcctcacatatctttatattaggattgcagcttctgttttctactattcccactggcctggtttatcattctctatctcttttagccactttgttttttgttggtttttttttttttttcattttttttctccctacccctctcttttagccactttgaattggtttgttttagtgtctctttgccatacagcagagaattttcttttgcttcctgaggcaatctgaatatactttcatgtcaataagctgctgatatatttggcctcaaacctgtcatgttattctataattactaaatatatatgtatactgtttttctgtgtgatttattatctctgctgtttttaaattttttattctggcattttggaaaggtttatatttcttttctagccattagcttttcttttaagtgtgctttttatggtggccttaatccccatttttcttataacattctactctccaatcagttttaaatgatatcctttgattctcacctattatctatacaacagtgattttattctgcatttttctctcacttctttgttttaaaattgtattacttctactttgtcagaatatgcagtgcttacaaactatgttctttccatcctttttaatttataattataattatcttattaaatgtaatgaggtttaccaacaacagtcctgtgtttgagttttcccccaatcatgcttggatgaagcttatcttctaatacatttctcaggaaaggcgtatgtgtacagtatcctctgtgttcttttttttctattactttatactttttcctacacaaagacagcttggctgcatataaaatccttgactttatttcttggaaataatgttctagttttgtcttgctttgtgttttgctcttgaagtctaaggcagcctaattttctttctttctttctttctttttttttttttttaaagagacagagtctcactctgtcacccaggctggagtgcagtgtggtatgatcatactttactacagccttgatctcctcagctcaaacaatcatccaaccacagcctcctgagtagctgggactacaggcatgtgccaccatacctggctaatttgttgttttttgttgtttatttgtttggttggttggttggttttgtttttgtttgttttttgtagagacagggatcctgctatgttgcccaggctgttctcaaactccaagcctcaaatgatcctcccacctcagcctcccaaagttttaggattataggcatgagccaccacacccagtccctagcctaattttcttattcttatttttctaatttcttactcttaattttatctttttgcctgtaggcctgaaaatactgtttcatcattaaggtctaataattttaccaggatgtgtcttagacctttcttgtttggggtcagtttttccaggtatgcaataataagctggaaatatagtttctagcttatagagtaatatggtagctcatgccttgcacatgcttttacaccagcagcacatcttttaaatgtgtagatttaaattttcatctatttctggaaagttttcttagactatattttaaatatactattccattgcgttattttttcctcaaggattctgtgtttatgttggatcttcttttcctgtcttccatttcatctactttctctctttgttatgtctttcttctctcattttcattcttttggttgtttgccttcattttttcagtgtacctttttagattttcactttattaatgtattcagcatggtgcactttgtaatttatttctgggattgttttttccttttattgcatttcttccctgattactttgtcctagtaatgttgaagacatggtcatatattgttttatttgtacttcttgtggcttattgagagaatacgaagataaatttggtttcagattattgccattatcctgaaatagattttgaactgtttttctgtgctactactttgttactctaatttaggaatgccatttatattatcttagattcacttttcctcttgttctgtccttttctcaccaatttattttattacctttgttagttcctatttcattttgcttgctttacacagtcctgacctccattttatttactatatttttatcagtgtttttttctccatttctttgatggttgcatttttctttcacactctcttgagcccagccagtttgtgtttcaccatctgttaatatgtttaattataacttctctatactttagtgtctctgcttaatagggataattgcttcatgaattttgtccatgcatttgcttataattgatgtgtgttccattactatatatttctgttaaatgtcttgtatgtgtcatttactttgctactttttttttcttctgtcctcatacaaattctgttctggttcctttttcatttctcatcttcgaatatggtattttcctacattagctattttacatgaggtttaattaaggaaggggttacacatgtatttcatactatgaagaattgtccatatgatgcacatatgccagttcaattaatggtcttaactcaggacaatacaaatagtacctattgtttcctaccactattcctaagcaccttatatcagattttcttttccttaacccttggagacatctagggaagattcatcgtagtttttagtcactttcagctgttaaggaaattgccctgcttttggttatttaaacaaattttaagtctgttgttaaaaatgtcagtcttaaactgtgtttgtattagtcctttcttgcactactatgaagaaatacctgagactgggtaatttataaagaaaagaagtttagttggtttatggttctgcaggctctacaggaaatgtggctggggaggcctcaggaaactttcaatcatggcagaaggggaagcaggcacatcttacatggctggagcagaaggaagtgagacaagggggagacgctacacactgttaaacaactatagctcattgaaaactcatgcactatcacaagaacagcaaggggaaaaatccaccctcatgatccaatcatctcccaccaggcctctcttgcaacattggggattacaatttgacatgcagcttgggtggggacacagaactaaaccatatcattctgcccctggcttctcccaaatctcatgtctttcctacagtgcaaaatagaatcatcccttcccaacagtcccccaagacttaactcatctcagcattaactcaaaagtccacaatctgaagtctaatcagagacaaggcaatctcttccacctctgagcctgtaaaatacagttagttacttccatgatacaatggagatacaggcattgggtaaatccctgttccaaaagggataaatcagccaaaagagaggggctacaggccccatgcaagtccgaaacccagcagggcagtcattaaatctttaaactccagaataatctttgactctatgtctcacattcaagccacactgatgcaacgagtaggctcccaagggcttgggcagttctgcgtctgttgctctgcagggctcagctcccatgtcagctctcaagggctggcgttgaatgcctgcagcttttccaggtgcatgatgcaagctgtcggtggacctaccattttgaggtctggaggacagtggccctcttctcaccgttccaataggcagtttcccagtggggactctgtatgaggactccaaccccacatttctcctttgcattgccctagtagaggttctccatgagggttcacccctgcagcaaacttctgcctggacatcaggtgtttccatacgtcctccgaaatctaggcagaggctcccaagcctcatctcttgccctctgcatacccacaggctaaacactaggtagaagctgccaaggcttacagcttgcaccctctggagcagtggcctgagatgtatctggggctcttttttccatggctgggacgcagggagcagtatcaaggttgcacagggcagctggtccctgagcctggcctaggaaagcactcttcgcttttatgactctgggctggtgatgggaggggctgctgcaaatgtctctgaaataccttagcagcattttccccactgtctcggctattaacatttggctcatttttacttatgcaaatttctacagccaacttaaattcctgcccagaaaatttctcttttctaccacacggtcaggctgtacattttccaaactttccaaattctgtttcccttttaaatataagttccagtttcagatcatctctttgctcacatatatgagcatatgctgttagaagcagacaggatacatcttgaatgttttgctgcttagatatttcttctcccagataccataaatcatctctctcaagttcaaagttccacatttccctaaagaaggagcacaatgctgctagtctctttgctaaagcatagcaagagtgaccttcactccatttgccaagaagttcctcatctccatctgagacctcctcagtctggacttgactgtccatagcactatcagcatttaggttacaaccatttaacaagtctctaggaagttccaaacttacccgtatcttactatattcttatgagccctccaaactgtttcaacctctgtgtgttacactgttccaacgttgcttccacattttcagtcatctttatagccatgccccagtcgtaggtaccatttttccgtattagtttgttctcgtactgctataaagaactacctgagactgggtaccttagaaagaaaagaggtttaattggctcatagttccgcaggctctacaggacatatggcttgggaggcctcaggaaacttacaatcatggcagaaggggaagcaggcacatcttaaatggctggagcagaaggaagagagacaagagggaggtgctacacactgtttaacatccagatctcattgagaactcgctcattatcacaagaacagcaagagggatatctgccccactaggcccctcttctaacactggggattaaaataaacacgtgattcggatgggaacacaaatctaaacctatcagtgtttacattttttatttttattatttttattacaaagctcagctttccaatatactctgcttataaactgaaatttttaatattatttaaaatgtcaattctccctacagtgagccatagaatcaatgcctttccaaccaaaaaacaagatttttgtgaaactttaccatacatttctatggaaaagcaaaacggcaagaatattcaaactactcctgaagagggacaacaaagtgggatgtagcctaccatatatctgaacattctgtgatttttgtaatatagcagttcgctattaggacagtggtagaccagtgtaatgggacagagaggacagagacagatgccttcatttccataaggaaatggttgattattcaataaatggtgctgcgataattattttttcataacaaaaaagtgaaatcaaatttctgttttatactatacacaaaaatcaatttcaggtgaattatagatctaaatatgaaggtaaaatgacagagcttttggaaggtaacttttgagaatatctgtatgatctcggggtgtggaaaaatttcttaagcaggacacaaaagcataaaggcaaagactaataagttgtaccacattaaaattaagagcctttgtttatcaataggtacctttaaaagattaaaaggcaagccactgagtaggagaagacatgtgtgacacaaataacccagaaagaattaatatccataatatattttcaaaattttagtaatcaatatggaaaagacaacacagaagaaaaatagtcaaaagataccaacaggaaatttaccttagaagaaaatcacatgtgtattgaaggaatgaaaaattgttctacctcatcattaattagggaaatgcattagccgggcatggtggcacatgcctgtattcccagcaattcaggaggctgagacgggagtattgcttgagcccaggatgtcaaggttgcagtgtggtatgatcttaccactgcactccagcctgggtgacagagtgagaccctgtctcaaaataaataaataaataaataaataaataaataaataaataaataatcctttgaaaaataagggaaattcaaatgtaatccacaatgaggtatcattttataccagttgataaaaattttaaagtctaaaaatttcaaatgctgcataaaattagaattactgactcttacacacttgaagatacaaattccctactatccccagaaaatgttattgcttttagacactaattatatccaatatctagaacttagtctaataaactatgaacaaggcctctaccaagaacacttaaaacataattgtgagaacttaaaatgtaaatggaggtgtgttttaaagatgtttatttattagaagactcaatactgtaaagatgcaatatttgtccattttagtctgtaatttcaatgcaattctgattaaaatcctaacaagtaggggtgtatatgagtgtaaattgacaaactcatttttatatgtttttggaaagtcaaaggataataatagccaagaccatcttcaagacaaataagatgggagaatttactggtgatatggttaggctttttctcccatatccccaaatctcatcttgaattgtaatccctataatccccacgtgtcaaaggagagacctggtgggaggtgattggatcatgggggcggtatccttcaggctggtctcatgatagtaagtgagttctcatgagatctgatgatattataagtgtagttgtcttttccacacttgcacgctctctctctctctcgcctgccaccatgtaagacgtgtgtcttccccttctgccataattgtaagtttcctgaggtcactctagccatgtggaactgtgaatcaattaactcttttttctttagaaaatacccagtcttgggcagtactttataaccgtgtgagaacagactaatacaactggatattgagtcatcttataaagttaaaataataagacattgtgacattggtgcagtgataaataatggaacagaataggaaacccaaaaacacaccaacaggtatagttttccattttgattgttcctttcattagatgtttaaaactttataatgaatatgtacttttagtcaaaatttatttacttgagaagcaaagtgatgtatggattatggcctctgaggctataatgtgagtttgacccaaataatgatccaaatgtgagttccagtcccagttttgtcctatactactagctgtttgagcgtattcaactggtctgtggttcttagtttttttatctttaacacaagataataaaattacctctcagaattatggtgagaatttgacataacaagtataatcctgctggcacatgctgttcccttgatgaggggaatttgttattatgtttcttaggaacacaaaacttctgtttattcttggtaagaattcatgtttcccagatctatgtgtactatttgttatatttaaggttatcaaattgtatccttggtaatggttgccactggatcttttttggaatatgtacaactccttattcaaagtggctttctaatcatgattagttttttgtagttttggaagagccatattactgccctgcattcataaagcagtcttgtaaacactgattatgatagtgttttgaaaaattaaaagcctccaaaatcactaatttttaaaaaataatgcagttaaatatagaaaaggattagccatagatattttgtagttaaccctattatcattaacctaagtgaatagaacctaatttttgtacttgctaataattgctattaagaattttgttaatcgtgtgtggattggtgcttgagttcagaatgaatgattgataggggacaactctaagaaatacagcacttacattaatgttttattaaacagaaaaagctttaatgttttattaaacagattttaagagttacagtcttaaaatctttattatttattttatgaaatatttcattttgttttttttctgggcactttaaaattgagatgaggatggtagaatttgccagtttattttttggctattttttttttaacccatcttattttgagaacgaatttagtaatatttttctcaacatcctgaaattgtgtaacctgtagaaacttcccactgtctttttaaacttattcttaaataccacatttaatataggataaataagtcacaaagcttgcttatcaaaacagaatattgtattcagctttccatcggagcttttggggaagacatcacagtattgtactgtctcccaagatgcaaagtatcaggctttaaataatgaaaataagggaaatgccaatagaaaattagaaaaaatgttagaacagttaaaaacagcatactgaagcctgcattatttggcttatctaaaaatcatatgttttcaaccaatcagtacttatagtcattctatttaatcttttaagaaggagacataatccaccctcaccaagtgattcagtgtagcatcctaactaataatgacttaatgtgtgtccaaatggcatgtaatgagaagtatgaaacattgtctgtatactttcttgcctaagatacttaactgagtctaatcataaagttcagacatatcttcactgtggaacatttctacaagacaacggcctggactcttcaaaaatgccactgtcatgaaagacagtaaggagaatggaaggagactttcagattaagggagactaaagagacttaagcaaatgtagtattagatccttgactatatattagataatactacatcactgccacattttgtgcttatataggaaaatctccttggtcagtatgtatcataatagggtcataatgtctgcaacttattttccagtggtttgaggggaaaaaagacgtgtgtgtgtgtgtgtgtgtgtgtgtgtgtgtaaagaatatgttctaattgatacatatacgtaaatagcataggagtgttcatttgtactactctcaattttttctataggcttggtttcaagatgaaatttgaaaaaccttaagggaaaatatgtttaaagtatgataataacaaattagcacactagataaactttttatagcttttgtgagtttttttccttcagaaaatcatatttatgtagatagcaggattaaagaaaacttttctaaatttcagatgtcagaaatggagacatctaaattgtttttccatttcatctctaaatgctaatgaaaactggacttttacgacattaaagacatttaattgatctctgtgggatttcatgtttagcttttttcaacagctatatattgaacatttaggtgatgagattgagtagctaatcttagaggcgctctattgagattgtccagattccaaccctgatcccacaacttaccacctttgtgatcttggacaagtaatttgagatatctgtgcctcattctcctcaaatattcaacaggataataataatacataccagtttcttaggattgtagtaatgcttaaatgaattaatatatttggagcacttaggaaagagccaagtacatagtaattttctaaaaattatacctacttattatgtggatctttgctgaggaaatatgagtaagcatacaagactggacaggctttgagtagtgaagatgttttactcacaagcaaggtaattatgccttttatattaaaagaaagttcatatggaacactctgcttatatgcttcatcttcttttcaatcagataataagttctccaatgtagaagggaaatgtcagcctcacacataaaaatatacctgtcagagattatataagtgtcaaaataatactatctagagaaattcaggacatttggataaataaaggaatgtcatgtagtttggatagaacatagagaagtgaggaaaggagacattcccagatagaataacagctcaatgacttgaacaaggatacagatgcatgtagtatacacagtggactagaccatttatgtgtgtatgtacatatgtgaaaaaaagtctttgaaatgtttgcatttcaattaaattctgattttaagaacttattttccccctgtatcctgtgtgtgctagcattctgtttcctaaggcattctttcagacagacatacctagtcctgaaaatgctgctattattgttccagatacaaagcaggatgtcataattttttttttttactattccaactggaataatatggctcaacttaagttctgtacaaaactacttaatgataactcacaaaattaaaccaatttatattttctgcagttaaaatagaatgcacagatttttaaagacctaggacacattattatatctagttcctgaaatcattaaatgtccatggggaagaaaaaaacttgtgtaagtaggaataatataattggatttgcaatgctctcttaagagattctttaaaatcatgtgaaataagtagagtttctatgattttttaaaaatcacaaatagcatatatccgttttatctttaatagtgtttgagcccatcatttgaaagcattggagcatgtaaccaatatttctgaaaatgaaccatggttccagtcataatctatatgctttaaaattccttccctttattctttcttcccaaatccatgacatctgaatttcaataaggaagaaaataagcatgtttttaaaatgttttagaaaagattttcaaaattagattaaaatgtttgaggaaataaaaacttctttatgtattcattgtgatactgatttttatcaatgtctttttgtaaaaatacctatatactaactttgaataggtccaacatatggtaatgtgttatgcaattaatgataatgtagaacgatgttaaacccacagaatattgccaaggatttaccaacaaccaaaaatgtaattatatagaagaaaagtgtagttacaaatgcagtcttttgtctttttacattctctatatgtagagggtaacagaaatactgtatcactttttagtatatgttctcccagaataagttgccacaattagaacagagtttaggagcctatattaagctttactagttatggttatttccatagtgctagtaaataagagaaaaaaactttttgaacccatgtctcattgtaggtctcctaaaggaaagtggcccaaagtccaaatacttcaataccgttcgtctctgcctgataacaaagtgttttgtttttgtttttaccctcggacaagccagtcagctgatctttgtcctaatttgttcctggtagaattgaacaagatgtttgcagaagcttcctctagtttgaaaattgtattgattttttttccccatagtaactcacagatggcttctcaggttggaaataatggtgtccatgtttaggtaccacgtgttagatcagatttgtactcatggatctgtgattattttaactttttcttgttatttataaaaataattatgtacttctctctggggtttaatgtgtctttttattctcaaaaaatgtagtacattgatcagccacctaaaatactagccctatagaattctaatagttaggttttatatacagccatttgtcgattaaatattaaataccggatcagcttaaaatggacacacaaaaaaacactaccacataagctatacagtgccttttttcacagtgtcttataggtggaagatactcagtgagtgtttgttgagtgaataaaggatcttcacttggtgcatcccatttccttacaatttattattttttattttactttactttgagtcaggatctcactaggttgcccaagctggacttgaacttttagatccaagcaatcctcctgcgtcagcctctcaagcagctgggactacagggatatgtcactatgttcggctttaatttttattttattatgaaagttttcaagtagcaaaagcgatgtaatgaaccccatctacccattactgagattcaataattactaagattttgccacacttgctttatctagtctttaaagaaatttctccactgaatgatttactttaaaatacttgacctcctggccttttactctgtattttaaagaaagctgtagtaatttgtgacataaaccaatagagagcagctaaattttgttatatcttcatagcaattgactatattttggtttgtcttaccaataatttgatgaatgacctttcattttcaatttatctttggtaactaagtagataagtgggagtgtaggtttacttatttaaattctttgaatttgtgtgtgtgtgttgctttcccccccgatagaaactataaatggtagtgttattgtggttaggagtatggggctatggagttggggaaaacatgtatgaatctcagttctactactttaccttttgaatgtgggcaagacaagtctcagagttgttttagtttttttaattttaactttgaaataattgtagaaaaatagcaaaactagtttaatgaattcccatatgttaatatttaccacagctattgtatgtatgtatgtagagtttttttcctgagtcgtttgagagtaagttgcaaaaataatgcctctttaacctctaaatacttgaggtgtggttagtaaaaattcacgttttgttacataaccacagtatatttatccaaaacaggaaattaacatggataaagtattactgtcttatctagagatcttattcaaattttttcagttataccactaatacccttcatggcaaaagaaaaattattttattcttaggttgaatccaagatcacatgttacatttagttgtcatctctagaaactgctggtagtcctagctatttgggaggctgaggagggaggatcacttgagcccaagagttcgagtctgacctgggcaacataataagactctgtctcttaaaaaaaagaaagaaaagaaaagagacagaagaagaaaacagaataagctcatggactgttataaaggcaataaatgtgacataaaggatgctaaccaaaacagataaatagtaaaaggttaaataacagaggacttagctatttgcaagtactgacaaattttcatgattgggcaatgaatgatgtgacgttaacacatctgactttatctttcatgactttgatatttttgaaaagtataggctgcttattttgtagaatgtaccttaagttttttttatgtttccttatgattagatttaggttatgccttttcataaaatactatggatatgacctatccttcatgtaccatattaggaggtacatgatacctgttttatcctattgctgatgatgttaccctttgatcataacattatattttcaaatttctctaccataaagttaccattttccttttgtaatggatctcttgtgggaagatactctgagagtacctaactatcctatttctcattacatgttcacatgctagttttgacatccattcttcctagagacagttattactatggagattgccaaataatgatttgtttttcattccatcattttttctgcatttgttagttggctttcagcttcaatttttatatctgtaaaatgaacctaattgatgtaaaattggttaataacacccaaatcatgtagggtataagataatgcattttattttattttattttactttactgagacagagtctcagtctgtcacccaggctggagtgcagtgagtgacatgattatggctcattgcagccttgaactcctgggatcaagtgatcctcccacctcaggcctccctagtagttgagaccacaggtgtgcaccaacacacccagcatgtatgtgtgtgtgtgtgtatatacatatatatgtatatccacacatacatacatacacacatctttacatatatagacctcatctatatatatatatatatctcatctatatagaagagatatatatagagagatatatagatatagagagagatatagatatatagatatagatatagatatagatagacatagatatatatctcatctgtatatatatagatgaggtctccatatgttgcccaggttggtctcgaaatcctgggctcaagtgatccacccacctcagcctcccaaataatacattgatttgggacaattcttagcacataactctttaaaatattagatattataatttttattatgctagtatctacttttcagttgaagaaatagatcattttaaagatctttgaaaggtcataggaaatgttaaaaatatcaggtattttatgtgtacctaccatgaatgttttacctcatctttggtaaggtcagaagtgagatgatgtaacagccatcatatgtatgtgtattttttttattgacctgagacagtttttggttatttaatgcagaaaatatatttgcagtgtacttcatatgatatgcagtactttaaatacttgttgtaatgtggtcatttaataggagagaaacttagagacatggtaaattaagttttgatttagtatactgaatgatgaaatagaattatttatggtcattttaattctttaaaagtttttaaattagtattttaaaataatatatgtacacagtttactgattttgtccttaagggtatactgtggaaaagagcaataccctgccctgtactttgacagcccttttagctatttcttcttttacctacctccatatttttaatcacctcacctatccaggttagatattatgtacttaccaacttcctactatgataagataaatatttgtctctcttatatacatacattctgtcctctcctcctctccagttctccagtagagtttttgataaatcagttttcagcataaataatattatacagatgtatgtattatttatttctgagacaaattatattctatggtgttttacaacttttagtttctcctagagtttagaattcccttatctttttgtttccttaggtttctttatacctgtggtgacttccatacacatatcttccaatagcttctcacatttattttgtgcatagttaaaaatgtgagttttaatttgtaaaggtaattataaatcatgtgctctgaaagctttgtttttcttatttttttctttctctctctttttttgtttttgagatatagtctcactctgttgcccaggctggagtgcagtggcatgatctcagctcactgcaacctctgcctcccgggctcaagcgattctcctgcctcagcctcccaaatagctaggattacaggggtgagccaccacacccggccaagttcttttgatggctcacatccttcattaactttctgagaaaaaatacaagggagataaatattttgagaaccaaagtgtctcaaagtatctctgtttactcactctggattaatatatgggctccatgtggaattctagtgagaaaatttattttctttagactcttgaaaccattgctctattatattctaaacttacatattgtttttgagaggtctggttcttttttttcctaagcctttatatatgatctgccttttctctagaagcatttatgatctgtctctggttttctaaagtttcatgataaataataatgatgtagatctcttcattaattcattatattaatacattattccctataaatttagacaataagtcagttctgtgaatttttaaatgaaattttacttcctgggttgatcctctatttttcattttttctttctttttgatttttttttccttttttttctctttcattgaagttgagctttttgcatactcttctcaagtgtctggtaatgctggtagtgcatttatatttaagagtgatgcactagacaatgtacaaaatgagacctttcaacttccttagggtatttgagtaaaagacagctttttcataggggaagtaatttacatgcaccttctccagggctatttaatttctccaaggaaaaatggattctctaattttctttttgggtgaacttaagcctaagtactggtcaggaaaagggtcagaagggctatttggtatgtaagtgttcacataaccagcccagcctgttcttagttcagcacttcacccatttccctatcttcctttgtgcttggagttcctgagtctgaagcctttccagttctttcctagcctaccttccctccattattctgcagaggtaggaaaaggacacttgtcaggctatatgaggtgggaatggggtctgaaagttctgctgttaattatctccctattttcagctctactagttacctggtaccaccattttctgaattttccaaggtttggagggtgaatcagcttgatttttgttggaatctcctcttagtaggcttttatactttagctttcttccccctgctaatctaattaccttttctccatatactgtctgacctcagaaattgtaatccaggattatcagtatcttctagtttttttactaatatggttagttgtaatttttcattattgtcttgagatgatttttgataggagaatgtgcagaaatgtttatattttggcatcagaaatatcacctttggagggggcgagggggtcttacctaggctggagtgcagtaatgcagtcacagctcacttcagcctctacctcctgggctcaagcaatcctcctgcctcagcctttcaagtaacttggactacaggcatgtgccactgctatggttttgctctgtgtccccacccaaatctcaccttgaattgtaataatctccacatgtcaagggtgggaccaggtggaggtaattgaatcatgggggtggtttcctccatgctgttctcatgataattaatgaatctcacaagatcagatggtttaataagcatctggcatttccgctgcttgcattcattctctctcctgccaccttgtgaagaggtaccttccgccatgattgtaagtttcctgaggcttccagccatgctgaaccatgagttgattaaacttcttttctttataaattacccagtctcaggtattccttcacagcagtgtgagaatggacgaatacagccaccatgccacactatgtttttaatttttttgtagacacagaatcttgctgtgttgcccaggctggtctcaaactccttggctcaagtgatcctcttgcttccacctcccatagtgctaggattataggcgtgaaccaccatgcctagccagaaatactgtcttaaaatcaactctgcataattcactgacccatcattaaaatttgtcagtacttaaaaatagctaagtcctctattattttatttaaccttttactgtgtagtttatttgttttggttggtatcatttaagcctcatttattgcctttacagcagtccaaacagaacctattctgttttctttctcctcctctctcattttttttctcttttttaagagacagagtcttacagtgttgcccaggttggactcaaatgcttgggctaaagtgatcctccctgctcagcctcccaagtagcagagactacagggactacgggcgccaccttgcctagctccccctctctcttatcttctttaccctagttaaattatttctgctttgtcccaaaaaataatatttgtacattactctccacatggctttatggtggagtaagggtgatgcttgagtgtaagaagttttacactgggatgtggtacttttccttttttcacttatagttgttttgaagtttgggcattctttttgtcttcaaattgtgctgaaggcatggtgtttttgtagatttatttttctgtccttgttctatattcttttggagagaaacagggcttaggtggcaaccattgcttcagctgtctggaattcctcaatttattttaactttatataccatcttttctcccacctctctcttcattataagcagactcattcattcacagtatgtttagtgagtgctatgtgccaggcatggttctagggatatggtaatgaacaaatgtctttgccctcataaatattatattctggtggtagagacaaagaataaaacaaaaaagtgaatatatactataatgttaggtagtgattaatgctatgttttaaaaaaataaacaagatgagtgcagtggtacactcctgtagtcccagctgcttgggaggcagagacaggatggtcacttgagcccaggagtttgagtagccactgcacgtcagcctgagcaataaaacaagactgtgtctctaaaagtatagatatatcaatcaagaacctggggaagttctagtgctacctacaagagttgaggaagaccttttcttttttttttttcttttttttgagacggagtctcactctgtcacccaggccggagtgcaatggcccgatctcggctcactgcaagctccgcctcccgggttcatgccattctcctgcctcagcctccccagtagctgggactacaggcacctgccaccacgcccggctaattttttgtatttttagtagggatgggatttcaccgtgttagccaggatggtgttgatctcctgacctcatgatccacttgcctcagcctcccaaagtgctggaattacaggcatgagccactgcgcctggccaaggaagacctctttgaaaaagtgttacattagcaaattttgttttgttatagaatagtaagtacatctttttatattagcatttaccttatgtaaatcattaagattttaccactgatcaggtttccatgataaattgtttaattttaaaacttctgtagtagaatgggcatgtggtgttatggaattcataccaaataagaagaattttacagaaagtaaaaccataagctgtctactattcaactcttctcattctgctttagagaactgctattgataaaagattatttgagaaacatataatctatccttttctctaataactctacactttattttttatttttattatactttaagttttagggtacatgtgcacaacgtgcaggttagttacatatgtatacatgtgccatattggtgtgctgcacccattaacttgtcatttaacattaggtttatctcctaatgctatccctctccccttcccccagcccacaacaggccttgtgtgtgttgttccccttcctgtgtccatgtgttctcattgttcaattcccacctatgagtgagaacatgtacactattcacaatagcaaagacttggaaccaacccaaatgtccaacaatgatagactggattaagaaaatgtggcacatatacaccatggaatactatgcagccataaaaaatgatgtgttcatgtcctttgtagggacatggatgaagctggaaaccatcattctcagtaaactatcacaaggacaaaaaactctacattttatgcttggactatcagaaaaactgtttacttgaaaacagtttacagaaaaactctttaccctgacatgtattgatttgttgctttgtgttttttgagacagggtcccactctgtcacccaggctggattgcagtggtatgatcatagctcactgcaacctcaaactctggggctcaagcaatcctcctacctcagcctccctagtagttgggactacaggcgtgtgccatcacacctggctaaattctgagttgttttttatattgaagccttaatctttcattgaggaataccacaataaacagactgagcttgctgttgagaagttgttgaggacaacatagtcttctgtattaatgtttaacatattaaagaccctatgaaaagtttattttagaatcacgtgtttcttataagaaagtgacatttttggccgggcacaatggctcacgcctgtaatcccagcactttgggaggccgaggcgggtggatcacgaggtcaggagatcgagaccatcctggctgaagcggtgaaaccccatctctactaaaaatacaaaaaattagccaggcgtggtggcgggcgcctgtagtcccagctgctcaggaggctgaggcaggagaatggcgtgaacccgggaggcggagcttgcagtgagcagagatcgcgccactgcactccagcctgggcgacagagcgagactccatctcaaaaaaaaaaaagtgacatttttatctcttcaagcatgaaaagtagataactaggcatgtcttactttttgctttcactgtcaagaaattggaaacaaattcagagctaattcaagacgcctctgccatgtatttctttttctccccaatcttatactgttctgttttctctgatcattttttttaggttgtctcactaattatggaacaatggcagggatgtgtatgaaagagtgagcaggtagataagtcaatagatgaatgctgttgcctcctcaaatcattagttgtatgagcttgggtgagttaaacaacctttctgcactgttaatttcatctgcaaaatgagaggattaatagatcaaatatttgtagctgcagaactctgttttcatgggaaataatttggaagcccgaaatagaagccaagtagtagcagaactgttgtgtcaggccagtgccatagtggccgggaaactaagcctcattttttatccagatcatattagaactgcctcttggaacaaagaaacactacctctagtgtttctgcaatacagtgttctgtattacagccttgactactctactttttcccccactccagtcaagttttacattttgtagtaggcctcctttttgccatcttcgtgaagattctgaattttcctggatggataaaaatcataaggataataaatggatatttcagtgtttttttagtcagtggtttgcaaaaccacctggagggcttgggaaaacacaggttgctgtgtcctacccacacaggtttctgattcagtaagtctggggtatgaccaagatattgcattttgagcaactttccgagtgattcagaaattatactttgagaactactatcctatgtgagtattaaaaatgtattttagtcacttttcttattttaaaaattacatcaaatcatataacttcataaagctcagaaaacaatgtctgagtaatatatggtttttgaaaaataacatttaagtgacatattccgatgtcatggagcaagtgagaaactggtttgaaatgtttgctatctagtgtcaagggctatctatccctttttgacttcttgtgctactggtgcaaatggatagatattaatcctgcagcaatcaggatttgcttcagcaataaagaaattattgatgtctgaaagcaatcctttccttttgacatgttggcagcacctaagaagaaaatgtcagggtcaatataagtgcatttactgacagtttggctctttcctatgttacagaaaatgatttcacatttagcttttatcaaaaacagaaacactgaccactctgaaggatataaacaatagctttcagcttagtcattttccacttataaagtgatactttcatagaaataaacaatgcaaacttcagagagccaaaacaattacacagaaaaaaatcattgcatttttgccatttttaactcagatttaaaacaactgtgtctggtagtaactggagaaaaatcactgttttgtgttctgttaagttaaaacagttaaaatcactttatgataaaatatggccaaaaagaagaatcatcttcaattaggtacttcaagatcacttgtattctctgcttctctttcagagcctgatccatgtatttcttaaacttcttcatcatatataaaatttcgtgtttataaaatttccactaaaacctcaattattagtttcatgaatcagaagttacaattagtttcatttctggctcaccaagatttgtcaatttctggataaaagggactccctattcagaatatccctttaaatcttttttaaaagtgcacctttgatgtgtacatgtttttatgttatttatggcttctgaaaatattatgcaaaaaaattgttatggaaacaacccaaatgtccacaagcaggaagatacattgtgatagatccatacaatggaatatcattcgttcataaaaaagaataaagtactgatgcatgatagaatgtgagtgaacctcaatatcaagaaaatggacgaagccagacataaaggatcacatattgtatgattccatttatatgaagtatccataataggtaaatccacagaaacaaaagcagattggtagttgccagggacttgtggggagtgaggaatggggaataactttttaatgggaagatagggtttcttcttggggtgctaaaaatgttgagaagtagatagaggtcatggttgcacaacactgtgaatataattttatgtgaattttacctcaattttttaaagaaatcagttgatttaagacttaactgaattctagaatttttgaaatgaaggtgtttctcaaggtcatccaacccaatctcctgtttttcacaaatgaaaaaactaaaactcatcaagattaaatactatatatcactaagattgcctagtagctagtccaaacccaggccagaatttgagtatctggatttttagcccagtgatttctttttaaactactgcatgctgctttattatcaattgctattttttttaaatttttttctgggaacatactacaagtgttagtttaaaagtaaactaacataaaagtaaatacaaaaagaagcatagcttcctttgtgccacatataagaaatgtagacatagagagtgtttattgcagtaatttgccaaaaagcaagccatagtttaaattagaagaggtttattccctgcagcactttcacaatcacagaaggcacctatattttaaatgtagtctacattggcctggcttatgaactgcaaccttctatgattgcaattcacttttttaaattaaaaaaaatttcaaaataatttttgcataattattagcacattctaccacttgataattttttgtttctttcaatagacgaaagcactcacattgtaaaaaaattatataaatgaccttgtcttgtgatgaagctagaagatctgttttcaacgaaactattctcagaggcatctagggagaaacatttgagtcaggttgggagttagagatagaaagcagcagcaattaaagcaagataatgtattaccccctggaaattgggtgttatactcaaatgtaaaggacttgtattgatttagtgctagcctcagaaaatagtcagatgtcctcattttaagggaaaactttaggaaatgtaattatatcgtttctttctctctaaatctgccttagttttcaatttctttatgtagttcgttactaagaggaagctacactctcattaccacactaaatggattttctattaatatttatctccaatgttatttttatctgggttgttgttttcatttctacttagtatgtattttcttctttccttttagttcagaggtcaacaaagtatggcctatgagccatacgctacaatagcagagttgagtggttgcaacagataccatgtggcctgcaaacctaaaatatttattggggcattttacagaaaacacttgccagtccttgctttagttgaccaagtagaaaaggaagagcagattctacagagtgaataaatatcaccagcaaaggaaaggatatagaaaggtacaggatttatacttaggctagctagaaactccatatggtcaaagtaagagttttgtggatgtgagtcatcagagattatataggaaagatagattactgtcagatttagaggatttttaatgccacttcaggaacttgagctactattgtttaggaaatgagtcatttaaggttttttgaacaaaggagctttgccagagcaggaaagtgttgcagtagggtttacaaagtaatgagagttatcaactaaagttatattaataggaaggatgacatagttccaggagttgctgtataattaaaattgataggaccttagacactgcattttgagacaaagagataatagtttaaagattaaaacttcattgggcagaaaaattattatttatacacatattagggaagtaaagagctaatttttgtggaaggtttaagttgatggagaaggattataacactacataggataagaaacaaaactgattactagttatcagcattactgaagttgttcactcatcccaggcacaggcaattttttactcgccatattttatctccagggcacccagctgccatcatcttgtcagggtccatctctttataaaatcctcttactttgctctccagaatcccaccctgatacacagatttacttacgctacctcatacagaataaagtacttccattttccaagtactctgaaccatgctcaagaagggctttagctctctcaaataaaaagacttatctcaaggtgtttaattcaagtagagccacagttccgaaactgtgcactgacaccccagggtactgcagcagactcacaagagtgctacaggatattttatatcggtttcaaaattaaattttgctacattccttttggatgatgtctttttaaaaaataattactgttgttgttttttttttaatatgtacctcctgaaaaatcaatgcagaatgggaaatgaaggtagcagtatccacttggaatacaaggcttgaagagtgtgcagtattccataagcatacatattcatttagtaaatacagttaacccttgaacagtgccgggggttagaggcactcccctcccccgggtagttgaaaatccatgtataacttttgactccccagaaactttactaagagcctactgttgaccagaagccttacctgtaacattaatcattgatgaacatgtattttgtatattatatgtattatacagtgtatttttgtaacacagtaagctagagaaaagaaaatcataaggaaaatatattcattgatatggtttggctctgcttccccactcaaatctcatctcgaattttaatccccataatctccacatgttaagggagggacctgttaggaggtcattagatcatgggggccatttcccccatgctgttcttgtgatagtgagttctcgtggaacctgttagttttataagtgtttgacagttcctctctcatgtgccctctctcgcctgctgccatgtatgacatgcctgcttccccttctgccatgattgtgtttcctgaggcctccccagccatgcagaactgtgagtcaattaaacctcttttctttataaattagtcagtcttgggcagttctttataggagtgtgaaaacggactaatacatttattgttcattaagtggaggtggatcatcataaacatcttcatcctagtagtcttcacactgagcaggctgaagaggagggtggggaagagctggtcttcctgtctcaggggtagcaggggtggaaatgatgaaggaggtggaaaggatggcagaagaggtaggcatactcagtgtaactttacagaaatacgttgtaatttctgtcttatttttcatttccctaaaaatgttactctaaaaatgtttctatatggcacctatccttccaccttttgcttttggttcagtgcccatatcatagaagggtccatgttgtaaaagaagtcaaaagcagtcttttgaataactggaatcattctgttatatggtctaatatgaatttgtttctggcactacttattctacatcttctttctcatcatctggcactgatttggaagcactcatctccatcaagtcatcttctgttaattcctgtgatatggtgtctgttagctcttgaattactccaagatccgtatcttgaaactcttcaacttccccccacttttttttttttttttttgccatatccacagtctcttttatgatatccttgattgactctgttgtaaatcctatgaagtcatatacaccattggacacagtttttctctagcatcaatttatttttttgggcttgatggctttcatggctacttttgtaacaatggcgttttccatgatttgattctttcagatatccttggtgttctctaagttgaggtctacttccatagcattgacaatcttttctatagattaccatgtgtaatgatctttaaaggtccttatgaccccctaatctagatctgaattagagatattgtgtttgatggcaagtagaccactttgacacctttgttgttgaactcctggtgtgggtgacccggggcattgttcaatatctaaagaaatttaaaagacagttccttactgacaaggtacttctttgtcagcagaagttacttctcctcttatccattttttgaagccaaacctctttctaaaaatgtcaagccatcctttgctgacattaaattctccagctttaaatccttcaccttccttttgctttaagttgtcatataatgacttcaagtcttactagagtatgcctttcttatagcaattctgtactcacattgtattttaaatataagataaaaagatattttacagaaacttcaaggttttcatgcctgctgtcgtagctgcagtgatggctccacaaagtcctcccccaaccacaatggtccttacactggattcatctatcttgaaatggtgggcaaccacagctgcagacctcaatctacggtacatatcaagcaagtcagcttttttttgtaatgatttttctctgcttcttgggagcacttccagcatcactagtgacatttcatatgggtcccatggtgatgttcaagatttacagtattgcactaaacatgatgaaaaataattcaagaaccatgagagatcactttttattgcaatatgcaatttactgtaagatgtagggttcactcagagatgattagcatcagatgtcattttcaatggatacaacacttgagctcactgcaaaagcaacaggtggtagttacaacgttgttacaatagtacagtatttactgcagttcattttatgcagttaggatttaatactgaatttttacatttgtttacatttctcttgactcaaatgctgccgtgtatggtctgtaagtgtttgcctgtgtaagttttgatagattttaactttttataatacatttttatagttttatgatagtgataaaatagtatctacatatactttatgagttcatgacatacttaacaatttttatcaatatttctaggctacacagtttgtctgtagagtatttcaaactatcacaaatttccaaaaaattttctgatatacttcttgaaaaaatttttacacacaagtggatccatgcagttcaaacccaagttgtacaagggtcaactgtattgtagttattttttaatgagattttaaaaacttttttcaatttatatgtatttttcttaactgagtattaaattctgaagctagtacttattaaattgtttggacttaacattaaacaggactgttaggcatttgttagcataccatgaaaaaatgaaaaaaataacaaaaacactaaaaacactgtaaactgggaaagtttcagattctctgaatttgagagagttgttcaactctaaaatgaatgcattcttccataagcatgtgaaaaggcagcagtctttcttttttctctttttttcaaaattgctttctagactgggcacagtggctcacacttgtaatcccagcattttgggaggctgaggtggacagatcgcttgagcccaggagtttgagaccagcctgggcaacatggtaaaaccccatctctacaaaacatccaaaaattaaccaggtgtggtggtgcacacctgtagtctcagcttctgtggaggctgtgaggtgggagaatcgcttgagcccaggaggcagaggttgcagtgagccgagatcgtgccactccactccagcctggtgacagtgaaatcccctctcaaaaaaaaacaaaaaaacaaatttgaaaacacattctagtgacatgggattttgtgtagcatcttaacaaaaatgtaatcacatatttaaaaattttctgtgctttttgctgtatcaaacaaaaaaagtaagaagtgctcttccctttaaggttatggtcaggtcagagtggtaagacaaatacaagttgcttatatcattaagtaaaataaaataattaccctcatttatttcataatatcacatattatgggcattcaaagaagaatgtgtacatctgttagtgggaatgaagaaagaatttgttagattttaaatgggcattgacatgttggtaaattctaacatgtagaggtagtggacatttcagatagaaggaaaaacataaaaactcaagatttattttgggagaagcaaattattctatatgactgaagcaaggacatatgttatgaagtaatgtagattacagctggtttactataagttggagtactatcgtggagcactttgaatgctggggtgtgaggcatttggattcaatttactaggaaaagaagagtgattagggtgattaatctgtcagcaagatataggatgattaaatcaaggagagaaaggaggcagggatagctttttaaaagggaatgatggattttgctttatgtatatgtatttcaaaggaaacaccaaactgttgatctttaaagagcatacttttgttcagcactgtaactaacagttgtaacataaaactcacttttctgatgggaggcagaagactttctaactttcttgttatttctagaggaataatatcaatacaatgtaaatatgtatggaatgcatactataggccaagaactatattaagcatttatttaattctcacaacccttgagagacattattattcccattttacaggtgagaacagtaaagcctagtaaagttaatgttgtccagagtcacatagttaataagtagacagattagcaaaaatttttaaaataagtttactagttggtttaaactaaggagaattgagttaattctccttgggtcttatcaaattatcttcatctgacttaggcatagtttctctctttttttatttttcatatcactcctgatctcttcccaccatgggtactcttaatgtgtttgatatggctcttacatttggatgtgtcctttaagactgtattgtgttattttagatgcatgcatatgtgtttaaattatacataatatataaaagggtaaattatagcttgtctgatttgatatatatgtttctactctattgcttttatatttttattttataagaaacacacatttttattttataagaaacaaggtcttgctattaatatgttaccaagaccagaatgcagtagttattcacaggtgtgatcattgtgcagatagccttgaactcctggcctcaccctatcctcccacttgagcctcctaaatagctggaactacaggtgcatgcagctgggcctggcttagtttactgcttttttaaaaataatttacaaataataattgtacatattcatggaatacattatgatttttttttttttttgagacggagtctcactctgtcgccaggttggagtgcagtggcgcgatctcgcctcactgcaacctccaccccctgggttcaagcgattctcctgcctcagcttcctgagtagctgggactacaggtgtgcaccaccatacctagctaatgtttgtatttttagtagagatggggtttcaccatgttggccgggatgatctcgatctcttgacctcttcatatgcctgcctcagcctcccaaagtgctgggattacaggcgtaagccaccgtgcccggcccataatgatgttttgatacctgtaatgtatagtaatcagacagggataaatagcatatccatcatctcaaacatttatcatttctttgtgttaagaacatttaatatcctccatctacctatttaaactatttaatatatttttgttaactaaatagtcatcctgcagaggtatagaattctataacttactcttatctagttgtaattttggtatcctttaacaaatttttccctatccttcctttccccctactttcccagcctccaatatcctctgttctaccttttacttctataagatcaacttttttttatcttctacttatgagtgaaaacataccatgtttaactttctgttcctaacatttcacttaacataatgtcctccagttttatctatgttgccatgaaccacaggattttatgcttttttatggctgaatggtttttctttgtgtatacattacacattttctttatccattcatttgttgttggacacctaggtttgttccatatcttggctattgtggatagtgctgcaataagcataggggtacacatgtcccttaaatataatgatttccattcctttggataaattcctagtagtaggattgctggatcatgtagtagttctacttgtggtttttaggaaactccaactattctccatagtggctattcccaccaacaatgtattaagagttcccttttctccatcctcaccaacatttttttttctttttgataatagccatcctaactggggtgagatgatacctcattgtggttttgatctgcatttctctgatgattagtgatgttgggcactttttcatatatttgttggccatttgtatctcttttgagaaatgtctgttcagatcatttacctattttttaataagattggttttttgctattgagatgtttgagttccttgtatattcttagtattaatcccctatctgatgttatgaatagtttgcaaatattttttcccattctgtaggttgtcttttcactctattgattgtttcctttgctgtgctaaagattttcagtttgatataatctcatttgtttatttttacttttgttgcttgtgcttttgaagttgtattcataaaatatttttccagatcaatgtcctaaagcatttcacctgtgttttcttctaggagggttatccttttaggtcatatatttagttctttgatcatttttttgagacagggtcttgctgtgtcacccaggctgcagtgcagtggtgcgataatgactcactgcagccttgacctcctaggctaaggcagttctcccgcctcagccagctgagtagctgggactacaagcatatgccaccatgcctggctaatttttatattttttgtagagatagggtttcaccatgttgtcgaggctgatctcaaactcctgggctcaagagatccacctgccttgacctcccaagatgttgggatcacaggtgtgagccaccatgcccagcctctttgatccactttgagttgatttttgcatgcagtgagaggtagaagtgtagtttcattcttctgcatatggctatccagtttgctcaggaccatttattgaacagactattcattccccaatgacaattcttggcacttttgtcaaaaatcattttgctgtagataatgtggataaatttctgggttctctatgcctttccattggtctatatgtctgtttttatgctggtaccatgctgtttgtgttattatagctttgtgatatattttgaggtctgatagtgtggtacctccagctttgttctttttactcaggattgcttcagctattcagggttttctatgtttccatacaaattttagaatttttttccatttctgtgaaaagtgtcattggtagtttgatagggattgcactgaatctatagatgtctttccatttatttgtatgcacttcaatttctttcatcagtgttttgtaatcttccttgtagaggtcttttatcaccttggttcagtttgttcccaagattttattttcttttctagctattgtaaatgaggttgcctttttgaattcttgttcaactactttgttgtttatgtacagaaacactactgatttttgtgtgttgattttatatcctgcaactttatggaattcatttatcagttctaagagttttttggtagagtctttaggctttttaatatgtagaatcattacatatgcaaatagggacaatttaacttccttcttctcaattttgatatggtttatttctttctcttgcctaattgctgtggctagtacttccagtactatgttgaataagagtggtgagagagggcatcattgtctgttccagttcttagaggaaatgctttcaggtttcagtaagatgctagctgtgagtttgtcatgttgaggtaatttcaacatgttattatgttgaggtactttccttctatacctaatttattaagagtttttatgaaggaatattaaattttatcaaaagcattttctgcttttcattgagatgatcatatgatttttgtccttcattctattgataggatataagacattcattcagtgacatatggtggaccatctttgcattcttgggataatcctcacttgctcataatctttttgagacactgttgggttcagtttgctagtattttgttgtggacttttgcatgtatgttcatcagggatattggcctatcattttctttttttgttttgtccttatctgtttttggtatcacggttatgttggcttcatagaatcaattaggaagtatttcctctgcttcatttttggaataatttgggacaaattggttttaattcaacagtgaagccatccagttctggactttttttttttttttttggtgttggaagactttttgttattaaatcaatcttgtttcttgtcattggtctgtttaggctttctatttcttctttcagtcttggtaggttttacgtatccaggaatgtgtccatttcctctaggttttcaaatttgttggcatatagttgttcacggtagtctctagtgatcctttgtatttctgtagtatcttttgtgatgtctccttttttgtttcctattttaattatttagatcttctctcttttttcttattctagctaatggtttgtcaattttgtttagaagccagctttttgttttgttgatcttttgtatttttttgtcttatttttgtttatttctacactgatcattattatttctttccttccattaattttgggtttagtttattcttttctagttctttgaggtttatcatcaagttgtttacttgaaatctttcttgttttttgatataagcatttattcctataaacttgactctgaatactgtttttgctgtgtcccataggttttggtatgttgtgtttctgttttcctttgtgtcaaagaatttttaaattttattcttaatttctttctttatccattggtcattcaggagcatattgtttaattttcatgtaatggtatatttctaaatgattctcttgttatagatatctaagtttacgccattgtgttcagataagtacttgatattttgatcctttaagaatattttgagacttctattgtgtccttacacacgattgatcctgagactgttgaatgggctgatgaaaagaatgtgtattctgccactgttggctgaaatgttctataaatatctgttgtatttagtctatggtgcagtttaactctgatgtttctttgttgactttttgtctacataatctgcccagtgttgagagtgggatgttgaagtccccaactgttatttcactttagatctaataatatttgctttacatatctgggtgcttcagtattgggtgcatatatatttacagttgttatattctcttgttggatcaatccttttataattatatagtagccctctgtcttcttttacagcttttgacttgaagagtgttttacctcgtataattatagctattcctgtttgcttttagtttccatttgcactgaatattttttccatccacttccagtctgtgtgtgtatacaggtgatacaagtttcttgtagatagcatataattgggtcttgtttttttaaaatccattcagctagtatgtatcttttaaatgtggaacttaatctatttacaatcgtgttattattgataggtgaggacttactcctgtcattttattgattgttttctggtggtttgtatatcctttgttcattactttctctcagtgttatttttgcagttgaatggttttctctagtgaaaaggtttgattcctttctccttctcctttgtacagcagctctatcagtgtgttttatagtttcacatattttcatgatggtgattattgtttttcatttccacatgtaagacccccttgagcatttcttgcaaggccagactagtggtgatggattcccttagttttgctagtctgtgaaatattttatttgtcctttatttctgaaggttagctttgctgggcgtattcttgggctaataatttttttcttctagtactttgactatattatcctgtcctctcctggactataggatttctgctgagaaattcactgttagtctaatggggattcccttatatgacttgatgcttttatcttgctgcttttagaattctttctttgtctttgacttttgacaatttaactgtaatgtgccttgcagaggtcctgtttgaggtgaatatatttgagctttctcgacttggatgtctctctgtctttctgttattatttcattaaatatgtttttctcacctttcccttcaccttctggagatatttatttgcttaatggtatcccataaatcctttaggctttttcattctctttttttttttaaagttagtctgcctgtgttatttcaaaagatcattcttcaagttcagaaattcttcttcttggtctagtctgttgtttagctctttattgtattttttatttcattcattaaattcttcagctctaggatttctgcttcattcttttttatgatatctgtctttgttgaatttctctttcaaatcataaactcttctcctgactttgttgagttatctatcggtattctcttgtatcttattggatttctttaagattattattttgatttttttcccacatttcatatatttccttatagtttggagtctgttactagataattattgttttccttttgacattacatgttttcttgctttttttccttcttcttcttttaagacaagttctcattctgttgcccaggctggagtgcagtggcacaatctcggctcactgcagcctctacctcgtatgctcgagtgatcctcccacctcaactccccaagtagctggaactacagacactcaccaatatgccctgctaatttttgtggtttttagtagagacagggtttcaccatgttgcccaggctttttcttgctttttcacggttgatgtgtccctgtgttgatttctatgcatctggtggaaaagtcacctcttttaattttatggaatagatttcataagaaagaatacgaatgagtcttgggttgttggtttggtggggtacattagccttatttctagatacagttttgtagtctctgagtaatttcttcagctgtaatccactctagtggcatttgtgagtttctcagtggcatgggctgagagagtttgtggcaatggtgatgccactttgccaggggtgggctcactagactgtttctcaggtctggggtatgtatgtgcacatagtaggtcagccaacttggttggtgagattggcttactgagactggggccacaaggctgttactctgaccagaaatacaagtataaggttgcttgggcaacctggggacatgcctgccaggagcagctttcaggtcggggacgtgggcttttggccacttggctggcttggagatattccctgtggcacgggggcagtctgcgggactatctctcaggccattattgggggtaaaggactgttgggcaggccaagggcgtgcctatgggggacctgtgtgtctgtttctcaggttctgattgcttgcaggtagccctactctgctggccctgggccatatcaccttctcagaggctcagggaggtctcctgcttagagaagggagcccagcagtttggccagcttaagagcaggcttgctgtgggtaggactggcagactggtttctctgttggtggtatggccatggttcttggttttcttgctgtgcaagaccagaataacagccagtccagggtccagccttcaccagcttggatcatggtgttcagaaacttgtttggagttggcataatgaagatggagccccagttctggagaggtgcagtggccactttccccccagaggagggcatactacacaggtggctattctcaagatgacgccatgttacagcagtttggctcacagtggtgggatggggagtacacaccttgtgctcttaatccaggtcagtgcgtctgcatgaattcctggcagctctccaaaatgggctcagggcttgtgaggactatgggattcttgtgtagtaaggccttcatgtgtttgtggtggcaaagaggctggtagggatcttctgctgacttttttccctgcaatagcaattccctcccgtctccaggcagatctgatctaggtggggaagatgggaccacgagtttgagtgcctctatgctgccttcctagatttccaatcaccacaggtgcatcttcattctatcagtgcaccccactactcttccttcacactccagtcaaatcttagctgtttgtttgttgccttgatcctttttttgtgtgtgggttagacaagcaccaggtatccctactcagccatcttgctgatgttactcctttattgcttttcttttcttttcttttctttttttttttttgagatggagtcgcgccctgttgcccaggctggagtgcaatggtgtgatctcagatcactgcaacctccacctccttggttcaagcgaccaagtagcctcagcctcccaagtagctgggactacaggcacccaccaccacacccaactaatttttgtatttttggtagagacgggagctcaccatgttggccaggctggttttgaactcctgacctcaagtgatccgcctgcctcagcctcccaaagtgctgggattataggctggagccactgtgcccaactcctttattgcttttaatctctgcatagtagtgtgtgtattagtctgttttcatgctgctgataaaggcatacctgagactgggaagaaaaagaggtttaattggacttacaggtccacatggcttgggaggcctcagaatcatggtgggaggcaaaaacagaaacccctgagaaaaccgtcagatctcgtgagatttattcactaccacgagaacagcatgagggaaaccaccctcatgattcaaattatctcccaccagtctctcccacaacacgtgggagcacaattaaagatgagatttgggtgggaacacagagccaaaccatatcagtgtgcattcaccacattctcatcttttcccctagaaatagacttctaggatttctcacactttatgttcaacagagctatataaatatgctcctatgtattcccttaaagcccatcttctttctactatatctttttcctcattttacttccttttttgagggagttatgtgggatagaagaaaaatggacttcttcatttataacatacctgaagttgggagtattttaatccttaaacagattaaaatgagctgggtgtggtggctcacacctgtaaccccagcactttaggaggctgagggaggcgtatggcttgagctcagtagttggaaaccagactgggcaacatgacaaaatcctgtttctactaaaaatacaaaaactagctgggcgtcgtggtgcatgcctgtagtcccagctacttaggaggcagaggtgggaggatcacctgagcccaggaggtcgagggtgcactgagctgtgattgcaccactgcactctagtctaggcaactgggcgagtctctgtctcaaaaaaaaaaaaaaaagagtaaaagatatgcagactatgtgattttctgcttccaaaaggaaccacatagacaggaagaagatccaagtgaattattctcttctatttctttacattgccttctgtcattggtaacataacctttatggcattcacaagtatatttgttctagctttcttcttttagtaattctgttgctgtcgtttgtgtgaaatactgcatattataacattgtaattataaatgatttatacattatcttaatcgttgtcagggccaacgtttttcttacaagcagataggaactatgctttgttgtaactcatatttgatcgactctgagaacaaaatgtattttatactttcttggagtagtcccacaaaacatgtaggacccattaagaggaagaaagcatgctatatggttgttatatttgttatttttgacttgtaatttattcattctctcagccctgttctctgactagtgttactatggcacctaagttatggcatggaaaacaagctaattatgttcttcagaacagacgacagtgatacatcttgagacacaagcatctggtagtcttagccctttcctcatcagtgctagtctaggcttggttgggctctctggttgtccaaatatttttctgttacaacacatccttctttattttatttttcttctataaatagtggtttatgctttctaaagcctctagtctcatatttagtttgttcctttttgagccttctgtctactcaaagaagtaatatagacttactcccagctgtgtatgatctactcttactcctgtttattgagttaagctttttactatttgtaaacatctcttggttgtgtagacacaaatacaccaaaactaaaaatggttaaattggggtgaaaacttacggatatttcttacaatttatttttcaaaattcagtgatgtagttagatggctctcctgataaaaattgtttaagagatatgagtaatcaatacttttttatcagaagtgacatctaaccatattaccaaattttgaaaaacaaagaaaatattagaattatccacaatttttgtacctaaacttaaccagttttacttttgtttattcccttataatcttttttactattgatttaatgtaggttataatcatactgtgtacacactatttgtatgtcttctatttaattgaatatttatgtgccataagcattttctactttactacttagttttcatcatcatcatcatttgtaatatctttaaaatattctctggagtggtgctattcaatagaaatataatttaaaattttccaggacccatatgaaaaatgtaaaaagaaacagcttaataatggattttatttaatctaatatatctaaaatatttattgtttcaacatgtaaaaattatataccgtattagacataaaaattattagattttaaccttcttttcatagtacatctttgaaatgtacctattttacatatataccagtgaattacgtcactaaactttcaatgtcaaaataaaatgtagtcctaccaaaacaataaagctccagcagaaaaatatgaaatgcttcaatttttacatttaaattaatgaaagtaaattaaaaatttagtttcacgatcatactagccacgttacttatgctcatcatgtacatgtagcttcttcatttaaatttaaattacatttaaaattcaagcctctctttgcactagtcacattttaagtgatcagtagtgagctttagagtatatagccaattcttgactgttcctctgtcatttttttacattgatttcaatgaaataagtacactgataagtttatgaatgtatattttcccatgttttggattactttcttaaagtagactctcagaagtagaattactgggtcaaagagtataatcaacccttcttcatcattgttaccatattgtttctttagttactagagaggaatatttctctacatatttatttactatgtatttctctttcaatggaatactttttaatgttatggtttatttatctattggtgtcctaatgtttgtttaatttttagtctacttttaaatttctttgtggactaaagatactaacgctttgtcttgtttttcctcatcttttgtttatttgtttgtttttttccttctgggagtaccaactgaaccctttacttttactatagcaaatatttagataatacttcctctgtaagcttcaaagtttttcccactctagaagtttgatatttacttctcttttatcatagattttctatgtatttttaaaaaatgtttttatcaaactggaatatatgattatgtaattgtgagaaaataaactaaattacaagttcttaaccttcagttgaatccagtgcttacccattatttttagataaagcctcattatatatagttgctgaccaccactgcatagttttacgcatatgtgtagttaatcaggaagtagatggacccaaatagattaaaatctactgtttcaaatatttcaaaataatatcatatattcttccctattatattctgatcagaatattgttctcagtaaaaacaaagtcttttttttttctatatcaccatgtatccacagttgattaattatagtcatggttattttacataggtttatttccttttgaattaatatagacttatacttccaagagttataaataactgaaatttacatagttgtgtatgcacacatacacatacacatacccctattcctcacataattggtaatagaaataatgaaaagaggttgtgttcttaggcaaggacaatttaaaagaaccccaaatgattaccttgaattaaggtaaacactggtaaaaaaaaaaagagcaaaaagggcaattttttcctttagtatattaaacaatgttgtttctaacattccctcacgtttagactactctgaaaaatccttagagtggttgtgtaatgtgtttaagttttttcgatttccaagcattaagtctggctccactaaaacggttgtttggttctattttagtctgtccctatctgtcctactgctaccactttgtgttgttttgttttctgttataatgaatacaacagtcccacttcattctcagttctaattaacgttatccagcctctaagtgttagcatctactttgcttttggttataggatcaacgataaacagctaactgttgtgcagactgaaatccctaattagtaaagcacaagattttattggttatatatttttctaaactatagacttgattttgttgcaaaccttacatgtagaaaaaaaattttgtaatggcactgtttttatttttggtgatactatagtctggaacatgtggcccagcaaaggttataaatctagcaagaaaaattatggatggcatcaattttaacagtctttgcgatctaacagagcataaaccccaaattgtttaaatactaaatatttacttaaagaaaaacaagagatcattcaaaaatagaatttaaatagtgaatttgccttttatttaaaagttgacaagttttgtatatttataaaattaacaaaattgacatcatactatccatatcacaagactcttgtgttgtattttaaaggaaaacacacacacagcatacatacatttggattggggccagatttagactccaggggcacagtgttctgtaccttaaattacaatcagatgtattttagcacagatcaaattttcagtctgaagttggtgagaagcctaattatttgaccaggttactatttatgtagaccattctgtggctggctgtggttaatccacagctggcagaatgctagctatgggaggtttttatttgatgctggaacagtttggggagaaatagagggggaaagctttaaaatcttctcattaaatgaaagactaaaaagcaagacagtacatccatattactatggagacaagatgctgtataaactgttcgttttaattctccaagtgacagaaatagcaaagcagcagcttggatgctcatagtttgcaagtgataggatacttggttaaaaaagaaagataaaaacatttaaaaataataactaagactaagatttgttgcctcttagaacacttgaatattggtaaagaattaatggattcaatttttaaatgatgagaaatattgttattatacaaaaacattttgtatttcactaaacatactaaaacatttagaatttcactagcagtactttaaagtgataagaggcagttgtaggggagaaaaagtaacatattttcctcatccatcgcaagggtcatgactgaaccctctgtaacgaaacagattaacaagagaaaagcataatttatttaacaaagttttacatgacacaggagccttcagaaattaagacccaaagaccagcaaaaactgtatttttatgcgaagtctgatgaaagacatggatagttgtagagaaacattagacaaaaggggtatgatctaatggtaataaacctagggttgaaggatgtggaagccagcaagtcctgtctgttagattattcttggccaccaggtataggacaggacccctttggaaaagggttttatggccagctttcacacagaaaggtgggagaaggtcagagtgaccttgcttctgcgggttttctcaattgctagggggccatattttggggtattgtattctgggccctgacacaattatagtagacgattctctcttaacgtctcagaatatgtataaaggcaataaacccttccttaaaagatggaccccaatacacatggctcctgccactaaattaatttttttagtcttcttattgtagtctatttgaaatttgaaagtaatattttaaaagatttttttttctttttaaacttttcagagtttgcattatggaaatcgttggtccctcagttataagtgaatatctcagtagcatttttgtaacttttaacagaagtttcttttatattttcaaggttatttcttccatttataagccagttcttctccccttctagtttccagtgctcccacttcctctagttctttgctctaattatcctctctcccttgcctcttcattcttctatttctccaatagatccttttctttgaaaagcaaaatctttccaactttccctgcccttaaaagcaaatctcttctttcctcccttccctgcccacccttccccgcaaaaaagcgtttgtgccttttcctcctcttattatctgctcaaattagcaacatatctggagtcatatgaatccaggcttcatcacatgtaagctgtgtgtcctaagaaacatctcttaacttctctatcttgctttatttatcaaaagaaactaatatgtccacctcataggtttgatgtaaggaaaaaacaataactgagttgctgtatagtatagtgcctgggacacaataattactcattacatttcagatggttttattatcattactgatgaagctttgaaaataattattcttaccttactttctcaccattccttttttaacaactacttctaccatcatactaagtgctttctgttaatcatcaaatcttatgacttttactcattcctttctttctctacttccccatagcaccttcttaaaatttcccttgcttagtttctccaccatcacttctcctctcctcatttggcctcctcttgttttctccttttccttttttatttcctctaatttttgttctccattttttccttcgtcgtcttttgttctgtgttctctgccttgggaattacaccacctctttgacctcacctctttcatgacctttcctctaagtccaactttctggtagatacttagagatcccttagaacctcaactgtagtatgaccacaactaaacactctttaccatctaagccagatcttattctggaattttccacttttattaatggtagaaccagattcaaaaatctcaatcatcttttgactcttttcttctttgccttccacatcttaaacaattgccaagtcctgtatgtagtactcctaatatggttttcttttacacagccaaatgtagacatttattaactgttgctgaattgttgctgcccaggttaactttgctttaaattttcccataagcttgttattccttcctttcacggaaatattcattacccatgatccacccctacccctcttgcacattgcccaccaaatagattcctaccctgccatccaaggccctttgtattcttaacttcgccgaccttttcaagtctctattattgccctttgtgtattcctttacttgtttgtgcaccatccaaactaatttcctgtatatacatgtatgtctttgcttatgctttcctctagaaagcatgaatatgttttaataagactttcattaatattaaagctgtacataaatagcattttaaatgcagctttcctgacatgaaattttaaagaaatttaaagaaaattttaaagaaaaattaaatatttttcttttgcattactgcattcttttctcattatttgaaaattctaattcagaatcttcctcaaaaatcaatttagatatttcttaaggtaacaagttatgattgattgattgattgatatagagacaaggtctccgtgtatttcccaggctggagtgcagtggtgtcatctcggctcacttcaacctccaccacctgggctatagcaatcctcccgtctcagtctcatgagtagctgggaccacaggcacacaccaacacacccagctaatttttgaaatttttgtagagacagagttccgccatgttgcccaagctggtttggaactcctagactcaagtgattggcccaccttggcctcccaaagtgctggaattccaggtgtgattcattgtacccagccagaagttatgatcttaattaacagattattttaaagtcacttataagaatacaaactcagccaggctcagtggtgtgcacctgtaatcccagctacttggagggctgaggtaggaggattgctttatcccaggagttcaggaccagcctgggcaatatagtgaaaccttatctcaaaaaatatatattccaaactgtttgtaagaagctaaaaggattcagtttgccttcatagtacaatttccctaattcgaatgtaattattgtcttgaatgagacctttcaaacattttttctttcatgaatttccagaattctttagtattgagcatataaacctagtatgaaataagtaatgctttattctctgaagtaatggcatgtatcaagcatatggtactcatatgatcaaatatccttccagtcaaatgttgctattttctgccttgcatcttataattgtattttatatacttttgtattttgtataggtttcttttattctcactgagagtgactgtggagatggtatttctaattttccctccttttttcttcatccagggcttttttcttacagtttccccagagtcagtattaaaggtggctcaccatgcttctgaaaacaacaggattttcactttgaatctatctgcaccgtttattagccagttctacaaggaatcattgatgaaagttatgccttatgttgatatactttttggaaatgagacagtgagttacctttcctttttcaaaagaacctgggggttttttgtttgtttatttctgatgtgtgtatatatgtttagaaatatataaattaaatcctaaatttttgtgtaaatgtccttgagaattgtgcaacaaaattgcctcaatgtcaactgctctcagtattttcaatatttccttcagtatatactaacttctttcttagtgaagcatttatttatttatttttatatttttatttttttgaggtggagtttccctcttttcatccaggctggagtataatggcatgatcttggctcactacaacctctccttcccgggttcaagcagttctcctgcctcagcctcctaagtagctggggttataggcgcatgccaccatgcccagctaaattttgtatttttagtagagacagggtttcaccatgttggccaggctggtcacgaactcctgacctcaggtgatctgatcgcctcagcctcccaaagtgctaggattacaggtatgagccactgtgcccggcccaacatttatttttttaaggtgtttgacgtttgatttacttatagtaagagtcatcctttttactgtaatttctgtgagtttttacagatggatacctgtcctgttactatgaccacaatcaggataaaaaagcacattcatcacttttttaagtctcttcagagtctaagtccatttgatatttgtttaataaattatgagtaaattttgatatattacatttatatttctttattaataatatttttaaaatattgtctgttatagttgaaggtgataaaatggaatttcatctcaacaagtacagttttttctttctaccaagaatgtattttcttccattctaaattatggaaatgcttatttacttaaatgcttatttactttgattgcttgtttactgtttatacctcttatttactgtttatacctctttaaaaatccatgaaagaggaaaaaatccttcagtgtgtcttcctatgacttggccatgtcacttgatggtttaatgtatacaatgaaggtattgtattaatcatcccagaagttcattctgattctaattccatagttctaacatagtttgaatatattcatcaattttatatctaataactgccatctgcctagaataacataaaaattgacctggaagtttacgagatcacctgggtaaagattaaaggatgatccatagaaataatatcacagtgtatctgcaaaggtgatggttacattggttataaatggtgacattggaaggaaatgctatattcttgataattcacaaattgagatactggcaagaaatagtggtaatagccaagtgccatataactgctagaagcctaatttgactaagatctaccatttagtttttccttattaacagttttattttgtaaagggtaaaagaagtaaatgggaaaagtgctattcaagccttttgaataacattaaagcattggtctcagtagtcttgagaatcattgggagaagttaacatttggtctcagagttctaaatagtcaagaaagatcagactggcagcacttaaataagttctctagagtttaagagacaaatcttaaaacttttaaaaaagataaatatgattccaaagaggccgggcacggtggctcacgcctgtgatcccagcactttgggaggcagaggcgggtggatcacgaggtcaggagattgagaccatcctggctaacacggtgaaagcccgtctctacttaaaatacaaaaaatgagccaggcgtggtggcgagtgcctgtagtcccagctactcgggaggctgagacaggagaatggcgtgaacccaggaggcggagcttgcagtgagccgagatcgcgccactgcactccagcctggacagagcgagactccgtctcaaaaaacaaacaaacaaaaaaaaaaaaacataaatatgattccaaagaatgaaactttggaagtaaagaaagcttagggagattgaatgccataaaaaatgctatttggactttatagtcacaaatgatcttaattaaggagagaatgtggagggaccttttgaaaaaatatagcagagcacgcagaaaactctttaataagagctcaaatttggaggataacgagatagctgcctctgcctttgccggtgcagtgagagcagcttcaggaatcttatggcctctgaatattttggcatcttcagcctaccaaaactgtgtcaaaaatgcctctcttatttctgcattgtccactggacgttttagtcatattcagacaccagttgtttcctccactcccagacttaccacatctgagagaaacctgacatgtgggcatacttcagcgatccttaatagagtggccctcttgcttccaagtgtcttgaagctgccagccagatctctaacatacgtcagtacaggaaaaggcaagagaaggattgtgaaagctgtcatctataggtttcttcgacttcattgtggcctttggatgagaagggctggttataagaaaaaattatggaaaaaggcacctgcaagaaaaaagcgattgagggaatttgtattcggcaataaaacccagagtaaactcttaagataaaatgacgacgtccttctggaagaggtgaaactggtatgtccatgatccttatcagaagtgtcatgatcgaacaaacctgaaagtatagatcagaagtttcacttgtttctcagttattgaatatgtatctttgtgtacatatctgcaaaaatggataagtaaaaatctcgatgtaaattgtatcaatgaatatgtaaacatacagtgacaacactgaacttataaaagttttaaaacttaaaaaaaaagctcaaatttgtaaaagacatgtaaaaagaaggtggaaaatgtatttagaatcagggaatgatgctaaaagtttggtagagacaaaagagaaaagaaagtcccaaaagtggtttaagtttgcagcagatgctgatgatatcaaaacaatcttcacttaaaaaaaaaaaaaagactccaaagtacaagcaacaaatggaaaaaatagataaattagacatcatcaaaattaacaatttttgggcatcgaaggacactaacaagaatgtgaaaagacaactagtggaatgggagttaatatttgcaaatcatatatctgataaaggattcatattcagaatatttaacacagtaacaactcaacaataagcaaactaacaacataattcaataatgatcaaaggaatttaataaacatttattcgaagaagatatacagatggccagtaaacacatgaaaagatgctcaacataaccattcaagaagtgcaaatcaaaaccaaaattagataccacttcacacccatcagaatgacaattgttttaaaaaatggaaattaacaagtattggtgaagatgtggagaaattggaaacacttgtgtattgctggtgggaatgtaaaatgggaatgtagaagacaatttggtggttcctcaaaatgttaaacatagaattattaccatatgatctagcagttctacttctaggtatattacccaaaataactgaaagcagggactcagataattgtacaccaatgtccatagcagcattattcacaatagctaagatagaagcaaatcaaatattcatcaacagatgaataaacaaaatttcatgtatatatacaatggagtattatttagccttaaataaaattttgatacatgctacaacatgaatgaattttggaaatactatgttaagtaaaataagccagacacatcagacaattattggattttctaagaagaattccacttacaagaagtatctagaataggcaaattcatagagacacatagtaggatagtgattacctgggagtggggtggggaggaatgaggcattattgtgtaataagtacagagcttctgtttgggatgatgaaaaagttctggaaatggatagtggtgatagttgcgccacactgtgaatgtatttagtgccaatgaattgcatacttaaaatggaaaattttatcatatgtatagtttaccacaatttttttgaaaaagttttattctacaaatcagtaaacttaaaagttggatcacagcttagcatagattattaaaggaattatttttccccacctagaagaggaagtggtaaaactgtaagctgctacgtggctgtaagtcatggggcaagaaaatcttttctcttttggtatgattattgttcatttgaattcgcttcaagaggtatttatatagtacctaagtacctattatggcagaccaataagcagtggatacatagtatattttagaacatctgtcattacgtggactatagaataataaagattggctataagacaattagaggtatttggtattttattgaagcagtctcaaaaggtctgttgataaataaattgatttctaggggtacgcctcagtgtttaccctgcctttgcttaagtaaacagtgatttagataaagctatatttgcatataattcaaatgcaaataatacaacaccttaatacatactaggtaagttgaaggtcaaaatcagatttttttaaatgttagtagactctaaatatcagttgagtgatgaaatttaatagggataataaaaattatatcgtatttgattataaaaagcaagtagagtaaaatgctttatccctttaatctcatcatccattgtttttctccttgaatactatagtgataatgttatcttcagttttccaggaaaaaagagacattttacttctaaaatgtgacgaaggataaaatatagttatcagagaatatacgtaggattctttaatatttcccccctcaaaaaaataaagtatactgtgtttagtataaatttttaaaatgtcaaaactcagctaaaatcaaacacacttggcccttattttctacatgtcaccttcctcttgtcagaggattgtacagtagtaatgatgatttaaaacttctgatagcctcaatatttaaaaaaaataataccttgtccacaaagattatttcttcacaggcaatgatcaatgatccctgtgagacaagaaataaataagataaacctgatgattaccccagctaactccttggagataatttccaggcaacagaagaaaggtaactaaggccaagcacagtggctcacgcctgtaataccagcactttgggaggctgaagcgagtggatcctttgaggtcaggagttcaagaccagcctggccaacatggtgaaaccccctctctactaaaaatacaaaaaagcctggcagggtggttgtgcgcctgtaatcccagctactcgggtggctgaggcatgagaattacttgaacctgggaagcagaggttgcagcgagccaaaattgcaccactgcactccagccagtgtgattgagactctgtctcaaaaagaaaaaagaagggtatctcaagtagacccttgcagtctcttttaatgaggagttggagccggaagttcaaggagtctaagacagctagtgtttgtaagttaaaagtaccagagaagaaatagctgaatagagggagaacacaggacatttgcagaatcccaacaagtcttcagctgagtatgaatcagtgcatttttgtgaagaaattaaggaagaccacaaaaagaaccacctaaaaagattgtagaagacaatcctcagtgcacacatgaggacctataaccattcctatcctactagtcagagtggataacctcgtaattcacgaggcttcaagtagagtattaaaaggaattttgtctcattagcaggttaaaatcagctctagactagatgttctggtccctcctgtcaatattattacaatatatttgacaacctttatgaaatggacaaatttgttaaaagacacaaagtactaaatcatactcaagaagaaatagaaaaagtctgtttagattattaaagaaattgaatttgtagttaaaacccttgctacaaagaaacttcaaaggctgaattgcttcagtgtttaattcttttctgtttgtttgtttgtttgttttgagacaaggtctcactctctcacccaggctataatacaatggcacaatcatgtctcactgcaagctcaaactcctgggttcaaatgatcctcctacctcaacctcccgagaagctaggacgacaggtgcaaaccaccacagctggctaatttttaatttttgtagagaggaggtctcgttttgttgcccaggctggtttcaacctcctgcactgaagcgagtccttctacctcagcctcccaaagtgctgggattacaagcatgagccactgcacttggcagtgttgaattttaacacagatttcagaaagatgtagtaccaattgtatacaaactgtcccagaaaattgaagagggagaaatatacctatcttatttcatgaggtcagcattaccttcataccaaaaacaaagtattgcaagaaaactacagaccaatatccctcataaacacagatgtaaaaattcttcaaataattttagcacatcaaaccgaacaatatattaaaagagtaattcatcatgactaggagtgtagaattggtttagcattttgaaatccatcaatgtaattaaatatgttaagactaaaaagaaaaatcacatgattatcctaaaagcttttgaaaaatccagacatctatttctgttaaaagccctcggaggctgggcatggtggctcatgcctgcaatcccaatagggattggtgagggtcaggagtttgagaccagcctggccaacattgcaaaacctcatctctactaataatacacaaaatagcagggcatgttggtgggcacctgtaattccagctacttgggaggctgaggcaggagaatcgcttgaactggggaggcagaggttgcagtgagccaagatcatgccaccacacgccagcctgggcaacagggtgaaactgtgtcaaaaaaaaaaaaaaaacccttggaatagtagaagcatgaaaaaatccagatttagaaagaaggaagtaaaactgtctctattatcaaaagcatgatcatcttcatacaaaatctgatgtcatcttcaaaaagctattagaactggctgggcatagtgcatcacgcctgtaatcccagcactttgggaggccgaggctggtggatcatttgaggtcaagagttctagaccagtgtggccaacatggcaaaaccgcgtctctactaaaaatacaaaaattagctgggcatggtggcacacgcctgtaattccagctacttgggaggctgaggcaggagaacccgggaggctgacctgaggcaggagaacccaggaggcggaggttgcgatgagccgagatcatgccactgcactccagtctgggcgacagagcaagactctgtctcaaaaaaaaaaaaaaaaaaaaagctattagaactaagtgacgtagcaagattgtagcatacagaataaaaaatttaaatctcaaatgtatttttctatattagcaagaaacaaccagaaatttaaaaatacgatttccaataccatcaaaaagtataacaaagtatttactttgggataaaccagaccaaagatgtatacactgaacactacaaaacattgttgaaaaaatttaagaagacccaaatgggagatatatcatgttcatagattagaagactctgtattgttaaatataaattctactcaaaataatctatagtttagtgtaattcagtcagaatttcagaagttttttttaaagtcaagttgattctaatatttatatggaaaagcactggactagagtagccaaaccaacgtggattttaaaaaccaaatcagaagacctttacatgatttgaagacttattacaaagctacagtaatccagacaatgtggcattggtgtaatgatagacaaatagtcaatggaacagaagggaacgtccagaaatagacctaaatttatttttcaacaatgtttcagaggctttttcatggaggaagaaaacagtctttttgacaagtcgttctggagcaattaaatatccatatctaaaaacgcaaacttcaacccacgtaacaaacaactgcacggctattagaatgtctgaaagtgtgaccataccaaatattggtaaggatatatggagcagctagaatgtaaaatggtacaactactttggagaatggtgttcttgtttcttacaaagttaaatatacatcctccaaatgacctagctatcccactcctagatattcacccaggacagatgaaagcatctgtccatgtaaagacatacacaggtgtttatagcagctttatttgtaatggccaaagtctggaaaacaaaccaaacatccacaactagtaactggttaaacaaattgtgatatttccatagaatagaatactactcaactataaaagaattgtactattgataagaaatgaaccaacagcatagaagaattttagaatacctatgctgagtgtaagatactgtaaagtacattctatatgattctatttatattctagaaagtgctaacaaatttatggtgatggcagatccattgttgtctggggacagggttatgctatgaggcagtgatcacaaacgggcatgaggaaacttttaggagtaatagatgtgttcccattgaggttgtggttgcagtactttatacatacgtcaagttttatctaattaaacacttttagtttgtgcagataattgtatgtcagttatacctcagtaaagctattaaaatgaatatatactttgattccatttatatgtttaaaagtaggaaacattattctaaagccattaagttccaaaaatacactgctaaaatgaagaagtgccaatttgttattttttgatcaccatatatgaaacttctgttatttccatggaagatccccttatatttaagtagcaatgtcaagccagaggaagagtgttttgatagtcctgggttctaatcatgacaactaaaaattatcataacctaccattgaataatgctttaaagttaaaaagggtattcacaaaaaccgtcatttaatctacaaggcaattccatgtgtttttctaatgcatgtaaagtttcagcttggctcatggaatatattctcaatttttgttaggtaatgttggtagtagttttaggagtattgatcatgttatctattaagtttcacttcactttaacttgctttgataactcacactcttcattcattcctgttaaaacataatgaatatagtaccaagtgcatgagggaaaactcacagctattgggctgctctctgctataccaccttacttctgttccaacaaagttatttgcttacaaaagttaattatgtttttcctaaacttggtgaaatttgtgttcattatttaattatttaacattatatattctgatgaaatatgaatgcaagtagaatgagaattagtttaatgagttaaggttggttccaaaactaaatacatatgagttatttttaatgttgctattgaattggatgtgggcatgaaaagtataaaagattaaaggcagtaaaaagctgtaaacatctgtattcaggagtgcttcataggtgtttttatgttttctctctgctttaaagaagttgaaactaggccaggaaccatagcgcacacctgtaatcctagcactttgggaggttgaagtgggaggattgcttgagcagaggtgttggaaaccagcctgggcaacatagttggaccccatctctccaattattttcttaaaattagccaggcatggtggcacacacttgtattcccagctattcgggaggctaaggtgggaggatcgcttgcacctgggaggttgaggctgcagtgagctacgatcatgcaactgcactccggtctgggtaacagagtaagaccctgtctaaaaataaaatttttaagaaagtaaaatgagaattcataaactatgaattctagatgtggttctacaagaaaaactctagaatgtcagtctgtaggcatgctcaaaggttttgaccctatttttttttttttttttttgagacagagtcttgctcttattgcctaggctggagtgcagtggcaccatcacagctcactgcaacctccacttcccaggttcaagcaattctcgtgtctcagcttcccgagtagctgagactacaggcgtgcacaaccatgcctggctaatttttgtatttttagtagagatggggttttgccatgttggccaggctgattttgaactcctggcctcaagtgattttgaactgcccacctctgcctcccaaagtgctgagattacaggtgtgagccccccacccagctgaccctattttaaatattagcaaatgatgtatctttatatattaaaataaaatgtttagattatgaaagctattttttgttcccttaatttaatcatcactctgatttatttatcaactactattccttttcctcatctgtaaattgaggggatttgcatagaaatactagataatcttttaaattttttcttaaagcttaaacatgttataaaactgatgattcattttttttccacattctaagattaatactgttagattttattataaattaataaagttcctcttttaacatgtaaaataatgcctgacatttcttttaggtagttctgattttttattatgagtgtagccttaactgtagtgcctttgaagctgaattctccccatttgtgaccccagtattccttttttgtttagtgaacctaggggaaatgatatttctctccaaaaaatacctgaaaatatttggttagacacgtgctgggacaaaaagtgaagtatccacagtaataccattgctatgttcttgtgatataaccagattataattactaaatgatacaatttactttctttttttaattctggtaaaaaaaaaatacacaatataaaatttagaccattttaactatttttaagtgtacaaatcagtggcattaagtacatttgcaatgttgtacagccatcaccactattcctctccagaactttttttttttttaatcaacccaagcagaagctctgtacccattaaacaataactcactatttcctgtttcctccttcctcctcacccttggtaactgttttactgtctatctatgaatttgcctattttaggtacctcatacaagtaggatcatacaaaagttgtctgacttaatttcacttagcataatctttttaaacttcatccatgttatagcatgttatcagaatttcatcttttttaaggctgaataatatttcattgtatgtgtgaaattttgttttttgcttcattttgttgatagacatttaatttgtttccacctttgattattatgaacaatgctactgtgaatgttaatgaacaagtatctgtttgagttcctgcttttaactcttttggatatatacctagatgtggaactgttggatccacaacaggtacaccattttacattcctaccatcaatacacaagggttccaatttctccacctcctcaccaacacttattttgcatttaaaaaataatagccatcctgctgggcacgaggtggcatctcactttggttttgatttgtgtggtttactttcagccaaggttcagaaatacatagtgacaaatttctgtttctttaatttaaaatctttggtaacctgttacattgcattttgtacttttaaattacacatctgaattgattggttatccttgttaaagtagttccaaaattactgtagtttaaaaactctttaaatattacattgtagttttaatttgtttctgacatcttcaaagtttgaaattttcccttcagcaacaaccatttgttagctacattcacacgaaagcagcttaataaaggacattctacacaaaggtaattataatccattgatgccccttaatgcaagctgctttgtagtcattatctagcagtagatgactaaagaacttgattattcttgtttttcatttttattaaattaagaaggtttttttaaattatgtcattttgcaaatggttcttaggagtaatgcctttcaaggctccataatcactagataattaacctgcaaggattaagtacactcaactttgcctcaggatgcttaactctcaaatacagtcaattatctcatgataataactgctttgtcaagagttaccacttaactccacagtgaaaagtcaaatcacccataccatgcactttaagatagtttcaataataaaataacagtttgaaatggggcagaagaattcagttaaattttttcatagggataagaatgatatgctttagataaagctccccctcatatctagtattttgaatttcacaaatgacttcaatttataaagataatataggccaggtgcagtggctcatgcctgtaatcccagcactttgggagaccaaggtgggcagatcacctgaggtcaggagttccagaacagcctggccaacatggtgaaaccccatctctaataaacacaaaaattagctgggtgtggtggcacgcgcctatagtcccagctgctcaggaggctgaggcaggagaatcctgagaaccctggaggcggaggttgcagctagccaagatcacaccactgccctccagcctggcaacagagcgagactccgtctcacaaaaaaaaaaaaaaaggtaatgtattgctctgcttcatcagtccttttgctggcagtgttcctgcattgcaaattttcttataggaaagccattttgtctgttaacctcacagaggattcaatatattaaaaatctctaatatacaccaagaaaatggaaattactttctttacatattgatttaacttttaaaaaatctcgtttatcaacaaacgaattacaaaacagtgagcaaaattctgcagtttgttgtggttgttttttgttgttgagtagcttcactcatatttggacaggatatgccaaaaacagaaagactgctagatagatcaggacattttgaaagaaaatataaaaatgtctttaggtttgttatccatgtcctctaagcctgaatgatgcttgtatctctttataagtaaactatcattatctttttactaaaccagatgggatacattggctttttcttctgttatatattttactgccatggggatgggaagagactttattgatattttgtttacacttttaaaccctttttaatgtttctaatagttaattaataatttgaaaccatcaattctttaaattgtaaataactttgatacaggttatcttatttttcagtttctatacttctgtaaaatagaagtcatttgctcttttaagataaaaaatctgtgtgaatctatgtgtaattatgtacaccaaatagtgctatacatgcatacaacttctttcagatattcttcttttggttaagagcctttttttctttgtaaaggtattattttaatttttagaactatttttctgtgcactggagcacatgtttgggaggaaaaaagaaactttctgtcaagtccctatacacagagaattcttgtttgaatttttaaaaaattttgtcaagtctagttcttttatttatttatttattatcagttagagacagggtctcactgtgttgtccaggctgttctcaaactcctggcctcaagcagtcttcccgccttggcctccctaaggttctgggattacaggcatgagcgaccaagcctggccaagtctaattctttaaaggatgtgatttccaagtatttccaggaattcaagactgttacctagatccgtattctgacaaaagagatgatcttttctttcttcatatcagaatatttcccccatgaattgagggaaatggggctgtatctaaaaatggtaactctgccctttaaagtatacagaagtgccctgtttcttcctaagagaggtggaagtcccctttctgagactgtgcatatagatctctttattcccctttttctgctataagtgataagaggggctatgtagacaaaatgtaaggttgttataaaatcatcaaggaattgggaaagaaactttatcggaggatatacataaccccttcagaaaaaaaaacaaaaacttatggtgctttttggaagaaattctgacatagttgtattttctgagaaggataatgaaatttcagttaacatggaactgtaacttcgtaaaattgctgctcagctcctagatttaactttctccctagggtttttctaatatatttactcatctgaaaaaagtgagattgactgtagcacaagggagacttctgatgtcagtggcatgttgtaaagatgtgctatgggaaagattcagaaaatgcaaaggctatttaactatatgctctgcatctctcttcctttctacatagctctctcctttctttcttactccttcgtctccctctttacgccaactacattgcctctctgaagatgaaatgcttttaaatcatccccaatctaacatccatcactggtaaaaagccatctaattattatgtgttgatttttaaaaattaaaaaaaattattagaaaattaagaagagcatttaaatgtttttaattgcaaggagaaaataaatacactcaagtaaagaaaaacactgtgtaatttgaaatagtttgaattactacggagataatcatattttatgcagtaatgcctttctattttattcactatttctattaatctttatttgtttcagttactgtactataaatttgtaagtgattattttggtattatttgtatagtatgccataatataaaaataatgaaaaatattaaatatatatttaatgttcttatttaatgcctttaattttttttttctttgagacaaggtctcactctgttacccaggctggagtacagtgatgcaatctcggctcactgcaaactccacctcccaggttcaagcgattctcaagtctcagctttccacatagctgggattacaggaatgcgccatcacactcagctaatgtttgtatttttagtagagatggggttttgccatgttggccaggctgatcttgaactccaggcctcaagtgatccacctgcctcggcctcccatgtgctggggttacaggagtgagacacctcacccagccaaaaattattgtttattaaaaatcatttaatgacattgacatccttataaataaaaactgtaaatttatatcacagtagaaaaagtgctagacctaaatttagaaaacctgtcttttatcctagctcttgagtttttcacagagaaaataggagtcaagaagccaaaattctgacatgagggaaataattagcaaaatttaaataggtgccattgattagtcaatggtattttatcaacattaatttttattttattatttatttatttattttgatatggagtcttgctctgttgcccagactggagtgcagtggcatcatctcggctcactgcaacctccaccttccgggttcaagcaattctcctgcctcagcctcctgagtagctggggttacaagttcctgccaccatgcctggctaatttttgtattactagtagagacggggtttcgccatgttggccatgctggtctcgaactcctgacctcaggtgattggcctgccttggcctcgcaaagtgctgggattacaggcatgagtcaccgcacccagcttaacattaatttttttagttttggtaattttaatatggctatatagaatgtttacatttggaaaaatcctaatatcctttttgactgatccagatccagtccaggttgctcacattgcatttagttaccacatttccttcgtctctttaatctagaatggttcttcagtctttgtctttatgaccatgacaattttgaagagtcctgactggttttttgtagaatgcccttcagtgtggagtttcctcatgattaatacattttttataggaataccatagaaacagcctgggcaacatagcaagatgctgtctctacaaaaagtaaaattcaccaggcatgatggcacattcctgtagtcccaactacttgggaggctgaggcaggaggattgcttgagcccaggagtttgaggctgcattgagccatgattgccaccctggactccagcctgggttacagaacgagaacccccacacaccccccccccctaaaaaaaaacaacacaacacagaaatgctattgtgtcttttttcatgcgttatactaagattttagtgtgtttcgttactggtaatactaactttgatcacatggttaagaaaatgttggcccagtttattcacttcaaagttactatttctggccaggcatagtggcttacgcctgtaatcccagcactctggggagccaaggaggacagatcgcttgggcttaggagttcaagaccagcctgggcaacatggtataaccctatctgtactaaaaatataaaaattagctgggcatagtggcatgcacctgtagtcccagctacttgggaggctgaggtaagaggatcgcttgagcccaggaggtcacatggtgaccttggaagcaaatgctccctcaaacacgagatgactgcagccctggtctacatctcagttgcagtcttgtgaaatcttgagtcagaggcactcagctaagccatgcctggattccttttcctggaaactatggagataataagtgtttgttattttaagtcactaagttttggagcaatttgttacacaataataactaatatgctgtgaaaaacaaatttactaagagctcaatatctgtgtacaattttttttgtctttagccttttgtgtatattgtcaaaacacaggcttttagttaaagttagttcctttccccttcaagtattttaattttttttaaatatgtgaaacatttatatggttcttaacatcagaactatatgaaaaggtttactcagtagtgtcgctcctcccttatccctcatcttcctcattccccattctgtctctattcctaccctgtttcttcctacctaccctctataaataatctcattagtttctggctcacatttctaaatttcttttagcacaaattagcagctaaatgcatattttactgtatcttctttgttacatgaaaggtagcacactatagatagatcctctttgaacttagctttttttcaatcaagtgcatcttagaaatcattccataaaagctcatagagatccttctcatttttaattttattttagttatttatttatttatttatttatttttttaatgagatggagtctcgctctgtcacccaggctggagtgcagtggtgcgatctcggctcacagcaacttccacttcccgggttcaagggattctcctgcctcagcctcccaagtagctgggactacaggtgcctgccaccacccacggttaattttttgtatttttagtaaagacggggtttcaccatgttagccaggctggtcttgatctcctgtcctcgtgatcctcccgccttggcctcccaaagtgctgggattacaggcgtgagccacagcgcctggcctatttcatttaaaaaaaaaaaaaaaactgagacagggtctcactgtgttgcccaggctggtcttgaactcctgggctcaagcaatcctcctgcaatccttctgccttgacctcccaaagtgctggtattacagacatccagccacaataatcctcatttttttagttggattttccccattgtgtgaatgtaccatattttacccagtcactctcttatgtatggacattaagactgtttccagagtcttgcacttaaaaacaatctttcaatgaataatcttgttcatacatatttcttgggttgctagaggtatttcttcagagtaaattccttgaaatggaattgttgggtcaaaggataagtgcatataacgttttgttagatgttgctaaattcctctccaaaataattagaaatgttttcattctcagcagtagtgtaggtgaatgcctgtttttaatggggttattttaatatttggttatcaattattaagcattgctatcaaatggaattcactagaagcatgtaaaattctagctttatttcaaatacttagttgaaccagccaattcattttagcacagtaaaagtaatccaagaactaaaaagtgatcattctttaaggtacagattttaaagactcttttatcttttttttttcttttttttgctattttatcagacacattagaggaatatgaattaatccccattatacactctttagtttcattttctggccctgtattttcatcttatacttctctcctacaagcacctcttcctttctcctgtactgcctaactattcatgttttcttatcatcaatactcatttcatatattccctacctcacattctccccttctttccctcccttctccactcccattcagttggttattttataaatgtgattctgtgatcttgtgtatataattacaatgcttacatgtttcttttacactagaatgtgttcctttacagcagtgactttcattcttcactacattctggccacttgattggtgatcactttctgaccggaagttccaattatttaatcacaaagttggactttctggtgaccacttcccatcctggggctgacagtgagtcgccccatcagcataacaaaggcacttttaacaatcaggaaattctgagggtttttgaagctctgtgctaggaatccagacaaggacttgatatattttttactataccagtttaagggttaatgataccatgtaacaactttattaatagattactatttatagaaacttgataaatgtggtgggaggtggtgcagaatcatgtgatataatcaattataaatgaaagcacagataaaatttgaaataataagagagaaataagaatgaaggttggccacggtggctcacacttgtaatcccagcattttggggggctgaggcgggcagatcacgaggtcaggagatcgagaccatcctggccaacatggtgaaaccccttctccactaaaaatacaaacattagctgggcgtggtgatgcatgctactcgggaggctgaggcaggagaatcacttgaacccgggaggtggaggttgcggtgagctgagatggtaccactgcactccagcctggggacagagtgagattctgtctcaaaaaataatgaaaaccgaggagttttttctttctttctttttttttttttgagacggaatcttgccatgtcgccaggttaaaataaactttcaattctcttctcttgaatatctctcacccaacaatgtttttttcatgttgatcactttactaaagcgaacaattggggttttaccaaaattgtgaaggattttattcttccatacttatgtctgtgttcagggtcatacagattctactttttccttttagtttaaggtattctcttggagatttaatgtacttaaatttgaccacaatttattgagagcatattctgtgtcagacattgcactctgcactagatattcaggaatttctaaaaagaatgttaacattgctgttacatagtcagttactgatcacattcttttcctctcaacttttttcaaaataggaatctgcggtatgttttcacgtatggagttcaggtcaggcttaggggtccctgacaatgtgaatagttttaagctgggcctcaattcgtggtacccttatactaatttaacaagccgtggactctaggttccaccaaaaatattttgttccatcctctctggtttcagtccatggtgtacagaaagaaaactaaggaacttcagccccaaattgtcaaattttgctacttaagaaacagaagatttaaatctatcattttgtcttatattccagagttgactggttcctcctgtctttaacttcttgtccttgaagggtattctaattttcattcagaaatatgacttctcatagggtttgtgttagatattttcagggccagatggatatgatgttcccatttctgttttattgttaaactactattccttttgagctgtaatgaacaattcattctgagaggcaatatatgttttcagtaattgacttgaataaaagtaaatgttaaacatggagttactaagttaatacagtgggtattagtactaatttgttcaaattaagatagaattcttaatttgataaatagaattcttatattacagcatcagtccaattggattgatagtttgtagaaaggtaatttcttacatgaggaaagacaggttttctttctcttagcaaggtattaatgcaaaaatgacctcttcatttcctaccagcttccagaagggaaatgctggttaggaggtaaattcaatttactctacaagcaaacttcacatctgttatgctgaagtcagagtttatctttcttgttatgtggaacctagaaatataccatgaggaatactgaaaaataaactagcagaaattttgcgtgatgctgaggatttttagatggctgcaaaatgggtgaaagtaatataaacttaacaaagaatgttgtcacaactctctggaacttagtactgtttttcaactaacaaatggaagatttgtgagactaggtcgacttaatgtgatttcaatgcagtaattactgtgtggcatgggcatggtaagagataggccttttctagaaatattctcatctctgttttttttagttgctcttacttagatttatattaactcagcttcacattttcatttctttttattttattttaaacaatgagaaaaatactccacgatgtcactgatttagttatcagatttgctttatttctgtatataataggtaatgtgagtacaggaaatatatctgaaaaggttacttgtacctaaattttaagttagatcatttaaaaattacttataagtctcttgagtgttttatatagtagggcagatggaaaaacttatttgatattcatttttggtacctcttaggaaaataattgggaatgtattcagttggaaaaaatgttgagaagagtgttttatataatgattatttagtaaaacattaaaaataatttcttattctggaggtttatagacatcaaaattgacaaagattcatggattatacatttcatcaaggtacctttaagcgattttttaaaaaaaattctgactctaacaatgcatgctcattgtagagcgttaaaaatacaaaaacatgcaaaagaaaaaattaaaattaacatgtgtcatatcacccagcattaactactctataatttttcctgtgtttccttgtagggtttttcccacacatttttatttgtttttatcatatttatttttattccacacactttttattttgaaatgatttacaatctaggaaagaattataagaagagtacagagttctctcctactacacttttgagcattcttgctttttctctctttctgtctctctaaatatatgtgcttaaccatagtacatattcagatttttctagctgtcccaagaatgttctttctagtgattttgttttccaggatcatggatcatgcattgccttaacttgtcatgtttctttggtttccttaatctggagttccttgatctttctccttcatgccattgcatttataaagagtgttgtcaactgttctgtgtatgtaaattcttaaccaattgaaatagattttacatcatttttcccactttatatatatatatttatttatttatttatttatttttattttattattttttttttttttttggagacagagccttgctctgtcaccaggctggagtgcagtggtgcaatctcggctcactgcaacctccacctcctggattgaagtgattctcctgcctcagcctcccaagtagctgggaatacaggcgcgcaccaccatgcccagctaattttttgttttgttttgttttgttttgagacagagttttgctcttgttacccaggctaagagtgcaatagcgccatcttggcccaccacaacctccacctcctggattgaagcaattctcctgcctcagcctcccgaatagctgggattacaggcatgtgccacaacatccggctaattttgtatttttggtagagacagggtttctccatgttagtcaggctggtcttgaactcccaacctcaggtgatctccctgcctcagcctcccaaagtgctgggattacaggcgtgagccaccgcgcccggcctaatttttgtatttttagcagagactgggtttcatcatgttggccatgacggtctcgatctcctgaccttgtgatccacctgccttggcctcccaaagtgctgggattacaggcgtgagtcaccacacctggccacttaatatattttcaacattttccaatgtctttaattatgtcaattataattttggattgctgtataatataatttattttcattagtcttctagtgttggaaatttttactgtttgtttttttttcagtattgcaaatacaattgggaaataaactttgtaaataaatctttgttgtaattttaatttctgaatctatcaagtatttgttaaaacataaagcaacaaaacaaaaatcctacagaagaggataattaaatgttaatctttttgattctgaatacaattagaatggaaatttggaaaaggggaaaattgccagataaagaggttgccagatttagcaaataaaaatacaggatgcccatttaaatttgaatttcagaagggacacacgatatctgggacatacttatactaaaaaattattcattgcatatctgaaacttaaatatgactgagcatcatgtattttatctggcaaccctaccagtggtttgagtattcgggaagacttcatggtagagataaagagagggaataaagaagatgttttacacaaaaggaatggttgagattacctccaaaacaagagtgaacatagtttatgtgaaatagtctccataaagataaagactttgtgtctcattcactgctgtatccccgatcccttaaacaatctgtacactgtagtcactcaataaatatttgttgaacgagtaaatgaatttgcactataaataaagccaggcaacttgggacaaagattacctgttgtaactaagtagataaagataaaatttccatgaaagtggaaaacctggcagaagaatttggacttcctgccttcccttatttattttataatgattcattaagtgactgttatgtgccacatgcacaggatactttggagaacaaaaacagacatggcttctaccctcatggattttatagtctgtattagaggcagacattcaatttataattcaattattcatttaatagtcaataaatttcaattcaattatagcgtacaacttataaaattgaatttttaatcattcaatttataaatatgagtactgtaagggaaaagtatataatacttacattctgaaatcacacacagtgagggggtattcttgaaagaacctgatcaagataaatgtacatggtgttgtgtcttagggatagatccaatcttttctttgaaatcttcattcattcactaattttccctcgaatttatagaacactctttggactattacacttatacatcttttaaaatctttttatatgtgcaatttagtttacttactagattgtaaattaattaatttatttatttatttagagacagggtctcactcacatcacccaggctggagtacagtggcacaatcaccactcagtggcagtctcaacttcccaggctcaggtgatcctcccaccttaacctcctgagtggcttggactacaggtgcacatcaccactcctgtcttatttttcatatcttgtgtagagatggggttttgccatgttgcccaggctggtttcaaactcctgggctcaagtgatccgcctacctcggcctcccaagatcctgggattacaggcataagccctgcacctggcctagatcgtaaattctttagtgagctgggggtatttcaatttgcttttatcccctattgtttcatgtatgtaaaatatacacaggcgttaattattgacatgttgattcattgaaattataatggggcttttaatagctatagatatgccatgagcacataaaagacgatttcctgattctttgaccctcttaaagaagtttatgatgcctacttgtcattcttgggtccttagaccttctgtggcaatattaggtcggggatagatgtctaatgatttgcagtcagggagctttgataaccattgtcacatgttagcataaatcagaacccaatcacttttttttttttttttgagatggagtctcattctgtcgcccaggctgcagtgcagtggcgtgatcttggctcactgcaacctctgcctcccgggttcaagtgattcttctgcctcagcctcccaagtagctgggatcacaggcatccaccaccatgcccagctaatttttgtattcttagtagagacagggtttcactgtgttggccaggctggtctcgaactcctgacctcaggcgatcctcccgcctcagcctcccaaagtactgggattacaggtacgagccaccacgtccagccgagaacccaatcacttttgactctgccttcaatatatattgcaaatctaactaccttttactacctctacttcttcccttctagttcatgatgccattatcacttgcccagattattacagtagtctcataattgctctccctgcctctggttttgcctctcccctccagcagtgataggaaataatggaagtttttaagtaagcatggtagtatcactggatctgttctttgacacagctggctagtagtgtttggtagattggaataggggcatagtaaatgtgggttgacatggtatagtaggtagtcaagacagtccaacaatcaatcttaaagacatttcattttcttggtagttaaagaatataggcctaccagtacttgtaattttaattttaattgatttatatcattttacttattaatattcatttgaatcttagtttataatatctataatcatatgctatgctcaaatgtaattgagttactttttagagacaaggtctcgctatgttgcaggtttcaccatgttgtccagggtggtcttgaactcctgcgttcaagcaatcctcctgcttcagcctcccaagtagttggatctacagggatggcatgcaccatcatacccagctctgaactattttttaagtaaaattttttttagatgaagacaagcttgtatacaagagtagttaagacagtgtggtactgactcaaggatgtactaatagacaaaggatagaaaacagacccacacacatacagtcatacagttacagcaaagatgccactgggatatagaggagaaaggatagtattgggatcagtggatattcatatggaaaaaattaactcctaccttataccacacaccaaaattaattctatatgattgtacataaatgtaaaatagaacaataacacctctagaagaaatcgtatgaaaatatcatggtcttggttaggcaaagctttcttacaaagaatttaaaaatgttaacaataaagaaaatatagtctggtccaaatgcagtggtatttacaactaattgatcacagccagttacagatttctttgttccttctccacttccactgctttacttgactagccttaggaaaaaacaatttttcaggaaaaataagttggatgtgtcaaaattgaggacctttccccagaagacattgtgaaagtgaaaaggcaaaatataaagtgggcttaagaattatgagaagttcagcacagaggactagtggaagaaaatatgtttgtacataatttctttccctataaccaatactaagaatagagaaccctatatttaactgaaggcagaaaatattttgaggccatatttgttctcattttatgccatttacttagtaaatgtacataccttatagattcatgcatataatatacagtcctcccttggtatcttcaggggattggtttcaggacccctctcacacatacacaggataccagtattcaagtcccttgcataaaatggtgaagtatttgcatataacctatgcatatactcccatgtactttaaatattaatctctagattctttataatacctgatacaatgtaaatgccatgtaaatagttgctataccatggttttttgtattgtttttattattattattattttttattgttggatttttttcatattttcagttcatagttggttgaatgtggatgcagatacagtgggccaactgtatacatattttgggatcattttagtgggtagtaaaacttggttttccccaactgtttctgttaattcacagccagttatgaaatatgccacatttgtcctgattaaatagtgaaatgtcttagccctttccactgattatattgatagaaaagattaaaaagtggtggataaacctaaccaaaaaaaaaatgttttcataagccactgctgtcagcacttatttgagattttaaaacattttgtagttctttatttttaaatgaccttacattttcaaaagggtttgttaattcaaaaggtctcctatggttaaggcagttcaaatagtagactgagggtagaagagggattgactgtaaataggcatggaggtatcttttgggggtgatgtaaatgttctaaaactggattgtggtgatgtttgcacaaaatttgcacaaaagcattgaattatacactgaaagcatattttatagtgtgtaaatgaatgccttaataaagcttttttttttttttaaggataccattaagataatgaattgtccagccacagattaggagaaaacatttacaattcatgtatctgacaaatgattgtatccagaaatcaataataagacaaatcaatagacaaatagcataatttttaaaaattgggcaaaagacttggacacttcatagagggaaataatctaatggccaaataagcacactaaaagaggatgaacattattaatcattaggaaacacaaattaacatcacagtgagatactgacccatcactcatccacttgaatggttaaaatcaaaaggactactaattgttgacaaggatgcagaacaactggaactctcattctttgctggtgagaccatgcagtgggaccacacatttgaaaaactgtatggtagttttttattttttttttcctggtaaaaattaaccgtacatctaccctatgatccagcaagtcatttacctgagaagaacaaaaacatatatccacaaaaagagttgtgcaagaagattcatagcagcaaacaggcatgttcattaacaagacaatttttcagcacattgtgtttttttttttttttttttttttttttttgagacagagtctcactctgtcaccaggctggagtgcagtggtgcaatctctgctcactgcaacctccacctcccaggttcaagcgattctcctgcctcagcctcccaagtagctgggactagaggcacgcaccacgacacccagctaatttttgtatttgtagtagagatggggtttcaccatgttggccaggatggtctcgatctcttgacctcatgatctgccctcctcggcctcccaaagtgctgggattacaggcatgagccaccgcgcctggcctatgtattcatttaacagtacactactgggcaataaaaataaatgaactactactacccccaactacatggataaatctcaggaacattatgttgaacaagaagagtcagatgcaaaacagtatttgtgttctacattataccattcaaacaaacaaaaacagtctataatagaaatcagaaagtagtttcctttttgttagggggtatagggattgactggtaagagacagtagaaaactttctgggattatagaaatgttctatgtcttgttttggataaccatttaagatccgtacatcgtattttatgtgatcatacctcagtaataagaatgcaaaatgctacaaaagcaagtcaacccaacatctctactaataaatctcaccattttaaaaagaacagtaaatcctacatctctattttgagaaaaaataattataattttatttaatgctatttaacatatgcttatatatgacatataaattgtgaaaagattatttaaacaaattggctaaagaaacttcatgaagaaggtgaatcttttgccttattgcatatgcttttatattgagtaaaaccaaagtgatttcccatggtagcttcttatactctgttctcatactctttcttgtgataaaatggaaactgatgttcttcccatgaaagggtaattatacattaatgtactctttttccctcctgtcctttttttattatgaaatatttcatatataaaagaatatgtctaacatatgtgtattacaaagtatatcctctgcctccctcctcatttgaagatcctgccaatcctctgcagagctaatgcttattctgactttggggttttcatttcctttcatatatcccttatatatgtagtcctagtaggtgtatacatatgtatatcatgaatagttatatatataataattgcaaatacatcctgtttatttaatgggttatgtttctttaagttccaatacaatattttctaaattagaaaggtattacaattttaaaaaatgtgccaggacaaaattaataccaaattacaagaatggtaaagcttagaacattgtcattgactataaataatagctgcaattctattgttggtttcttttttcactagtccattttgataatatttcttgttgtggccaggcacaatggctcatgcctgaaatcctagcactttgggaggccacggcagatggatcgcttgagctcaggagtttgagaccagcctggacaacatggcaagaccttgtctctatttaaaaaaaaaaaaaaaattgttgtagtgaagcagtgttttctttcccacagaatatcgttcttcatttatttataaaaatatgatttggtatatatgcaaatgtagcttattttatatataaccatactgtaatagtctttgtggtaagcaattcagttaatatgactacaggtttaagatataatgtgaaatttggaatagattttaacttttaaaaaataatttatgttaggctgggcacggtggctcacgcctgtaatcccatcactttgggaggccaaggcaggaagatcacttgagcccaggagttcaagaccagcctgggcaacatagggagaccccgtctctacaaaaaaaagaaaattagccctgcatggcccatgcctgtagtctcagatctccagaggttgaggctgcagtgagccatcaccatgccactgtgctcccacttgagcaacagagcaagaccttgtctcaataataataacaataataatataacttatgttaagggctggtctttctttttctatatttaactgattaaactgattaactgtttgttgtttttttttatgtcataggtgtcagatccagctagcagtgccataagccagaattatagatggaagtgggggagagagagaattgtcagaaaaacttactaagatttctatcctggccaggtatagtggcttatgcctataattccagcattttggaaggccaaggtggaaggatccctggaacccaggagttcgaagctgcagtgatctatgatcatcccattgcactctagcctgggatacagagcaagaccttgtctcgaaaaaaaaaaaaaaaatctaagtggcttcatacagaaagtttaaagttaaatgtatactgttatgaatatcttattaaaatgcaagacaatcagagactgatctaaaagtaatcaaggatgatcatgtcttgggagtatcctgtttctcagttgctctggacagaaagcacctagaaggttgagataattcaatgcaaaatcagagatttccccccatgtaatcaacctcagaacttgagttggtcctaacagtagactcaaccccttggaaaagactaggcagagcaattttcctattgactacatctgagacgccattcattcttgtgtcacatgagacatagcatatactttttaggtctctaataatagcagttctctaagaagcaaactgggatgaaagacactattcacttattttcttaaatggggaaggcattaaaaggagtgaaggtttattaatgccacttttaaagatataaatagtagatttttattctaataagtcatacatcaataaaatttgttattgcagctccggggcagcaattacttatatattgacaacttatacatgttttacatgcccatttgctctccttttcactactgaaatgtagttaccatagcaatgaacacatcacatggttcctgtgctagttctaaaatagagaacagcaatatgccatatgagctctgcttattttctacgtaaggactgcatatacaacttgaggctattccataaccttctcagtgcagatagcttatcattgatttagaaagctttcaaagtaaaaagcaattggcagtaatatatttcaagtctctagcttctcttgtactgttatttgccactgagctaaaagaacagtttcactagctttgaccaccagggactctgctgttgtatatttagccatagattgtctatggaatagcagtgccacttagaagattggtgggagaggcatatatagcattcatggacacattttctaagtcttactgagcaattcttaaccaatcttagcttttctcctactgtctcccttaatgtttcaagtttttaaaaatataggactctgttttagaatttgaggaaaggaagatgccaggcacaactggaggcatgctattagttccttttatgtccattattgttgtgtaaggttttaaaatgcattggttatatagcagtttatctatagaaaaggacttcagatttcagtgcctggtggtatcaggccgtatttatgccttactatcacatttagagtgtgttgtaggctgtcagacctccagaaataaagtaggaacatacccctcttactgtgactcttaccagatacttatttgaaacagtccaagcactggcatattagggaatggtgctaactctttctaaccattaataagcaaaataaatttcaatgtgagcttttggctatactatacctatggtcaagtggcactacaaattcaaaattttaaatattctttattgaaactactaggaacaactgttttatatatagtagaggaaaccagggctttattctcttgactgaaacgtgtaagaagtgattcataggtcttcaaacacaaattagtaaatttaggaagctaaaaaggcatatatatttgactactgatgggggcaatatgttgattgtgtaatatttttatctaccctttcatctcagttataatttaaaaaccatttatatactacataaactatgtaatattggatacttctgtgtctatataatttgcaacaaagtagaataaatggccagagatgttattgtaatcttatggttgaatgttatttcttttttctaggtcattgtttaaaatctggacatcatagaaatagataatgcagagagaaaattctttcataattccaccacatctcaatctttgttattagttttaaaatatgtccttctagacatattttattgtaaaaagtatttaaaatactcattttattttattgccgcaagagagagaagggcatttattgtagggcaccaagcaaggaagatgggcagctcatgcttaagacccaacctccctgctggcttacaagcatgggtttttaaaggcaggggtacatttcaggaaagtagaagttacaggcaaaattgttaatcaatacatagaggttatacatgggttggctcaaaaaggagtaaggttttgagtgggggcttacaggtcatcaatggattaggagattctttgatttgcagttggttaaggaagaaaggctttgtctaaaaacttggggtcagcagaaaggagtgttgaggtttggccttaacataggttagttaggataaggaaacctgttaatcattatggggtgctatgtcagggtcaaggtatgagagcaagccacgatgcactgggtcagagtgaccagtttaggaaattgatagcccacaggtgtgactctctccaggcccctcaggaagcaatttagaacaaagagcagcagtcagagttcagtcttcagtttccctttatcaaaggtctatgtgacagcagttgacattttcttttttctgttttcttaaatttatttattaaaagaagtgtctcattctgttgcccaggctggagtgcagtggcacgttcatagctcactgcagtctcgaactcctggcctcaggcaatcctcctgcctcaacctcctgagtagctaggactacaggcacatgccactgtgcccagctcatcattttctatctggtgggtatgctggcatgttggaggaaggacctggcgagaggtgcttggatcatgggggcagttttccccatgctgttctcatgacaggagtaaattctctcaagatctgatagtttaaaagtgtgtggcagtttcctgctcgtgctctctgtctctcctaccactgtgtaagatgcaccttgcttctccttcaccttcagccatgattataagtttcctgaggcctccccagtcatgtggaactatgagtcaactaaacctcttttctttttaagttacccagtctccggtagttatttatggcagtgtgaaaacaggctaatacacttggtttctgaaaagtaatttggctggctttgaagtggggatgggccatgagccaaaggatgcaggcacttctggaagctagaaaggcaagaaaagattatcccttggagcttcaaaagaaatcaaccctgcatgcaccttgattttaccctagtgaggccgggctggacttctgatgcttcagagacaagggttcctccctcatctgtctcaggaagacttaggactaactttaggctttgaagtaaacagaagctgaaacatttgaatgtttgattttcatgatccagaactcaagcctcataggtcccatgcattccctgaacccaataggatgtcacagtctgcataccttcacaccatggcagtctggcttcttccctctcaggcctgcagcctcatgctctgggcttccctggaagctggtgttgtgggggcctgcagttgccaccctgctgtgtgtcagcactgctccctgacgctgttcatccactgacctccattccttggcccagctgcccaggcatggcagactacacgcaacctgggttgtggggaccaggcggagccagcagcactaggacctgatggccaaaacactcattttaatgaaatcatactttaattctgttttgtatcttctcacataaaatagctagatctcttttcctagtagtacaaacttatctatctgccttattttgtataagagtggtattatatgaatacatcattgtttattcttctattgaaagcttttatgttgttttctgggtttttgttattatagttctgtagtaatatgtcttatgtacttttgtgtaaatagttctataggctcaatctccagaattgaactgccaattcttagtaaaggaaaatttaacttttgatacattttaccaaactgccccttcaggggattctaccaaatcatattctctgtttaaatgtctttttaagctttgccaaactgatatatttaaaatggtattttattgtttcaatttgcagttttagaggtaatgttgtaattctatatcttttcatattatagtgcatttatattttcctcttctcttaactccttgtttgcctagctttctttttcttttggttggttcaatttttccaactaagttttttcatgttgtttttttttttctttttcctttgtatttgggaaataaatccttacttgtaaatacttcttgcagtttgtccattgactttttttttgagacaggatcttgctttgtcgtgcaggctggagtgcaatggcatgatcacagctcactgtagcctcaaccttgcagccctctggccacaggctcctgagtagctgggactacaagtgcgcaccaccatgcccagataatttttttaaaaaatttttttgtagaaaaaggacctatgttgcccagactagtctcaatctcctgagctcaagtgatcctccctccttggcctcccaaagttctgggattgcaggcatgagccaccatacccagcctgtctgttgattttattttcggtgctttttttgtatatggaactttttctattagtatttagtcatatttgttagtcttgtcctttatcccttctagcctttaccttatttagtaatatcagatgatgtgtttcatatgggtctaatttatgcattcattcacttacagaagctaatcatttgagtcctagtgtaccaagtatcttagatgatgggtcattgctgactgtacaatctaagaagaatcttatttgcaacaatgatgctttagcgtagcagcagaccaaattctctaggatgattagcagctaattctgaatattgctgtaaagtcatagtagcatgtaacatgtacagcaatagtaaaaacatgtaacagtttgttccttcctaaaattttgttaatttagtcttttatgtgtccttatatttataaatattagttttgtggctaaaatgtgtacatttttccaagttatagtattgagaagcatagctagtagcatttcacccaacagaaaaaattcctttagataaaagccaaatcacagttggcctcattctacatactgttctacaaattacaaaatcagtaaatgtttattgggtacctgtttttattgctaagctcttgcaagagaaagagagaggtggtaggatttttttaaggtgcgagctattatcctatttttaaagagctcataatctagtttggaatgtttggcataagtacatccaaaggtaaataataaaacaaatgataattgctcaacaatatgtaaagacccccctctccaaaccaaaacaaaacagaacaacaaaattgtcagtctcttctgtgagcagtattatctgctgaggacatgttactggtcgaagagctttggctgcagtcattcctagaatgcaaaatgaaatcatccaaaaaactgagagtggccagttttactagtcaaatggagtaagtggtcatctgtgagtttgtgaatctgtctgccagaatatatttattttcttgcttattccaccagttactccttcttgttaaagctttcaccgttattaaagagaagtacctcctggaaattttagcctgctagatgttgtcaaacctgatagcacagtgtgataggctaagattctttgttcatttgttttggatagggaaggaaagacacaatgaaaagactaggagtctgaggtgagggaagatgatgaagaatatgaatcaagggatcaggcatcaagataaccgttcatttatttaaatgtagactttatctgtcttgatcaggcatcaatataacctacatttatttaaaagtaaactttatttgtctaatgtatgtgttcctaatccctgaatctattcatttcattgaaattgatgagtactttcaatacaaatagttacaatattttaagatgttcactgtttataacatcattatatgagtccatgttaaaccagagaagcagaaccagtagacaatatagatttagagatttgttacaaggaattggatgatggaagtatggaggctggctaagcgagtccaaagcccagtcaagaggaaagcaggctagaaacccatgggcataagctgtttagagtccctcagctcagggaaagcctaagctctctttcaaagggctcacctaactttgccttgtaattttctataatggattcctagagtttaccaactaatatgacggtctagagttacatttaagtgaaatttgattgtgagattgtattcttaactgtctatatctggtgctcttgagcacgtatacaaccttctcgccttctctaggtccctaaaagtcatttcttaattcaaaaaatatttaaatgcctgctatgtaccaagcacttctcttgatagagtggtgagcatgacaatctagtagaaaagtgagacagggaaacaccaacattactgtggaaaacatagttacaggggaagtagaaggacattagtcatgtttttttcttcatgacccactgcctaacacatagtagatgcttaataaatgccttttaaataaataagaccacatggcatttttaaaggagtaaggacctctttaaaaataagtatatatggggaaggaaagagatgatgagaagactaggagtctgagtcttgctacagaactagggtaactggagctagtagaaaagcaaagaagcttctgatttggggatggattcaagagtatattgggatgggtgcaaacactttcactgattagcagtttacatatttccttcaaggatagtcttactctccttgtcctaacttttaacctttgcttcaaattagtttagcagtttgtactaagaggaattgccagtgaccaagtgaatatgatatacatataaaagaacagagaaaatcaagtctttactatgttgctgtatcactaattcaggcttccagctaaatgccagaacataaattaggtcccttatcaaatctggcacaaaaatatttaggatcctttttaatatagtacatgtgctttcaataaatgcctgctttggcaaaaaataaaaccagtgttttttgtgtcaagtacaagctgttgtactctgtaacttttaaactgtccttgtgaaccaggttgagggtaaaattaaatttggattttgtattcagttttacaatcaacaaataccattttttttctttgtgttgtgttgtcttatgggtgtttgttttattttggtttggttttggtttggttttcacttagaacaaaattcaaaatctactaaatactccctagccacactggcctgttttcagtttgagatttttttatttttaattttttttaaagatgacatcccactgtgttgtccaggctggagtgcggtggctattctcaggcatgatcatagcacaactacatccttgaattcctgggctaaagaggtcctcctgcctcagccactcaagtagctgggactataggcttgcacctccacacctgacttctttctgtttttaagacagttgagctctttcacctgtcccctcaaactgtttgtacatgctcttccctctgccttgacctatttttacatcatgttcagtgttactcacccatcttactctcactaatttattaagtctcaaatattttctcagagattctttattcacccatgcctccatatctcagttagatctcccttaaaaatctcttctgtgttactagttcctagcatatagtggatgtgtgataagtgaaaggatggactgaaacatagagcacatacaataggtatattctagtcattataaaatgtcctcaaggaactttcttaaatctgagttccaaagggccatgttattttgtaaataatattcttacttttactttagggaacaaaatcagcatttttaaatgaaatagatttaaaaatataggcatgtacattgtataaatgcatgtatacatatgtctaaatatggcaagttgcaaagtaacatgaataccatgattgctgtcataaaccttgaaagccactgtgttagtggatactgttgtataataatctccaaataagcacgtctagaaaacaacctgttttacttatcaatttccccaaacatctctctggtgactgcgtctttggcttcttttttatttatttatttattttttattattatactttaagttttagggtacatgtgcacaatgtgcaggttagttacctatgtatacatgtgccatgctggtgcgctgcacccactaactcgtcatctagcattaggtatatctcccaatgctatccctcccccctcccccaaccccacaacagtccccagagtgtgatgttccccttcctgtgtccatgtgttctcattgttcaattcccacctatgagtgagaatatgcggtgtttggttttttgttcttgggatagtttactgagaatgatgcgtctttggcttctaagagttctttgctgagagtaaagagccagaatctcagaaatcccccagaaagacgatttaagttaaatgcacccatcaagctttgaaggaaggcggcttaaaaaaagaaaaacactatattacattctacttttaattttcaaaacctgaaaaccttctcaaatccaggaaaactaatggtatttccatctattctctttgatagcccacaattcctatgattttcttagcatcccataatacattttgcttttatccttttactgtttttcttcctagaattttctttcaaggtccaacacagaaatcctttttctcaacaaacctttcctgactaaccctgtttccttttttaaaattctttgcattttctcaacagtttttgatatttattttttaacgtttgtatacaatactataatacagtcagttatttataactttattttgtgttagaagtaggttttttgtgtgtttgcattcttcctaattttacatgtgcaaaaagttactttaatcttatttttcttaaatgaaataatccaattttaaatccctttcctggagaattaaatataagtcattttgggggtgctttccttcacctcccccagaatctcacacaaaataaaacattcagagaattaatcgcccctgccccaccccaccctaatcttctgtccatgttggctgtcctgagttgtccactgttaaaccacataatcccttatagttcagtggctctgttgcttcttaggacatgaacatcttggccaaggcttcaatagctttctgtgttggatattttctcctggcatctccagatagactttttactcttttctttccctattctgtgcccaaaggccctgagaaaattgctaagtattagtaacatggagaaaaaagggatatagtttctgggactgtaaattattcaaaggatagttttaaagctctgggaaagtttggtgaaagttaaaaacgtgttcagagaggaggagttggagcctagtcaagtcacaaatcttctaattcagccaagctctagtagcactcctgaaacattactactatatccttaacatgtgcttttttagttcatgaaacaatattggcataactgttcccctaacaacttaatgagaaagttaaagattttaacaactcaagattgctgcctatgatacttatgatttttaaacaagttgtcatatcaataataataataaaaaaaccataaacctagctgggcatggtggctgacgcctgtaatcccagcactttgggaggctgaggcgggcagatcacctgaggttgggagttcgacaccatcctgaccaacatggagaaactccatctctactaaaaatacaaaattagctgggcatggtggcgcatgcctgtaatcccagctactggggaggctgaggcaggagaatcgcttgaacccaggaggcagaggttgcagtgagccgagatcatgccattgcactccagcctgggcaacaagagcgaaactccgtctcaaaaaaaaaaaaaaaaaaaaaaaccatgaaccttcctttaggaaatagagcaatgtagtataaccccacttgcaattttatttttcagattaatgaatatgattaaaattaagatggaataaaaattaaaacaattaaataaaatacaaattggttgtataataaagacaaaattgttatcttgagacacatgttgcatctttccatatgttctaaaattccttaggaacttggcacaagtgctgctgaaataatttctgactgataagtggcagatgccttatcttttattgtggtattaattctaaatcccatcaaataagacaatgcatgatacaaaggataaatttataagcatttgcctcccaatttagacacagaatcattatcatagtacattcactttcaacttgtttctatgttctttctctccttcacatctggcctcttcatgtttttattttctctctctctcttttttttttttttttttttttgtggagacagtctcactctgtcacccaggctagagtgcagtggcacgatcacagctcactgcagcctccaactcctgggctcaagtaatcctcccacctcagcctcctgagtagctgggaccacagacatgcaccaccacacccggctatgtttttgatgtcttgtagagacagggtctcactatgtgagaggctggtcttgcactcatgggctcaggcagtccttcctcagtctcccaacgtgctgggattacatgcgtgagccaccatacctgggcctgttttctctttcttttcattctaaccataatcacttatctatttatggtttttgtttctatttctgaatacatttaaatgccagttataaaatcagaaattcttatttgtgcttaaacatagtaagatttagcagtagtttgaacttcaacatgattattaaatgtggattttaatactagtgatgattcacattttccaacttttatactttacaatttgtttttcttgatgagagtttaggtatctatgaatgaggagaaaagttaattgaattttggcttctagaaacaagtaattaatcttttcctgttaccttttaaaaagatactttactttttatagaaagatagcagtagaaaagaacaggtatttaaatctactcactgacttagaccaattatttcataatggaatctctacttctgtgaatatgtgttttgcttaacgagacctcctaaaaactcatttttatggtcattgaattttagagttagaaaagactttagaaagtgttattagcctctcattttttaaaaacagtttgtatcttgcccaaagtcacactaggggtaaagtaagaggcaaaggaagaactggaattcaagtttctagattccaagtccaggactctttctttttatctcattattttatgaaacatggagagcaagctgattgttcatttaagttcattacactgtatcttggaatttgtcatttctatgcttcactatttaaattaaaatattttatgtttatcacctgttttttgatctgccatgtaagaattttcacttattgtcttccctttaacattgagtctgcatactgctgctaaataatctttctacagtatagtcctaattatgtccctcaaaaaccataatatatctcaccccttctatcagccacatagttaaataaattaaatccaatcatttaacccattgcagactaaatctgcctttcaaatcttagtactttccactcctctgctcatattttatgggccaggcaaatggactacttacttgctattctcaggacacacgtctcatttttcataccactctatcctttcttatacatataacaactttgcctaaaattgtgcccatttgttgagactttgatcaaatttcacatttcccatttcttttgttctctctctctctgttttttttgttttttttgtttttttttttttttttgagatggagtctcgctctgtcgcccaggctggagtgcagtggcgcgatctcagctcactgcaacctccgcctcccagattcacgccattctcctgcctcagcctcctgagtagttaggactacaggcgcctgccaccacgcccagctaatttttttgtatttttagtagaggcagagtttcaccgagttagccaggatggtctcaatctcctgacctcgtaatccgcccgcctcagcttcccaaagtgctgggattacaggcctgagccaccgcgccaggccctattctctctctttttaattccaattacagtgtagtacaagcttgtccaaactatgacccatgggccacatgcagccctggatggctttgaatgcagcctaacacaaattcataaactttgttaaaagattatgaggtgggtgttgctgggtgtgtgtgtgtgtttagctcatcagctgttgttagtgtttgtacattttatgtgtggcccaagacaattctttttcttttaattgtgaccaaaggaagccaaaagattggacatcctttatgtattatattctgactttaaatattgctttccccttaatttttttttcattgtcatctcctcactttattgcaagtacagtcagcatcaatgttgagaactttttctcctaggaggtacaggatttggctctgatacggtgttgcctccacagttgctcagaatctaggctccatctgttacaggaaaggggtcctaatccagaacccaagagaaagttcttggatcttgcacaagaaagaattcagggcaagtccacagtgcaaagcaaaagcaagtttattaagaaagtaagagaataaaagaatggctactccatagacagagcagccctgaggactgctggttgcccatttctatggttatttcttttttttttttttacatgttctattttttaataaaaatatttatttggtcttatgaatacagaattattttatttttatttcaaatgcctaggtattataattctgtataatagttatttgtactttttatatttttatcttttttttattatactttaagttttagggtacatgtgcacaacgtgcaggttagttacatatgtatacgtgtgccatgttggtgtgctgcacccagtgactcgtcatttaacattaggtatatctccaaatgctatccctcccccctcccccaaccccacaacaggccccggtgtgtgatgttccccttcctgtgtccatgtgttctcattgttcaattcccacctatgagtgagaacatgcattgtttggctttttgtccttgcagtagtttgctgagaatgatggtctccagcttcatccatgtccctacaaaagacatgaactcatcattttttatggctgcatagtattccatggtgtacatgtgccacgttttcttaatccagtctatcattgttggacatttgggttggttccaagtctttgctattgtgaatagtgccgcaataaacatacgtgtgcatgtgtctttatggcagcatgatttataatcccttgggtatatacccagtagtgggattgctgggtcaaatggtatttctagttctagatccctgaggaatcgccacactgacttccacaatggttgaactagtttacagtcccaccaacagtgtgaaagtgtttctatttctccacatcctctccagcacctgctgtttcctgactttttaatgatcgccattctaactggtgtgagatggtatctcattgtggttttgatttgcatttctctgatggccaatgatgatgagcattttttcatgtgtcttttggctgcaaaaatgtcttcttttgagaagtgtctgttcatatccttcgcccactttttgatgaggctgtttttttcttgtgaatttgttggagttcattgtagattctggatattagccctttgtcagatgagcagattgcaaaaattttctcctattctgtaggttgcctgttcactctgatggtagtttcttttgctgtgcagaagctctttagcttaatcagatcccatttgtcaattttgacttttgttgccattgcttttggtgtcttagatttgaagtccttgcccatgcctatgtcctgaatggtattgcctaggttttcttctagggtttttatggttttaggtctaacatttaagtctttaatccatcttgaattaatttttgtataaggtgtaaggaagggatccagtttcagctttctacttatggctagccagttttcccagcaccatttattaaatagggaatcctttccccattgcttgtttttgtcaggtttgtcaaagatcagatagttgtagatatgcggcgttatttctgagggctctgttctgttccattgatctatatctctgttttggtaccagtaccatgctgttttggttactatagccttgtagtatagtttgaagtcaggtagcgtgatgcctccagctttgttcttttggcttaggattgacttggcgatgcgggctcttttttgattccatatgaactttaaagtagttttttccaattctgtgaagaaagtcattggcagtttgatggggatggcattgaatctataaattaccttgggcaatatggccattttcacaatattgattcttcctacccatgagcatggaatgttcttccatttgtttgtatcctcttttatttcattgagcagtggtttgtagttctccttgaagaggtccctccttgaagaggtccttcacatcccttgtaagttggattcctaggtattttattctctttgaagcaattgtgaatgggatttcactcatgatttggctctgtttgtctgttattggtgtataagaatgcttgtgatttttgcatattgattttgtatcctgagactttgctgaagttgcttatcagcttaaggagattttgggctgagacgatggggttttctagatatacaatcatgtcatctcaaacagggacaatttgacttcctcttttcctaattgaataccctttatttccttctcctgcctgattgccctggccagaacttccaacactatgttgaataggagtggtgagagagggcatccctgtcttgtgcccattttcaaagggaatgcttccagtttttgcccattcagtatgatactggctatgggtttgtcatagatagctgttattattttgagatacgtcccatcaatacctaatttattgagagtttttagcatgaagagttgttgaattttatcaaaggccttttctgcatctattgagataatcatgtggtttttgtctttggttctgtttatatgctggattacatttattgatttgcgtatattgaaccagctttgcatcccagggatgaagcccacttgatcatggtggataagctttttgatgtgctgctggattcggtttgccagtattttattgaggatttttgcattgatgttcatcaaggatattggtctaaaattctctttttttgttgtgtctctgccaggctttggtatcaggatgatgctggcctcataaaatgagttagggaggattccctctttttctattgattggaatagtttcagaaggaatggtaccagctcctccttgtacctctggtagaattcagctgtgaatccatctggtcctggactctttttggttggtaagctattgattattgccacaatttcagagcctgttattcgtctattcagagagtcaacttcttcctggtttagtcttgggagggtgtatgtgtcgagggatttattcatttcttctagattttctagtttatttgcgtagaggtgtttatagtattctctgatggtagtttgtatttctgtgggatcggtggtgatatccccttattttttattgcgtctatttgattcttctctctttttttctttattagtcttgctagcggtctatcaattttgttgatcctttcaaaaaagcagctcctggattcattaattttttgaagggttttttgtgtctctatttccttcagttctgctctgattttagttatttcttgccttctgctagcttttgaatgtgtttgctcttgcttttctagttcttttaattgtgatgttagttttgagcctatgtgtgtctctgcacgtgagatgggtttcctgaatacagcacactgatgggtcttgactctttatccagtttgccagtcggtgtcttttaattggagcatttagcccatttacatttaaggttaatattgttatgtgtgaatttgatcctgtcattatgatgttagctggttattttgctcgttagttgatgcagtttcttcctagcctcgatggtctttacaatttggcatgattttgcagtggctggtaccggttgttcctttccatgtttagtgcttccttcaggagctcttttagggcaggcctgatggtgacaaaatctctcagcatttgcttgtctgtaaagtattttatttctccttcacttatgaagcttagtttggctggatatgaaattctgtgttgaaaattcttttctttaagaatgttgaatattggcccccactctcttctggcttttagagtttttgccgagagatctgctgttagtctgatgggcttccctttgtgggtaacccgacctttctctctggctgcccttaacattttttccttcatttcaactttggtgaatctgacagttatgtgtcttggagttgctcttctcgaggagtatctttgtggcattctctgtgtttgctgaatctgaatgttggctgccttgctagattggggaagttctcctggataatatcctgcagagtgttttccaacttggttccattctccccgtcactttcaggtacacaaatcagacgtagatttggtcttttcacttagtcccatatttcttggaggctttgtttgtttctttttattcttttttctctaaacttcccttctcgcttcatttcattcatttcatcttccatcactgataccctttcttccagttgatcgaatcggctcctgaggcttctgcattcttcacgtagttctcgagccttggctttcagctccatcagctcctttaagcacttctctatattggttattctagttatatattcatctaaatttttttcaaagttttcaacttctttgcctttggtttgaatttcctcctgtagctcggagtagtttgatcatctgaagccttcttctctcaactcgtcaaagtcattctccatccagctttgttccgttgctgctgaggagctgcgttcctttggaggaggagaggcgctctgctttttagagtttccagtttttctgctctgttttttccccatctttgtggttttatctacttttggtctttgatgatggtgatgtacagacgggtttttggtgtggatgtcctttctgtttgttagttttccttctaacagacaggaccctcagctgcaggtctgttggagtttgctagaggtccactccagaccctgtttgcctgggtatcagcagcggtggctgcagaacagcagattttcgtgaaccacaaatgctgctgtctgattgttcctctggaatttttgtctcagaggagtgcccggccgtgtgaggtgtcagtctgcccctactgggggatgcctcccagttaggctgctcaggggtcagcggtcagggacccacttgaggaggcagtctgcccgttctcagatctccatctgcgtgctgggagaaccactgctctcttcaaagctgtcagatagggacatttaagtctgcagaggttactgctgtctttttgtttgtctgtgccctgcccccagaggtggagcctacagaggcaggcaggcctccttgagctgtggtgagctccacccagttggagcttcctggctgctttgtttacccaagcaagcctcggcaatggcgggcgcccctcccccagcctcgctgctgccttgcagtttgatctcagactgctgtgctagcaatcagcgagactccatgggcgtaggaccctccgagccaggtgcgggatataatctcctggtgcgccattttttaagcctgttggaaaagcgcagtattgaggtgggaatgacccgatcttccaggtgccgtctgtcacccctttctttgactaggaaagggaactccctgaccccttgcgcttcccgagtgaggcaatgcctcgccctgctttggctcacgcacagtgcgctgcacccactgtcctgcgcccactgtctggcactccctagtgagatgaacccggtaccccaaatggaaatgcagaaatcacacgttttctgcgtcgctcacactgggagctgtagactggagctgttcccatttggccatcttggctccgctactttctttctttttttttttttttttttgagaaagattctcactcagccaccaggctggagtacagtggtgcgatctcagctcaccgcaacctccatccacctccgacattgaagcgattctcctgcctcagcctcccaagtagctgggactacaggcgcatgccaccacgccctgttaatttttgtatttttagtagagacggggtttcaccttgttggccaggatggtctcgctctcttgacctcgtgatctgcctgcctcagcctcccaaagtgctgggattacaggcatgagccactgtgcctggccattcttgctactttcatagcaaaacatttggctttggctttgctattctgctttattgtactctttgatatccagtatctaccagtaatgtctggactgcatacatcgttgaaaatacaactgtaattaaagatttaaatgcaatattctttcaggaaaatctctttccctgattttgtttgatattggaaatgaaacaataccataatccttcaggataacttcccacagcaggacaactgcaggaatggcacaaaatatgaattgcataaatactcttatagaacacatcagactagcactttcccaagtttttagtcagatctttgctaccatccctgaaactgttaatgcatatgagtagaaaaattttttacctttgtaagcaaagattctactactagaataatcaaattaactcattctaatgcacatttacttaattcatactatgtgtgaggcagttttaggatgtgatagaaaactttgttttgaagaagctgataaactaggtgggggggaaacagagtacaaataaattataatgcaacataagaaatagcataatagaagaatattcagaccactaaagtcagtcaactctgatccccaaaattaagtatgaaccacaaaaaaatcaagtcagtgtcaatctaatgcagatttatttgagggcttctcttttcttctttgcttaatgtaggtgagtgctttatccttgctatttggtaaatcagcaaggatttattatctattctttgcagagtagtatgttagatgctttgaggatactaaatgaaaaagagtttctgcaccaagaatgtataatctagtagaggagataagctatctatacaaataactgtgtctgcagtctgcacataattgttataaaagaagcctttacaacttgagccaaattcttttacaatgcagaaagccactcctggaggtagagaaaggagagaacatgaacaattcaagaagacttctgttatgcaaaagatggctgaactaaccctggagggatgggtaggattttgacaagagtggttgaaggtattctaattcacttagtacctacatgtgcgaggcagcatgaaggcaaaaaagcctggggcatgttcagagaatagcaagtattctagtttgagtggcacctggtacgtatataagggaatagtaaaagatctggctggaaaggaaaagtaggggcaggttacgaaggacctctgaaagtcagactgtggaactggaacttttatcaggaagcagtagttagttttttcaagcaaaagctaattagagttgatatttaggaggatgaatctaacagttgtgtgcaaggatgccttcaaactgagtgagactagtactggagactggttaagagactacaacaataacctgagtaagaattaatacaggcctgacctagttttgagtgagtaggattggaaacaagagttttaggtattataggatttatgcatataaaatggacttgacagaacttgaagaaagagaaagtgtcaaaaggacacagaaagtgaggcaggatatcttacaatgttaaaggaaaggaataatagaagttaccccccaccccagagaaaaaaaagtaaagagaaaagattggaaagttaaaaactgaacttttagagaaagactgcatttagggaatgtagcaaataagataagcaacagaaaagtgagagaatgggaataaagatatgcaacagaaaagaagggaagagagttcctaggaaagggtggggaaattcaaattctaaaatatcgatgaagtctcatttttcatgtattaaattatccagtggagttggaagatccaaaagagagcaattaaatatgctagagtgcatggggaaaattgacaaaagacctaaaagaaaaatatttaaccacaaaatgaaaagtaataggagatgctaagaaattttggatgggagttaaaattaaatctctgaaagaataaaagggaattaatactcaatttatatcttaaataaatatttctaaatgttacactatgcagaaatccttcttccctggaaaaaatgagatcaagtcctattcaaaaaggtcaagaagaaagactgaggttggtgacccgtgagaaaagtttctgagataagtgtaggtggaatttgtagtattatttatcataagtcagatggctgttaacaaaaagttaattttacatctcatctgttagcccagtcgctttataatgttcggtacaacagaaatgccactactttgtaaccacctaaatgctgtattaccttcaatttccattgtgttgttgatacccaagcagaactcattctttgtcatggagactacagaataccacaagcaggcactaaggttggataatgtgttatctcacattctgaaaggagggtctacatggtagatacatttcttgattctgttttgggataattggctcctaagataattggctatttcattattaaatgcagtatgaactttgcagaagtattcagtatctcttaaaacctgtttcttttccatatagcagtggtacctactttcaatttagtatttattcaccatctactacatgctccacttagtgttttgtattatttctctgtgtgtgtgtgtgtgtgtgtgtgtgtgtgtgtgtgtgtgtgtgtgtagtctaacttgtacatttggccaatttctttttcaagcatgttagatttttctctctgacttctttgtagatgtggggtagttttgttttttacttaagagacctgtattgattatttctatggctgtccttgctaattcccactggccattgtgaaaaatcttgtctatggtgtatttgtttctaagacagccacattacaatacactctgtacataattactatgaatcagctggcaagaaagaagaaaataatactggttattggtaatatttgttgattttatatgttagctttattaaagatttttttttcttatcttttttctttcaactattgctacctctgaagaggcttttggtagtatttagatgggttgtgctatccataggtaaaaattctgacctgggggatattacctttatttttcactagatgtaggaaagtagatgctgctctgtttttactccattttgttacattaaaaaaaaattacaatgtagtcctataagtttctttttttattttatccagtactattttagactgtgaatattactggaatttctagttctattccctcttctccctctaaaaatcaaaagtgccaaagagtagtagaccttttgtgatatgttctagtcaaaatagctaaaaactagcgctctctctttaaagttcatattcatctagaacatctcacaccttactcttaccactttactcacagtagtttaaaaaataaaactgtaccctgtatatttgttcatttttgtgttttatgtagagtttccattttgtttttactttttttcaagagtgaattttgtaaaacttccagagtagagtaagttacggccattagagtagccctggaggatgagacttatagtggcaatgattatcacaccttgacaacttgggaagggccatgggatgtggatgtggaaaatatataaaaggacattggttcacatttgaacaaagtggaaggaattattagaaaagcacttaacaagggtgctgatctctccccatctgaggtcttctttcttcttttcatctaattttaagcactgatcagtgaattctttctcattattttacataagcaggtatctaaacttataaaaaattgattatttatcttgtcttttagtgcctttttattaatataagttatttggtttttaaattgtgttgccaatgaatgaaggaagtcctgtcaaaagatatacattttacttatcttaaggctaacagccaccatgtccagcctagcaaacattttttttaatgaaagtccaagtagtatggtctctgttaagctactctacttcaactctgtctgtggtagcataaaagcaaccatagataatatggaaacaaatagtcatttgctgtattccaataagactttataaaaacaggtggcaggatgaatttgtcctataggctgtaggttgctgatcctagcataatgtattgattatacattatggtagagccctctgttggttggaagagaggaccagggaaaaaaaagtgaagatgtattagctatacagaactttctagttggtaagacaaaaagcaagaaaattacagtaatatagaatatgtaaaataaaggaggattcagaactgagtaggtaattcttcagagcatgtcaaatgtagattatggtaaagtagaatgtttatggtttaatacatcaagaactatatccttcataaaataaaatgtagctggacatggtggctacatcttagccaccatatttttacatgtacatgtttggtacaggcttatggtggcatgtaattccaacattttgggaggccgaggcaggtggatcacctgagatcaggagttcaagaccagcctggccaacatggcaaaaccccatctctactgaaaatacagaaattagccgggtgtggtggcgtgtgtctgtagtcccagcttctagggagactgaggcatgagaatcgcttgaaccggggaggcagaggttgcagtgagctgagatcatgccactgcactccagcctgggcaacagagtgagaccctgtcttaaaaaaaaaaaaaaagtgaagaacaaggtaagacacatttaatatatctgatcaagtggtcttgtccaaaaaatgtcctgatacatttttttaaactaataaatggaggattgcagacttactgaatatggcaggatcctttagcatgtaatactttaaaatggatccacactgaacttctgctggatgtactggagtaagagtggccagatttatcctccctcctcaaacaatgcaaaaaccagacaaggtatataacataagagtttttagacactagacaatactgggcagtgatccctgagagaaaatgaatgaggcatccctacaatttccatagcattctgcctagatagcttccagtctgtagtctgcaggaaggagatccaaaacagaaagaacccagtggcccaactgaatggagacaaagccaaggtggctagaatttgcatgagacagtgcgagagaagacagagctccacagagatagagcacacacactggatatctgcagagggctccccttgatttttaagccaagtactgaaccacataagtatgctaggaaactacttagggacagggataaagccactggaaaggaataagtggaacatttcctgaactcagataagattaataatagtttatagccccaataatcacagtggaaaagcctctaataaattggacatcttttttagtactcaaaagaatattacatcagttggggacaatattagctctagattaagagctgctctcatctcacctagtaaagcttctaaataagcttgtaaagaatcaagttgtttttgagtaaccaactgaatttcagagtaaagttagggccattagagtagccctgaaaatatataatgagaaacaaaatatttgatatggtttggctgtgtccccatccaaatctcaccttgaattcccacgtgttgtgggacccagtgggaggtaattgaatcatgggagcaagtctttcccatcctattctcatggtagtgtataagtctcatgagatctgatggttttaaaaagaggagttcctggccaggcacggtggctcacacctgtaatcccagcattttgggagtccaaggcaggtggatcacttgaggtcaggaattcaaaaccagcttgaccaacatggtgaaaccccatctctattaaaaatacaaaattagccaggcatggtggcacacgcctgtaatcccagctacttgagaggctgaggcaggagaattgcttgaacccagaaggcagaggttacagtgagctgagatcatgccattgcacttcagcctgggcaacaagagcaaaactccatctaaaaaaaaaaaaaaaaggagttaccctgcacaagctctctctctttgcctgctgtcatccatgtaagatgtgacgtgctcctccttgccttctgccatgattgtgaggcttccccagccacatggaactctaagtccaaataaacctctttcttttgtaaactgcccagtcttgggtatgtctttatcagcagcatgaaaatggactaatacaatattctacacctaaaacataaaattcataatgtctgttatccaatcaaaaattacctttcattacctgagaaaggcattgttaaaaaataaataagtaagccaggcacagtgacaaatgcctgtagtttctagctacttgagaggtggaaacaagaagatagcttgagcccaggattttgaggccagcctgtgcaacacagcaagaccctatctcagtcaatcaataataaatacacacacacacacacacacacacacacacacacgtatatataaccattcatgcgaagaagcaggaaaatacaacccataatgaggagaaatattaatagaaatggatttagaaatgatacagatgttaggattcgttgacaaagatgttaaaacagcatttctaaatatattatgtatttcaagaaggtaaataaaaacataatcctattaaagagtaatgtgggaaatgtaaaaaaagacctaatttctagaaataaaaaataccatgtctgaggtgaaaagttcactgggtaagatgtggcactacagaagaaaagattaaggatcttgaagacatagcaatagcaattgttcaaaatgaaacacctagagggaaaaaaagactggaaaaacaagcagtgtcactgtgagctgtgagacaactttagatgatcaaatatataaagactacggatggggcagggagacagaaaaaatatttgaagacataagggctgaaatttttccaaatttgataataactgtaaacccacaaatccaaaaagctcaacaaaccaaaagcagaagaaacactgaaaagctacaccaaggaacataatcaaattgcataagatcagtaataaagaaaaaaaacttaaagtagctaggtttctaaaaacaacaacaacaacaacaaaaatgcattacatacagagaaacaaagataagaatagcagcagtctcctcaacagaaacaatgcaagctagaccttggaacacagaaggaaagagaatattaacccagaattctagacccagtgaaaatacctttcaaaaacaaaagcagaatactttttcagacgtataaaacctgaaagagttcatcagcaggagaccattcagaaagcctcagatctaaatgctgcctgtaacaattacctgctgtatggccttggacatacttgaatctctctgaaccttcaaattttcatctgtaagataaaaataatgctaatttttaggggtttcgtgagaatccaatgatagaaaggaaaagaactgacattcattgaatgtcttctttataccaaccacgtattatctcattaaaaatggaaataacctgcctgggcaacatggcaaaaccctgtctctacaaaaaaatacaaaaattagctgagcatggtggtgcatacctgtagtgccaactgtttgggaggctgaggtgagcctgggaggttgaggctaaagtaagctgtgatcctgccactgtattccatcctgggcaacagagtgagacccaatctcaaaaaaaaaataaaaaataaaaatggaaataaaattcccaataatagggctactatcctaacatttttcttatgctagcctctttcttcttgttctttaatactaaaaacttgggttgttctgaaagaaattagtctaagtagcttgtctgtcttacgttttgatgaagcactttttcctaacttaatttgttctttagttaccagattaaatatgcttaaaagtgggaatgaacaactctccttgctagaatagacaagtcagttaatcactttgtgaaacagttaagtttcttgtaaactgcactttatttttttgcctgtgttttggctgcttaatttttttcagttatgtttattgaggtataatttatatactgtttatctaatttttattataaacctattggatagaggcatgagtgtctttatagctgtgcattgccccatagagtttttggcactcaataaaatgttaaataatatttttattcagcattctgtagacgggaagcatatggtaacaaatgtcagagcacaggttgaaaatctccaaaaagttatatgatatattctttggaaaagctagtagagatacttttgtgaatgaaatttctcttaaaaggggttcccagactcacattttatgcaacaaatttctccagccttcagttactttatttacaaattaaagtttttccttatcagaaataatgcataagttaaaatagtataatactaacgtggtatcataagaaagtatataaatggtttgatagataacataaagtaaaggtaactcatagtttgaaggacagcatgagaaaatatttagaagctttagcagtataagtctttatgttgtgatatattgtatgaaaagaaatacacagtggatagttctttattgttaaatttcagcatgacttagttatgtcactgctacagctgttgcagacattctagtggtaggagactttgactcaatattgtttttctcacctgaggattctagcactatttaatactcttattttagtgtcagaaacaatcattgcttcagaataacagaagacattgtgaattaaaacttcaaataaatttcatgcaaaggataatatctcccggttaatctgtgttgaagaaatggttgaccataatcaggtatacaaagccatttagatagcatatatctaaattttctttccagaatttgcttaccctctgatttgctgaccacacttgctttgaagttttggtttttgttgtcttgctatgttgcccaggcatgtctcaaattcctggacacaagcaatcctcccacctcagcctcccaaaatgttgggattacaggcatgagccactgcacctggccactttgaagtttttattaacataatttgaatgtgaaattacctgagtttttcttgttaacctcatgtataaaatgtgggatagggaatccaggcactgcttacttagcttggtgcctctggctctcataagacttttaataaaggtgtcaaccaggtttgtagtcatcttgctgctcagctaggggaggatcttcttccaagcccactcatgtccggtcacagccctcagatcctcactggttattgatcatgcaccactccatagtcctcacaacattgcaacttatttctcctagagcgagggctcagagagagaaggcttgtgatcaagaagatgaacaaaacataccatcacttttgtcatatatttgttaaagcaagtcactaggtctagagcacattcaaggggaggagaatgtacaaggatttgaataccaggttcaaggatcattgaaaaccattttgaagactgcctcctacacatataatccacagatgggacagatcattaaagtactctaggtgctctgacactcatttgtttatcctgagatcttaacaagaacttgaattcaataggcaaaatgatttcagtttcacataaagtatttcatttattcctagcaacaatgcaacgaaataggtatggttaaccccaatgttattgatgaagaaattgatgtactgagtgactggctcaagattacatagcaaataatttgtaaaactgggaccttagtgtaggccttttgattctagaccctgtactctttccattggctataattgcttcctaccagtactatgttgcacttaaagccattcaaggagaatattatacctctaaatttatatacaattatatgaatttttattatacagagatttttatacatatatgtagagaaagacagacacccccctgtcttaatctctaacctataccactccgtttaggagttatagtattattgagtcaaagtctaatatcattataaggcctgtaacagctgtagcaatgacacacatgtacacagatgctagcagcctaaaactacacttaggaggtaaatgtttgttgcatggagagatgaagaagcaaagtaagaaaacagacctggtctggtggctccattcccccttggcttgtcagtatacagaaatcattgtgtttctatataactagtaacaaataattggaattgcagtgagtatgggcaagttatggttttagtttaatattgattatagataattctactttataagtaagaacttgtgttatcagatgaaatatagagaaagttttctcctccatagttgtctttcatatacgcaaacatgcacttgagtttctttcctttcctgcataatctgaggattgtgctttttaatagtggcttgctgatccctttaaatagctcttaatgtaagtattccatagttttcattaatctgattaacatagtttttccctaacctccattcaaaaactatatttggttgttgttttaccctggttgctgaagcagcaagcctactgcaaaacctaagtggtgtggtatagatgagagtctaagactttaattatatgtcattttattcacaacactcaattccaggaaggaaaaaatgggtctgtttttgtaaaggacatattatgtgagtatcattcattgtaaaccaaaaatgatactgtattatagcatagacaacaatgagaactgattctgaaaatgtgacctgactgagaaactgagtaatagtgaaagttatcaaaatggaaaaaaagcgttaatgtgaaatccagccttctcagaaatactctttcctggcctgtttagttttgcttttgttgcttgtcatgcatgaatgaaagtgctgtactctcaggggagcaggaaagcctctgtgtcggttgtttatttccttaatccctcctcctttgtgatttttgatgtcagatctaaaatggaaagcctgtaaatataatgattatcacacggataatcacctgcattaggaaccgccctgcttttctattctaacccgagctgttctccacatgtcacatccactctgtggttggattttaacctgactgcttcattagatttgtgaaactcagtacgaggcgccctggggcagcacagatggggacttgcttgttttcttttctcacttttactgcaaaggcacactaaaaagtccttttcaatttagtgcgatcagttcacttggaattatctctgatatttggaacctgtcttgctcttctgcccaccaactatgcctattctttcttccttactttctgacctaatgtcttttctttctgcctctgcatgtcatgaatctgacaactaaaattctgcttacaattcttactgggtcaaactgttcccccgtgttgttttgtttgttttgctgacagggaaaaataaatgttgttccatcattgtacctacaaacaccttcagatcagaggttagctgtgggaaagtctgcagtgatatgagccagctgccttctctaatggagtgacttggggcaccagtccaagatcagaggaaggtgggaggaagtcagaagataagatcattttaagccacagaacaacaagcttagcttttctagtgatagggcacagctcagcaaacctgtgtgagggggcactaagacaaaaaattgagttgactttttttaagtacatctttcctcagtcagaaatatgttgatgcttgaaatagtttacagacatggaagtgtcctagggcctggtttccttaaaagataatgatttgacatttatatatgtgtcttcttgcagttagtcagctccataccataacagatcacagttaatttttaaaaataatttttttgggctgggcatagtaactcatacctgtaatcccagaactttggaaggccaaggcaggtggatcacctgaggtcaggagttcgagaccagcctgatcaatatggtgaaacccccatctctgctaaaaatacaaaattagctgggcatggtggcacacacctgtagttccagctactcgggaggctgaggcaggagaatacctttaacccaggaggcggaggttgcaatgagctgagatcgcaccactgcactccagccagggctacaagagcaaagctctgtctcaaaaaaaaaaaaaaatatatatgtatatatatacacacacacatatttatatacacatatatatacatatacacacacataaattttttacagttaatttcttatatttgagcaaaactggacattaaaaaaattttactgtatgtgaattttgagcatttatggcttagtgcaattttagtcctacacattcttcctttgaactttgtcttacagtcccctggggttctctcatgtctctgatgaagttccatataaataagtggttctagtatagcttttttgttgtctttttcatataagaatttgcttggttcagagtgacagcttgggaagcactacatcaatagcttttgaaccttttcctattccttgatatcaccgccagcaaatgttactgactatgtgatgtacaaagttctaaccttgcttgcacaaattgaccagttgtcaagatcaatatttatttgcttatttttgtctacatgaactaagggtaacttggtcaggcttatgtttctctagtaaatagcgtaaggagttgtactttcaacttaacacttcctgttgacttcagtgtttagctgtaatcatacattttgacctttctaaatcctcaaaatggttctctaacctatatgttattagtacattggaccataggtgcatacatgtatttttttcccaatgttttcccaaatttctgctgaagacactgactgtactttctgccttacatggcttgatgctacagtcgttttagttgagttggatctgctcactactcaggctcaaatcccatccttctattaatatctcttggcaaagataattttggaagaatgtgagttaagatgtagagactcttgacagttgtctgcagttttttttttttttcattttcaagagggaagtagagttgaaaagtaatattgcctcccttttctatctgtcctaaaattaaagtataagcacaaagagtgaagaaagggaaaggatttgattacacatatgtatttttgtcatttagtaacctgttataagagccttagggtatataataatcattagattgtgtccttaagatatttaaaatctagaagaactttgcatattaaaattttttaaccatacatatttttaatgctcaactgtttttaccctgtcatcttatattaaagaggatttttggactgtttattataaaaaatttcaaacaaaaaaggagacattggacccctacatagcacatacatctagatttaacacttgttaacattttgccacttttgcttcattttaatttttttctgcagtattctaaaataaattacatatatcatgacatttcatttctaaatacctcaggattcatcttaagaattaaggacttttaaaatcaaactgataattcctaatattacctaattttcatttcagattcaaatttctccccttgtcccaaaaatgtcttttatagctggtttgtataaaccaattaaggtttatacattgttcttggtcattttcccttttctactttacattacattgacttgttaaaaacattaagctagttgtcctacagaatgtcctaccctatgaatgttttcagttgctttctctgtgtatactttaacttgttcccctatcctctgtatttcttatagactgcaagttactggactaaagttttgattaattcatattaaagtatttaggttagaatactttataggtgatggtgtgaacttcacactgcatcacaacagaaggcaaagaatatttggtgatcccactattagtgatgataagtgatagcatcgatcactgggttaaagtgatgacagcttgatccttccattataaagttatgctttgctcccgtgaccagcatataatctgagatactttgattccatggaaatacccagttccctatcatcctttttacccaatgagtttaacatctactgaggatccttgcctgcataaatttcgttatgaggattgcaaaaagatgatttttctgaatttatacatttattagcaggcattcttctctacataagagctttttgagaggtattgttttaattaaaaacacaaccaccagcatattccttggattgtctttctttgctgaggtcagaacacctgaactcactgtggcagctacagtaaaaacatgtactacatcttctttattccaacttgtgaagtgtgttgacattaggctgcctttttttattattattattccaagggaaaaaagaaatctttattgctgtaagaataaaaattgaactatgtgggtatattgagataattgtgtaaagaagaagactgaatgagtttcaaaaaatggattatttcttcattaccgagcactttataattaactgttcttttttttttttatttcaggaagctgccacttttgctagagagcaaggctttgaggtgagttaacccacaattgcacactaaacagatcctaaaggttttttctagctgataatgaagttcttttggacagtgattgatgtgctattatactctcagagcctcgcagcagttgccatggaaacttggcagtcgtcatggtttctttgttctgccagcacagtgttatgacgcactctgctaggtctgcacccaacatcgcctacagatgttatttattgaattttgaaaagcctcttgggaagccaagaggttgggcacggtttcaagctgcctctgcagatatggggcctgtcagtttgttcagttaaaaagctacctcattagctgcattacatttcataaggattcactgctaaagcagtggtggaacaagactaaataatgaaatataatgtcgtttaaataatttcagccctatcacatgtagattatcattatgcaaattaatttctaaaaggttgtacttaacagttgttaggaactgattaatttaaatcctgcttttataaacttactctttgaacctatcttttcttctctctccctctttttttctggggagacggaggtagcataaaatatacatacattttctgaaataaaatatcaataattggatttaatttctaggtcctaattctgtttttctgatataagtgttatcctgtcaagattcaaaactccatgtggttgttgttggcaaaactgagataaccgtgttttttatctgtataatacccctcttccaactgattgttagaaaacactgactaatatgaacccaggttaactgacagagaattaactaagttggagttgtttatgactatgatatttattgagtgaactatgtagaatgctgtgttcttacagcaacttaaagtgttacagggtagtaatttttaaaaatttaatctaaccacagccgaaatgtaggaactttctttttatttgcatattcagtattgtctatcaaacagggaagaggtgagtggtgattgaatagtatcagtaaggactagtaagctcactttgaactctagagaaagatattatatgagtttgtgaaactctttttaaatgtagtaaaggcagattatcaagcagcaaagtaatacatgttcatgttattcatgtcatcagacttgacaaacgagacatagagcttcctcttcatagaggaaagacaaggaacatgtgatacagatattctgttctgaagatcctataaaagaactactccagagtagggaaacttgcttctttgtactcaattattaggagctgtgatagtttcttacaagtttgcttttttatgctttaccatattatagtaaatctaggtttaagtcacatttagaaaaaggatttccaagtggtgggtttttttctaatttaagtttcacattttaatttcccaaactggcaattatatgtaggacaaaatgtaatcatgggaatattcaattaaaaagtcaaatgttttgatcatgagaatataaataaaaattttcaggaattttttaaagttttactgattttaagttttaatattacaaaaattatattatctgttgatacatcagaattctccatagaagaaaactttcagaacatacatttgtatcctgtcagtttactgtgttaccataaaaaatgtatttttggttctataaaataaccaattttgcagatacttagaaatataatttgttatataacatgatcatgatcctgtagtatctacatagcagtttttaaaaaatagtttattaagcctgattaatacttttatttcccccttgagctacttgcttttcatgtgcctggtttacattcagtcatagcaacaaactactttttctattttccattaactagcactatattcacctttccattagttcttacttactgattcttgaattgtttttgccataaatctgccataattgattacagcatataagcaaaatgataatgattataatcacataccttattacctcctgacatagcaaaactgctctgtcagtgatattgacagtgatatgttagactaaataaagcacatagtgtcttgatgtgtctcttcgtagattcccaaaaccatcacaagcattgcagaatatatttgaaccatgagtagggtaccctcaaatagatatttttaatcaaatgtaatccatgtatggaacactatctagagaaattcaatgattttataatgtcactaaagtttcctaggtcattagacagaaatggcagagcataggtttgaaacttggtattcttaaggaataaaacaaaaataaatcactttatcttaatagttttctgtgtgaaaatgcattaatactcttggctagtgtgacaaactagacaaaaatctgcattttatcccttctaactttaattttgactctaaatttggagcatgaatgagaagaaagaagtgaaaagattaaaagaaaggaaaggtgagtattttttccttccatcagtgccgctgtcctaccctcattttctcctataaatcccaatcagttccaaaagccactgagtattgccactagtgatctggctgctgacagaccaatccaagcgcctctaaaaataaccagtgtttattcgtcaggaaatattctcagtggcattttttttttaattgattattattctggttagcttctctgcaaattttacttttgtaaaaaaaaaaatctttaaactgaattcggcagttttcagtgagaagcagcagcttaggagagcactggagaatgagataaaaactggagctgggcagaacacaaagcataagagaggatttttttatatatataggtgatggaaaattgcatagtgcctgatttaaatgacagacctgctaagaatttaaaatgacaattcttggggtaaaaagttttataaggccttttattattctagaaaatcagttcagactggagtgtgtttttaaatctagcttttcttgagccgaactgattaaatgttcgtatttttagaacataaataaaaataaggtgctcaaaagcatgtttcattataaagccttttttaaactattgaaaattgatttaaataaagtgaagaaaatacctcaaaacctaaatatatatattctctatcttttcattgtctctgcaactgagtaaatgacaaatgatgaagagaattcataccttctctattggatcatttatttccttttactccaagtaataaattttagattttttttaaattttagatctctaagaataatacttctgctcataggggaaacaaagcaatccttttcgcctttttcacttcctccatagcccctgactacccagaagatcctagacttgtagtctttctctgaccaatgaggattctttcatcttacaccactgaaagagaaaagtatggaattgtgctatccaatacagcatctactagccacatgtggctatttaaattaggattaattaaaattaaataaaatttaaaattcatcacttcttggccttttggctaagatcaaatgtaaaattttaaattcagtccttcagtcatactaggcacatattgagtactctatagactatgtagctaatgactactttattggataatgcaggatagaacatatgcatcatcacagaaagtttcattgatcagcatggatagaaagtctacagagaatgtattcaggcagtgttgattaccaaagaattaccttaggtgacttttaggttcctgtgttcttcacaaatataaatagtgcaatgaatgatcactcagagtttcagagtttctgaaaataagaccctaaatcaggccctgctggctaagagagtgcagtgttgtttttgtaggtgcctgaaccccaaaagaggacaattttagaacagttcagttaagggaaagcaataagctagtcttctaattctcttcatttaatcatttatttattcaacaaatatttactgagttcttactatgtacataccactttgatagaccccaagacaaggtggaagtgaccagagagtgtaccatgaaagagcatgtgggaagggttcccattttagctatgatggctatggaatgaccctaaaaatatgaatatctagcaatgacaaaaaaaaagcgacacaaacagcaaaacaaatttcaaacagagagaacaggactataaaagtctctgaacgagagagaacttaatgtactatgtactccaggaactgacagaaggccagtgtgactggaatggagttagtggggacagcatatgagatcaatctggcactgacacatcatataaacagcataactattaaaggagtttctatttggaaaacaaaacaaaatggtatggctagatgactcaatgtgtggaaacactacagttggttttctacagaactaggtagactgtgacaggattgcttaacctttgtataaccagctggttaaaaatagaataaagattttctttatccagtctatcattgatgggcatttgggttggttccaagcctttgctattgtgaatagtgctgcagcaaacatatatgggcatgtgtctttatatcagaatgatttataatcctatgggtatatatccagtaatggtattgctgggtcaaatggtatttcttgttctagatcctttaggaatccagttcatgttctttgcatggacatggatgaagctagaaactatcattctcagcaaactaacacaggaacagaaagccaaacactgcatgttctcactcgtaagtgggaattgaacaatgagaacacatggacacagggagggcaacatcatacaccggggcctgttgtggggtggggggttggggagggatatcatcaggagaaataactaatgtagatgacaggttgatggctgcagcaaaccaccatggcacgcgtatacctctgtaacaaagctgcatgttctgcacaggtatcccagaaattaaagtatgattaaaaaaaatttctagtaatagtaacactactagtaattcaaatgaagtgtgtgtaacagaagaaataaaaaaaaaattaaaatgctacatctgaaaatacctatttcatacaaagcaaggaggtaaagaagggatagaacatatttttttaaaatatgacatatggaaaacaaatagcaaatggcagatattaattcaactgcattaataataatgttaatctggagtaaataatatgataaaaaggcagaaattctcagactagataaaaaaactgaggtctaactatatgctgtctgaaagagatgtatcttcaattcaaagatacaaataggtaaaaaaaaaaaaaaagaatgaagagagtatgttctttgatttggaagacaatgtgatcaccaatgacaataaaaccatatttctacatttataaaatgctcacagtttataaaacctttcccaacatatcagtaatacattcatacttgcacaaaccttgagagataggtagggcatgtattgccatatcagttcaacagattaaaaaaataggctatatggccgggtgtggtggctcccacgcctgtaatcccagcactttgggaggccaaggtgggtggatcacctgacatcaggagttcgagaccagcctggccaacatggtgaaaccccatctccccttaaaatacaaaaaaatagccaggtatggtggcagatgcctataatcccagctacttgggaggctgaggcaggagaattgcttgaaccaggatgtggaggttgcagtgagctgaaattgcaccattgcacaccagcctgggcaacaagagccaaactccatctcaaaaaaaaaaaaaaaaaaaaaggctctatgactttttcaaagtcatatagctaatacattatgtagccagaaccagagctcagctctctatgtctggtgctctttactataaagcacacagctttctctcacacattctaacatgttggaagaggagattagatttcaaaatgactttgagaaatgaaaaatacctttttttttttttttttaagaggagaggcaccccaacagagcaccagaggattcagaaaccatttggacagatgggagctagcgaccgccgacacgataagtagggagaaggaaacacaacacggtaataaaacatatatgaacccccaccacaccgtgggttgaggagaagggaacgaccgcacaaagcaaaggccgaaaaccacccccaaacagcaatagaataaataaaaagaaatccaacaatacagatcacaataactacactagacctccgcacaaatacgagaatctgggcctatgacggaccgtgcggagacgaacccatccaagctagtccccaccgatttgcgcgctggtaaggcaagccacagcctgagatnnnnnnnnnnnnnnnnnnnnattcagccaggcacggtgactcacgcctgtaatcccagcactttgagaggccaaggcggacagatcacctgaggtcaggaattcgagaccagcctggccaacatggtgagaccccgtctctactaaaaatacaaaaattagttgggtgtggtggcgggcacctgtaatcccagctactcagaagcctgaggcaggagaatcacttgaacccaggaggcagaggttgcagtgagccaagatcgcaccattgcactccagcctgggcaacaagagcgaaattccatctcaaaaaaaaaaaaaaaaaaaccactgaaattcgctggagtaaaaatatgagccaaattaattaagaaaaaatagcaaacttaaacacaagatcaggaatgacttgtgaatgtggtaggaaaatggtttaggatgaacatgctatagttttgtgataaaaaaaaacaacaaaaagcacattgctagcatttatagaagcactataataatggttaagtgtattatccttggagtcagactgtgggtgctagtctgttctccactacttgtatttatgaccttaggcacattacttaacgtctctgactcagtttcttcatctataaaatggcatattgtattagtacctactgcctagagtagttcagatttaatgagtactttattttattgattggttgattgattgttttgagacagcctcactctgttgccctgactgaaatgcaatgatacggtctcagctcactgcaacctctgcctgctgggctcaagcaatctgtagattcaatgcaatccctatcaaaattccaatgtcattctctctctctctctcttttttttttttgagacagggtctggctctgttgcccacgctggagtgcagtggcgtgatctcagctccctgaaacctctgtctcccaggctcaagccatcctcccacctcagcctcctaagtagctgggactataggcgcatgccaccacacctagcaaatttttgtatttttttgtagagatgaagttttactacgttgcccaggctagtctcaaactcctaggctcaagcgattcacccgcctccgcctcccagtgtgctgggattacaggcatgagccaccacgccttaccttaatgaatactttagagctttatacatggcttttagtttcttcatctataaaatagggataataatagtacctactgactagagaagttaagatttaatgagcactttagagctatgtacatggctcacagctcaattttatgagctttcaactcatacttcttactcctccctgtcttcatcttcttcgttatagatactataattgaatgttccatattcaaaactcttgaagccctttctagcgattttggggcaacctaagtatgtaaccattttagagagtattaaaatgagagtaattagaggaaataaattaatatttaagttcttagcatgtgctaaaattgcattaagctatttcacttacctcatcttctttcatcctcacaatttttaactttttattttaaaataactttagtcttagaaaaattacaaaaatagtacagaattcccacatacccttcacccagtttaccctaatattaacatcttacataaccaaagtataatgaataacagaaaattaacattaaactacaataactgaactatatacaggctttattctggtttcaaccgttttttctctagtttcctttttctgttccagaatcgaatcccacattgcatatttgtcatgtctccttagtctcttctaatctgtgacagttcctcactcttgttgttcatgaactttatacttttgaaaattattggtcagtcattttgtagaatgtccttccatttgagtttgtctgatgttttctcatgtacattgagattaggcatttttggcaggaaaaccacagaagtgatgttcctttcttggtgcatcatatcagggaggtacacagtgtcacagattcttattgctggtgatgctaaacctttatcactaggtttaggtggtgtttgctagtttatcctctgtaattcccattgtatttaataaatatcttggaggagatactactttggggctatggaaacattctattttatccactaattttagcatcactaaactaatctatctggcttaaggtgatgtctgtcaattttctctactataacattatgatttttccttttgtaatgaatatcttagggggacatactttgagactgtaaatatcctgttttctttaatttttgcccactaatcttagcatacttatccctcaaaatcttttaatgtgaacattttcttagttttgtagatgaggaaatggatcttagagaggtttattaacttgccccaaatcatacaaatagtaaatccaagcctgtcatattctaaaagtccttgtaatttcattgtttgttaagatgtgtgagcttaagtgtaagggagaagaacctattggggacagaggagaggaattactgtagaaggagaaataaagttttacatacatctgggaagaattatgttttgtacttggaaagtttattttgtcctttaattgccattttatgaggtttaatttgagacataagaaacatttctttgattaaattaccaaagctctcaacaaaatatgtcttctcacagggttggtagaaagcaaccatggaatcttattcctttttttttttttttttttttttttttgagatggcgtcttgctctgtcaccaggctgcagtgcagtggcatgatctctgcacactgcaacctctgcctcctgggttcaagcgattctcctgcctcagccctcccaagtagctaggactacagacacgtgccaccatgcccaactaatttttgtatttttagtaaagacgggatttcaccatgttagccaggatggtcttcatctctcgacctcgtgatctgccctcctcggcctcccaaagtgctgggattacaggcgtgagccactataaccagccagaatcttattcttaatttattccttatatcaccttgaagaaagactttcttttaaagaacatctagtacattcataagattctgctttcaagatgatgaagtgaatgtgtttttctcttatctttattaaatatgagctgtacttaatcacaagcaaaaatcctatagtagtaaaatatatttgtgctaaggaaattgccaaaatatacatgagtcattttaattatatgtgtacacttatttaggtgagtgaagacattgcatggcattttttggtcctttcagctgttactagtcatttctaaaagtctgtctcctgaaactgagggaatttcttctcatcttatcagagttcagacttagttctgttctaaaataagcaaccgaaagcgaaatagtcagcatgtttgaagtcagcagcactgtcctactacaaatggctattcttttcagaaacaactgtcctctagaagtcatcctgttaggtatattagaagcttagcttcatatattatctggaatttattaaatattgagtgaacaaacaatataaaaatatttcaccacaaattgtcatccctttaaaaatgccagtttctggtgacgtttgtaacgattgcaaaccattgtgacttgtctgctttgcttgcctaaatgttctctctcatatattctatttgttctcttatatatactttatttatgccactcagctatatttccgctctgataggtgtttctttctctataactatttgaaactttgcatagtgatagaataaactagttttgttagcaaagcccaaaactatggacagttttaaaagcccactgaatacagacatggattttcaaattatccaaaatggttgaaaagatgattctaaaacctctgcctttagctcaaggttaggtttcaagatttcagaaaacttcaataaagatttcagtaaaactttatggcctatgtggtgtgaaaaacagcatcagagtttgacaattagtttgtcattttttaaactttatcttttttaaagaaaattaagtctttgtaggaaaggattagcatttctttctctcaaatcagtcctttgaaaaattgacattataagaactgtattttttccaaagtcagcataattatgttctgtaaacctctaaaataattaaattttcctctttataaaaacctctctttaattgggaatttgaaaactgcctggatatttgctgatacttagtcattgttaataatttttgaagtatgataatagttttgtggttatgtttatcattacctttcaaagatatatactaaaacatttatagatgaaattatgtatagttcttggagtttactttagaataatttgaaaagcaagtggatgaggatataggtgaaataagattcatcatacattttaaatttgtgtagatcattgatgggttccttggaagtcactgtgctattctatttacttttgtatatggttaaagaaatttttaatgtctcttaatagatatgcaggtctcttattttgatcaatagaagctaaattgttaatctactaataaagttttgttttattttattggtcatgagaattttttccttccttctattaatagactaaagacattaaagagatagccaaaaagacacaagccctgccaaagatgaactcaaagaggcagcgaatcgtgatcttcacccaagggagagatgacactataatggctacaggtacatgtgggaaatgtgtgatgaatctagtattatggagattaatcaattacaaaaaaaaattctgtattctttctattataatatatacaatatacatatacaatatatataaaatgaaatattttattttaataaatatttctaccctgtatctcagtagaaaagatttcatgttcaagaagatagtttattaacatttagttaaataaaccactttgatataatttatttacttagttatcttggggattttgtcaatcaagaaatatctttcctgaaaaaaagaatacatttcatttataaaatacctgcactagagtaaaataaatttactcaattatgaacaaataaaatccagaactaagttacattttccatttttccttcaagaagaaaatctcattttttgttttatttcaccatctattttatagcactcataaaacaggaatttcatctagtaagcaaacatgttattgattaaaatgattaatagtgttaatatggagctacccactattaaaaatataaatgttttaattctgtctgtaccattcagattaaaaccaatcagttgattagttattgtaaactggagcaatttagtattacctatgtgtttgttcagtactctgctgaacactgaaatataaaataggaaccttaaagatctaactgggaattaatattcataaaatataagtacaaagtaaaatataattatagttcttatctattggtgctaactatatggattgtattgactcaggagatcagtaaatcttgaaaaaagatgttatagtgaatatgaagtacatttgtgttgaattaaatataaagcctgaaataggccaaagatgaaattactgtcaagatattttctttcttttttaaaataaattttattctttatatttgaggtttataacatgatgttataggatacatagatatatatagatcaactttcttatttcagaatggtcaaaagcaagattcagagatttgtttcaaaaaatatttgcttcaaagtagttcagtgagtggtagataaagtgagggtataaatgaaatgagactggtaatgaattaattgttgaagctagacagtggatatatgggggcatcattatgctattatctccacttgtggatatgttttaaattatccataattaaaactttaaaaaaagaaagaaaagtttttttttttaaatttcaaacaagattcagagatgttgagtggctttcccaagatacattgatatccttgctaatccttaaattctaggaaggattaaaagaaaggaggacaagtgggcacagtggctcacacctgtaaccctagcaccttgggaagtcaaggtgggaggattgcttgatcccaggagttggagaccagccttggtaacagcaagacttcatctctacaaaaaaaaatggaaaaaaaaaaaaaattagctgagagagtagtggcacatgcccatagtcctggctacttgggaggctgatgcaagaagatcacttgagcccagaagttcgaggctgtgttgagctatgatctctccactgcaccccagcatggatgacagaccaagaccctgtctccaaaaaaaaaaaaaaaaaaaaaaaagaacggagggcaatggagtcaaagaggatcaagtaagcaaaggcacaagtactagcaatcttttattgtgatggcaagaagaaccaccttgttaatttgtacaagagagaaaagaaaccatgaaaagatatccctgcactgatacaaactatctgaattgctttcttcctatagtataaggattattcctgtcttagcagtggacagtttagaaaagtgaaaaacatacaggcttcttataggaattgtagtactaccttcagatttacaaaatattctttggttgctctttgtggagacattcattttaagtctttgtatattctagatatacatactgtacaagtgtcttccttattgtgaatttgcagttttcccaaaattgaaaattaacctccccattctgtgactgtatttccttgtgaactcattttattctttattaaatctattaagccattcttaggaatgcttacaagctggaatttatttgaggaaagacactggctaatctttgctgttcctaccatatgaaaatgaacttaaatcaaaggatgcactatatctgcaatgcatgataaatacaagatggatagagaatctgttcagtggtgtcagctacaaaagcaaacatgataaatgttaatgcagttttgagccctgggataagctattcagtgcacaagtgtagctgaatctctttgctatgttgttattcattgcagccaaataaatgtcaataataaaagagaattaaagattttcatttcccagaggcagtcctctaatacggcttgatctttcatttcatttgtaattcgttctcatgtcaggatgcaatcattcgccaggctctgggtgtcatgttaagccatttaataatgattaagaacataaaaatgcttggcctgtggggcaattcacaaaagagatgccaatttgttattgttttccctcctttcctcttgaatatggatcagctttttcccacctcctagcattaaaatactaatggaagatagggagggaaagtgtcccttaatttaccataagtgacattccagaatggcacaaggcagtgctaacacacatattaaaagactaattaggaatcattgtgccttaaacctatttttttttaatgatactttaagttctgggatacatgtccagaatgtgcatgtttgttacatagttatacacatgccatggtggtttcctgcacctatcaacccatcatctacattaggcatttctcctaatgctatccctccctgagctcccccaccccccgacaggccctggtgtgtgatgttgccctccttgtgtccgtgtgttctcattgttcaattcccacttatgagtgagaacatgcagtgtttggttttctgttcctgtgttagtttgctgagaatgatggtttccagcttcatccatgtccctgcaaaggacgtgaattcatccttgttatggctgcatagtattccatggtgtatatgtgccacattttctttagccagtctatcattgatgggcatttgggttgactttgctattgtgaatagtgctgcaataaacatatgtgtgtatgtgtctttatagtagaatgatttataatcctttgggtatatacccagtaatgagattgctggatcaaatggtatttcctgttctagatccttgaggaatcgccacactgttttccacaatggttgaactaatttacacttccaccaacagtgtaaaagcattcctgttcctccacatcctcaccagcatttgttgttttatgactttttaatgatcaccattctaactgacatgagatggtatctcattgtggttttgatttgcatttctctaatgaccagggatgatgagctttttttcatgtgtttgttggccgcataaatatctccttttgagaagtgtctgttcatatcctttgcccactttttgatgtggttgtttgttcgttttttgtaaatttgtttaagttctttgtagattctggatattagccctttgtcagatggacagattgcaaaaattttctcccattctgtaggttgcccgttcactctgatgatagtttcatttgctgtgcagaagctctttagtttaattggatcccatttgtcagttttgacttttgttcccattacttttggtgttttagtcatgaagtctttgcccatgcctatgtcctgaatggtattacctaggttttcttctagggtttttatggttttatgttttatgttttaagtctttaatccatcttgagttaatttttgtataaggtgtaaggaaggggtccagtttcagttttctctatatggctagtcagttttcccagcaccatttattaaatagggattcttttcccccattgcttgttttttgtcagatttgtcaaagatcagatcgttgtagatgtgtggcattatttctgaggcctctgttctgttccattgatctatatatctgttttcataccagtaccatgctgttttggttactgtaggcttatagtatagtttgaagtcaggttagcatgatgcctccagctttgttctttttgcttaggattgtcttggctatacgggctcttttttggttccatatgaaatttaattttctctaattctgtgaagaaagtcaatggtagcttgatggggaaagcattgaatctgtaaattactttgggtagtatgaccattttcacgatattcttcctatccgtgagcatggaatggttttccatttgtttgtgtcctctcttatttccttgagcaatggtttgtagttcttgaagaggtccttcacatcccttgtaagttgtattcctaggtattttattctctttgtagcaattgtgaatgagagttcactcatgatttggctctctgtttgtctattattggtgtataggaatgcttgtgatttttgcacattgattttgtatcctgagactttgctgaagttgcttatcagcttaaggagattttgggctgagatgctggggttttctaaatatacagtcatgtcatctgcagacagagacaatttgacttcctctcttcctatttgaataccctttatttctttctcttgcctgattgccctggtcagaacttccaataccatgttgaataggagtggcgagagagtgcatccttgtcttgtgccggttttcaaaggcaatccttccagcttttgcccattcagcgtgatattggctgtgggtttgtcataaatagttcgtattattttaagatatgttccatcaatacctagttttttgagagtttttagcatgacggagtgttgaattttatcgaaggccttttctgcatctattgaggtaatcatgtggcttttgttattggttctgtttatgtgatggattacgtttcttaatttgcgtatgttgaaccagccttgcatcccagggatgaagccgacttgatcatgatagataagctttttgatgtgcttctggattcagtttgccagaattttattgaggacttttgcatcaatgttcatcagggatattggcctgaaattttctttttttgttgtctctgccaggttttgctgtcaggatgatgctggcctcataaaataaattagagaggagtccctctttttctattgtttggaatagtttcagaaggaatagtaccagctcctctttgtacctctgatagaattcagttgtgaatccgtctgctcctgggctttttttggttgataggctattaattactgcctcaatttcagaacttgttattggtctatttagggattcaacttcttcctggtttagtcttgggagggtgtatgtgtccagtaatgtatccatttcttctagattttctagtttatttgtgtagagatgtttataatatccactgatggtagtttatatttctgtgggatcagtggtgatctcccctttatcattttttattgtgtctatttgattcttctctcttttcttctttattagtctagctagcagtctatctattttgttaatctttgcaaaaaaccagctcctggattcattgatttttggaagggttttttgtgtctaactccttcacctctgctctgatcttagttatttcttgccttctgctagcttttgaatgtgtttgctcttgcttctctagttcttttaattgtgatgttaggatgtcgattttagatctttcccgctttctcctgtgggcatttagtgctataaatgtccttcttaacactgctttagctgtgtcccagagattcgttgggtctctgttctcattggttttaaagaacttatttatttctgccttaatttcattatttacccagtagtcattcaggagcagattgttcagtttccatgcagttgtgtggttctgagtgagtttcttagtcctgagttctaatgtgattgcactgtggtctgagagactgtttgttatgatttccattattttgcatgtgctgaggagtgttttacttccaattatgtggtcaattttagaataagcgtgatgtggtgctgagaagaatgtatattctgttgatttggggtggagagttctgtagatgtctattaggtctgcttggccagagctgagttcaagtcctgaatatcgttgttaatttttggtctcgttgatctaatattgacagtggggtgttaaaatctcccactattattgtgtgggagtctaggtctctttgtaggtctctaagaacttgctttatgaatctgggtgctcctgtattgggtgcatatatatttaggatagttagctcttcttgttgaattgatccctttaccattatgtaatgcccttgtttgtcttttttgatctttgttggtttaaagtctgttttatcggagactaggattacaacccctgctttttttttgctttccacttgctttgtaaatattcctccatccctttattttgaacctacgtgtgtctttgcacatgagatgagtctcctgaatatagcacaccaatgggccttgactctttatccaattccccagtctgtgtttttcaattggggcatttagcccatttacatttaaggttaatatattatgcatgaatttgatcctgtcattatgatgctagctggttattttgcccgttagttgatgtggtttcttcatagtcttgatggtctttacaatttggtatgtttttgcagtggctggtaccagtttttcctttccatatttagtgcttccttcaggagctcttgtaaggcaggcctggtggtgacaaaatctctcagcatttgcttgtctttaaaggattttatttctcctttgcttatgaagcttagtgtggctggatatgaaattctgggttcaaaattcttttctttaagaatgttgaatgttggtcctcactctcttctggcttatagggtttctgcagagagatcagctgttagtctgatgggcttccctttgtgggtaacccaacctttctctctggctgcccttaatactttttccttcatttcaaccttggtgaatctgacaattatgtgttttggggttgctcttctcaaggagtatctttgtggtgttctctgtatttcctgaatttgaatgttggcctgtcttgctagattggggaagctttcttggataatattctgaagagtgttttccaacttggttccattctccccatcactttcaggtacaccaatcaaatgtaggtttggtcttttcatatagtcccatatttcttggaggtttgttagttcctttccattcttttttctctaatcttgtcatgatgctttatttcattaagttgatcttcaatctctgatatcctttcttctgcttgatcaatttggttattatatttgtgtatgcttcacgaagtgttcgttctgtgtttttcagctctatcaggtcatttatgttcttctctaaactggttattctagttagcaattcctctaaccttttttcaaggttcttagcttccttgcattgggttagaacatggtcctttagctcggcggaatttgttattacccaccttctgaagcctacttctgtcaatttgtcaaactagttctctgtgcagttttgttcccttgctggtgaggagttgtgatcctttggaggagaagaggcattctggtttctggaattttcagcctttttgcactggtttttccttatcttcgtggatttatctacctttggtctttgatgctggtgaccttcggatggggtttttgtgtggacatcctttttgttgatgttggtgctattcctttctgtttgttagttttccttctaacagatgcctctgctgcaggtctgctggagttttctggaggtccactccagaccctgtttgcctgggtatcaccagcagaggctgcagaacagcaaagattactgcctgttccttcctctggaagctttgtcccagaggggcacccgccagatgccagctggagctctcctgtatgaggggtctgtcgacccttgctgggaggcatctcccagtcaggaggcatgggggtcagggacccagaggcaatctgtctgttaggagagctcgagcactgtgctgggagatttgctgctctcttcagagctggtaggcaggaaagtttaagtgccgaagctgtgcccacagctgttccttcccccaggtgctctgtcccagagagatgggagttttatctataagcccctgactggggctgctgcctttctttcatagatgccctgcccagagaggaggaatctagagaggcggtctggctacagtggcttttccaagctgcagtgggctccacccagttcaaactttttttgcgaactttgtttgcatctttgtttacactgttaggggaaaaccgcctactcaagcctcggtaatggcagtcgccccttcccccaccaagcttgagcatcccaggtcgacttcagactgctgtgctggcagcgagaatttcaagccagtggatcttagcttgctgggctccgtcggggcaggatccgctgagctagaccacttggctccctggctttatccccctttccaggggagtgaacagttctgtctcgctggcgttccacacgccactgtggtatgaacaaaaactcctgcagctagcttggtgtctgcccaaacagcagcccagttttgtgcttgaaacccagggccctggtggtgtaggtacccgaagaaatctcctggtctgcgagttgtgaagaccatgggaaaagtgtagttatctgggctggagtgcaccatttctcatggcacagtccctcatggcttcccttgactaggggagggagttctcgaccccttgcacttccccggtaaggtgacgccccaccctgcttccgctcgccctttgtgggctgcacccactgtctaatcagtcccaatgagatgagccaggactctcagttggaaatgtagaaattacccgccttctgcgttgatctcgctgggaggtgcagaccggagctgttcctattcagccatcttgccagccacccaaacctatttttaaatgatcacactgttaagtttgcagtacttagcaataatgtatcaaaatgtttccttggagttttattctacagacctatctccttttgagatatgatatacataaactactttgtcttattttataaatttaattctttaaattgcctgtaaatctaaagtattttccgctcaccctgttttatgggtcatacctctttcagattgagtttccatctaccctagaggttctgtcacataccaatcattgtttcagtccttgcaggttaattgagtttcaaaaaaattttcaagggagtgctgggcactgaagaatattaagagtaacaggctgggcaattccacagcagagtatatgtccaaaataattgaagcaggaacctaaacagatatatgcccacccatcttcatagcagcattattcacaataaccaaaaggtagaagcaatcaaagtgtccatcagcagatgaacagataaataaaatgtgatatatacatacaaaggaatattattcagctttaaaaaagaaggaaatcctaacatgcactacaacatggatgaaccttgaagacattatgctaagtgaaataagccagtcacaatgggataattactgtgtgattccatttatgtgacatacctagagtagttagctttatagacaaagtagaatgatgttagccaggggctgggggagggctgaatggaaagttattgtttaattggtaaaaagtttcagttttgcaggatgaaaaagttgtaaagatgggtagtgataattgcacaataatatgaatgtacaatggcactgagctgtatattcaacaatgcttaaaatgttacattttatgtatatttttattttttaagcatatttttcaatttaaaaaaaattaaacataacctaaagagtaagatgctgggggtgaaggcagaaaagatgactgtccattttgatcctctttataaatgttgaatgaatctgttgaataacatggcagtaaggtgaaggaaatcatttctgtgtttataaactggaaaaactaacagtgttctttacctgttggagagcaactactaatgagatcttcatacaataaaaccttattatattaagcatggtagtaaaaaagtaaatatatatatgtatgtaaatacatatatagtgctttatagaaagtttaaacttccccaagtttctatactaaataaatcaccaaaaattggagaaagcaatacaacttttgttctgaattggaaataatgtgtttccaattaaataggtccactgaaaaataaactgtagatttttctgtttcgtttgttttaagaccaggcctcgctctgtcacccaagctggagtacaatgacacaatcatggctcactgcaacctcaaccgggctcaagcgatcctcccttcccagcctcctaagtagccgggactacaggtgcctaccaccctgcccagctaatttttttgtattttttctttggtggagactggattttgccatattgcccatgctagtctcaaactcctgagctcaagtaatctgccttcctaggcctccctcctaaaatgctaggattacgggtgtgagccaccacacctggcctaaattgtagacttttctgaacactcagaattcttatttgaattgtaatttttcacaaagggagaaaatatattaagtcagatgttttcaactggaagactggtgctatcacatcaaaatcacctagtgagtttttggtaaatacagtcctaccttttttttttttttttaattttagaattgggggagggtgtgatactttttcagggttgttacatggatatattacataaggctggggtttgggcttctattgaacccatcacccaaacagtgaatataatacccaataggtagtttttcaactcacccccacccacttcctgcctccccctttatgtccatgtatacccattgtttacctcccacttataagtgagattgtggagcatatggttttctgtttctgggttaattcactttggataatgtcctctggctgcatctatgctgctgcaaaggacattatttccttctttgttatggctgcatagtattacatggtgtatatgtaccacactttctttatccaatccgctgttgatggacacttaggttgattccatgactttgccattatgaatagtgctgtaataaacataagaatgcaggtatctttttgatagaacaatttcttttactttgggtagatacccagtagtggggttgttggattgaatggtaatcctgtttttagttctttgagaaagttccaaactgctttccacaggggccaaactaacttacattcccaccaacagtatgtgtttccttttctctgtatcctcgccaatgtgtaatttttttactttttaataatagctgtgctaactagtattatgatatctcattgtggttttaatttgcatttctctgattattagtgatgtggaacatttttcatatgtttgttggctgcttgtatgttcccatttttaaaaattttattgatttatttgtattttatagagaaagtgtcttgctatgttgctcaggctggtctcatacttcctgaggctcaagcagttctcctgcctcagccttccaaagtgctgagattacagacatgagtcaccatgcctagctgtatgtcttattttgagaagcatttgttcatgtcccttgcctactttttaatggagtaatttgggtttttcttgttaatttgtttaggttccttatagattctggatattagtcctttattggttgcatagttagcaaatattttctcctaatctgtaggctgtctgtttattttgttgatagttacttttgttgtgcagaaactctttagttaagttacaatggtcaatttttatttttgttgcatttgcttttgaggtcttagtcataaattctttgcctaggcctatgtgcagaatagtttctcctaggttttttctaggatttttatagtttgaggttttatgtgtaagtctttaatctatcttgagttaatttttgtatatggtgagaggtaggggtccaatttcattattctgcatatggctagccagttttcccaatatcatttattgaattgagtgtcctttcatcactatttatttttgttgactttgtttaagatcagttggttgtaggtttgtgggtttacttctgggttctctattttgttccattgatctatgtgtctatttttgtgccaataccattgctattttggttactataccctagtagtatagtttgaagtcaggtaatgtgatgcttctggcttcgttttttgcttaggattgctttggctattcagctaccctgccttcttaaaagcacctttctttcaatctgatacaaccctgtgaggagtattagaaaatacaacttcaaggagatgtttgagaatgcgggcagtacagtctggggcaaggggagtgtaggattatgtatggttgaaaatgttccctttggtgatatagcaatgctgtctatcctccacctgtcactttgagaatcactggattaggtgatttaataatgctgcaagttccgtaatctgctggaaaaacgaaaacagaactttttaacagctaagggtctagttcttcaataactcaggccttgggaaatgcttcttttttcgatccttcaaaatccatccacacttacaggcaatctacagtttactttaaatagtctcctacttttgaggtgcttataatttaacatagttacatcccaatgccctttgtcattttattttaagtaaatggggttattgacgttacttgtcttcatgttcctgagtccttaaagaaacgtgttacctcatctgctagttaagttttcatgttctatgaaaacactcaatgctgcccattactctgtaagaaaaggtcagtgtgatttgcaattctggtagacgtaaagttcagaaaatgtgcgttagaaaatgcaaactctaaaggaaaacaatctcagcattggaagaataatgtcagcacatgatcccaactcaaaatattaatataaatcattttgaaaatgtctctactacagccaaatcaattttaaatgataaccttgttggcttagattggtgatggtaaagatagaataaactaagtggcattcttttaaaatgtcttgtatggcattcatagaaaaaagttcttaccaggtaagatcttagagaaaatatatttctcacctatgaatgtaagttactaagttattagctcatggtccatttttagattattgtaatcacaaaagataaactcctttaattaattggtcaaaaataatttagaataacatgtggacctgtcacatttttgacaaagtagtatctttgggatgtggttcatttagttcagtgatctcaagcctgaagaaatgagacttctttcaactcccacctttttattgaaaaggatcctgctagaaggcaaaataagaggcaacctatcctaagcagatataagccctattatagcactgatttctggagggatgtttaagtcagatttgttgagatatagattacatatagtaaaatccacaaatatgttactaaataacatgtaacaaccaccacagactatagaccaccttgtacagtttgtattgaagtataatgtgcatacaaaattgatacaacttttcattaagtggatggacctgtgtagctataaccagatcaggaaatacaatacttatagcacttaagaagcttctccttgtgccccctcctaatctttatccccactgaaggtaaccattgtcttagcttctactactgacagttagctttgcctgtttttgaaatggaaccactcagtatgtagacttttgtctgctctatctccatccatttttgtgcactttcttactttttgacaacataagatcccccgggctcacgttgtattttctccacttcagtcctataatcaactatttctccaaggaaccctggttccctttattgaagaatggtttttagaaacctgtaactgtgctctagatatgctctttgttccttgagtgtctttgcttctaggccctcttagcaaacagaacttggcaatatatgtatgtataataacctatgtatactcactcatctatatttatttctgtatctatatgtttatatatttttaaaacatgaagtcatactgataaattttatttcagtccagcagcacaaggctcattctagccttcattcttccttttgtacaacttcttcctttgacattgaaaattctggctctcattatctaaaatgtatttacttatttgttttatcctaaagtagttttgaattgcttgcccatacccttgtatgagaaagagatttaccctttagagtataatatttgcttacagttctttttttctgtagcccaatagtgtccagtcaatatatagttatccaaagtaaattagctcttttatttcatccactcattatggttacattattcatttgtaatacaggtagggtcacttgttaagagtattccattttggtttcttttcacatcctgattggggttttattttctcaataaaattcactttttgtagtgtcaagttctgtgggttttgacaaacacataagatcatgtaaccaccaccatagttatgataccaaagagttacatttttcagctccggatttgcaaggatggtaccaatataaactcccccaattttatgagacggcactaattgttccacatctctaccaatatttgctactatccatctttttaattttagccattctggtgagtatgtaatagacctcataatgattttgattggaatttttctgatgtgtagtgagatggagctccttttcatctgcttactggtatttgtttttttgtgtgtagttttgttttgttttgtttttttgagatggagcctcactctgtcgcccaggctggagtgcagtggcgggatctcggctcactgcaatctccacctcctgggttcaagcgattcccttgcctcagcctccctagtagttgggactacaggtgcccaccatcacgcctggctcatttttttatttttagtagtgacggggtttcaccatgttggccaggctggtcttgaactcctgacctcaagtgatccacctgcctcggcctcccaaagtgctggggttacaggcgtgagccatcgtgcctggccttgcttactggcatttggatatcatctttgattgtattgttgttgggttcttttgcccatattgagttgtcttattgatttagaaatctttttacagcctgtatgccagtcttttgttagataaatgtattgtagatatctcctgctactctgtggcttgccttttcactctcttcatggtatcttttgataaacaaaagttcttgattttaatatagggcaattcataatgttttccccttatgattaatgcttcttatattccattaaagaaaatcatggcagatctcaaacttgtgaagatactcttctgttgtttttttctaaaacttctattcttttacttttttcaactagcacaattcatctaagattaatttatatatatatataaggtgtaggatagggagaatgattcatttattttgcccatatgaataaccaattgacctggcatcattcattgacaggaatatcctttccctaactgcattacattgacacctttgtcatgtttcagatgaccttatatgggtgagtctttttttaggctatttcattgtcctcattctctatcctttaccaattgcacactctcatgataacttaggtttataatcagtctttttatctggcaatgtcagtcttctgagtttgttcttcaagattatcctggcttttcttggctctttgcatttctacttaaattctagaactggcctgttaattgtcaccaaaggaattttttaaaaattccttactagagttttttcagattatattgaatctgcaagtcaatttggagaaaacttatttctttacagtattttgtcttccaatccatattttcctctatttatgcagtctttaatttttctcaggatgtttttttcttttcagtgtaaaggtcttgtatatgtatcttttgtaagattcttaggttttcgatgctatctatttttaaatggcatccttttaggtttctgtttctatttgttttttactggtatatagatttctaaataatgatctttttcacatattaactgcaataacatatcagataattattttggattttctatgcatataattataccatctgtgaataaaaataatttgcatttctgcttttccaattctcatacagtactttttttcttactacactagttagcacggtaagacatgtagaatacaagtaaattgaaatggttatagtgagcacctttgtcttattcccgatatcagttgaaaaaccatcaatattttatcaaaaaggataatgtttgctatagtctctttgtagatactctatcagataaaggaaatttctttccattaatagtttgctaagagtttttgttttgttcttaagagattttttaaaaatcatgaatagttgttgtatttcatcagataatgtttttgcatgtaaaattactatatgattttttcccttttttcttttaatgtgtgaattacagattgattatggaaagatatttcacctttgcattcttggaataatgccaacattgacatatctttttaatgtcttattggatttgatgtgatgttattttgttttctgtttgtttttttgagagagggtctcgtcttgtcacccaggctggagtgcagtggtgctctccaggctcactgcagcctccacctcctgggctcaagcagtcctcccacttcagcctcccaagtagctaggattacaggcacgtaccaccacgctaattttttaaattttttgaagagacgaggtctcactgtcttgcccagactgatcttgaactcctgggctcaagcaattcacccaccttgggctcccatagtgcggggattacaggtgtgagccaccatgccagccttgctttatgtattttaaagctatcttaactaagtgtatataaatttataattctcacgtcttcctgatgcattgaaccttttaccttatgaaatgtccttcttaatctctaatgatgcatcttgccttaatatctatgccagctttctattggttagtgtttacatgatatcttttttcattcctttattttcaacctttctgtgttcttatatgacttttgttgttttttaattaattctgacaatcttcatattttaatcagcctgtttatatttaatataagttactaatgtatttgtgttcatatcttacatcttactctttttgttctgtcttacatgtgtatcttcttttttctctcctttcctgctgtttttggattgatcaagtatttttttctttttcttctcatttagcttctcggtcttgccctgttgcccagactggagtgcagtggtgtgatctcagctcactgcagcctccaccttccagtttcaagtaattctcatgcctcagcctcctgagtagctgggattacaggcatgcgccatcatacccagctagtttttgtgtttttattagagacagttttgccatgttggccaggctggtcactaactcctgacttcaagtgatccgcccgcctcggcctcccaaagtgctgggattacaggagtgagccatcgtgcccagcctgaattctcagtttttgtttgtctgaaagtttccttttgcctttcaatgtgtatagttctctatgttgggagttatactttttgagttctttataaatggctttccattatcttttggattctcttatttttgttgagaagtcagctgttactcttattctgctcttttatatataatatttttattttctctagctgctttttagaatttgtcaaactttaactttatccttagttctggttttccttttatttatcctgctgggatttttagtgcttcttgaatctgtgattgatgactttcatcagatttggaaaattctcagccattatctctttagatactagaactgtttatacttgggaatctagttatacatatactaggtcttttcattgtatcccatatgccttttatgctctttgtgtgtgtgtgtgtgtgtgtgtgtgtgtgtgtgtgtgtgtgtgtgttttaccccttttcctccccgagcttcaggctgtatattttgcactgacctggcatttagttccctgattctctcttctgctttgtcccatctgcatttcaaaacatccagtgaggctgggtccagtggctcatgcctgtaatcccagcactttgggaggccaaggcaggcagatcacttgaggccaggagttcaagaccagcctggccaacatggtgaaaccctgactctaccaaaaatagaaaaattacctgggcatggtggcaggtgcctgtactcccagctacttgggagactgaggcaggagaattgcttgaacccaggaggcagaggttgcagtgagccaagatcgcaccactgcacacgagcctgggagacagagcaagtctctgtctcaaaaaaaaaaaaaatctagtggatgctttatttcaatagtcccttttttattttctaaagtatctgattatttcttattcatcctagttctgtagtataatcctctaccttgtcatctatttttttctaacatattaatcatagtagtaataaattctgtgtctgaaaactacaatatctcagtcatttgtaggtctggtttttaaagattttttttaatttccacataataattgcaaatatttatggggtacatagtgatgggtttggtgttttaagagagggtcttgctctgtcaccgaggccagaaggccagagtgcagtggcgtgatcacagctcactgcaacccgtatcttgcaggctcaagagattttcccaactcggcctcctgagtagctgggactacaggcacatgccaccacacctggctaattttttttatttttattagagatgaggtctcgctgtgttgcccaggctggtctcaaactcctgagcttaaacgatcctctcaccttggcctctcaaattgctgggattatgggcgtgagccacaacaccctgcccatcgtgatgttttgatacatataatgtatggtgatcagagcagagcaattagcatatccatcatctcaaacatttatcatttctttgtattgtgaacattcaatatcctccttctcactatttgaaactatgtaatatattattgttaactgtagttatcctacattgctgtagaacactagaatttattcctcctatctagctctaattttgtatacttttaaaaatctctccctattgcctcctccttcttacccttcccagcctctaatatcctctgttctactttttacttctgtgagatcaactttttttagcttccacgtacgagtgagaatacatagtgtttaactttgtgttcctggcttatttcatgtaacataatgtcttacagttccatccatgttatggtgaatgacaggatttcattcttctttatagataagtagtattcgatcatgtatatataccacactttctttatccatttatctgttgttggacatttgggttgatttcatgtcttggctatagtgaataatgctgtagtaaacatgggggtgcaaatgtctctttaacgtactaatttcctttcctttggagaaatacccaatagtgggattgctggatcatatggtagttctgtttgtttcttttctctgcatcctcaccagcatctgctttttttttctctttttaatgatagccattcttactggagtgagatgatacctcactggttttgatttgcattttcctgatgattagtgataatgagcttttttcccatttttttggccatttatatatcttcttttgagaaatgcctgttcaggtcatttgcccttttttaaaacagagtagagttttttgtttttatttgtttgtttgtttttttactgttgagatgtttaagttccttgtatattctggatattaattccctatctgattagatgagtaagttgtatgtatttttttctattccataggttatcttttcactctgttgattgtttcctttgctatacagaagcttttcagtttgacataatcccatttgtttatttttgcttttgttgcctgtgcttataaaaggttgtactcataaaacattttcccagaccaatgtcttgaagtgtttcccttatgtttccttctagtagttttattgttttgggtcttacatttaatccattttgagttgatttttacagagggtgagagctaggagtctagttccattcttatgcatatgactagatgcatatttagttttcccagcatcatttattgaagaaactgtgctttctccagtgactattcttggtgcttttgtcaaaaatcagttgactgtagatacgtggattaatttctgagttctctattctgttccattggtctttgtgtctgtttttatgccaataacatgctgttttggttactatagctttgtcatatattttgaagtctgatagtatgatacctccagctttgttcttcttgctcaggatgttttttaccatttagggtcttttctgattccacagaaattttagaatattttttctatttctgtgaagaatgtcattcgtattttgataagggttgtattgaattggcggatcactttgggtagtatataggtctgtttttttgtttttgttcggtttggtttctatttccttttggggcttgtttcttggtttgcctgataattttttatcaaatgttaaacattgtccataataaattatagagcttctgttagtgtagagtccaattagatctaggactaagccacctcaaggttgggttatagtttttgtaagacccagtctacctctcatttgcttccacttctataccatggccctcctggaatctcagctgaaatcctggtgtttttatgagatccctactcattaatgggttctgaactccaaattttatctgttttgtgtaccatacaactagcacaatcaccactctgccttatggatgccttatacttggtgtcttggcctcttgtcctgcttcctgacaagtgtggcaaataccttgagtagagtatttcctctcctgagtttcaggcctactttattgttttcccctcctcttcaggatcatgaccctcagttctgtctgtcttgacagtcccaaactcgaatttttgtcttaccacccactagagattgcaaaaagttatgttggcttctctgcctcttagtagtagtccattgcccagattctcagcctcttacccgacacaggaatttgcaaataccctagggagaaaacgactttttgaatgtcagtttagctctttaagatcctcttctctctgagaccttctcttgtcaaattttgactaccttgtcagctctctcatcccttctttatttaaaaaaaaaaattaagcttttctgcctttttatggtctgggaattggtttactacaagctatggcattagagcctaaccaataggtcccttattgaatacatttttttattattaaatagaaaaatacatagcccgagaaagttaagtgggcttatctgtgtattaaggaatactgtttttaggaatgtgacttaggaatactgttcttcataccgcactttgggaactgctggattaggtcactttcccaaggtctcagaattagaaacaaaagcagctagattagaacccagcctcggcctggtgcggtggctcatgcctgtaatcctagcactttgggaggccaaggcgggagggtcacctaaggtcgggaattcaagaccagcctgaccaacctggagaaaccctgtctctactaaaaatacaaaataagccaggtgtggtggtgcatgcctgtaatcccagctactcgggaggctgaggcaggagaatcgttagaacccgggaggcggaggttgcggtgagccgagatcacactattgcactctagcctggacaacaagagtgaaactccgtctcaaaaacaaaaaacaaaaaacaaaaaaagaacccggcttcttgaatcccagactagtccaatctgttccataccatgttaactcattggcttacatctgtggttttcaaccagaaacaactttcccccttcctttcagttatgacaactggctggtatggaagagttgggtcttccactggcattttgtgggtaaaagccagggatgctgctatatatactataatgcacaagacagccaatccacaataaagaattatctggcccaaattattaattgcctcaagattagaaaagccctgtcttacagtatccctcaaaatttatatatttaaaggatcactggctgattcctctttacacttaatcataaggtcaacaccaataggctttagtaggataaagcatctttatcctactaaactacatccagaggccctttgacccaagaaaatgtccatatatgatctagtccgtacttgcttaactgtgtttctcaaagcttttgccaaatatgctccaattctaagacttctctttagttagaatttgttagagctggaaaactttctggtgtagaattgtgcgtgcatatcttgtaaatgcattttgtatgcatgaatggatatctagatgatagtgacatttacctacacatttatagattttatttatatatatacacatatatacataatatatatgtattctaggcatatatatatatatacacacacattagtctaaatggttcttagaaaatttattcattttggtttataactctaatcaatttctataatcaaaagctcttgaaaatgtaatacaaatagatatttaattaaagaggtatattaccaaatgtttttcagaataattattgtttgtaccagtgagtatttctttcagaaattcaattagactctaaaattcatttttcagagcattacaacttggcggcaaaattttcttttggctgaaacactgcatgcaagcttttggctcagaaaaaaatctttggaagtatagctgaaaagtctgattcagataactgaatggctaaaattttccttgtttaaaaggaataaactggttacacgtgaaatattaaaaactgtatttaaatggatagttaactattgccttatttcttttaagtcttaaccaagctggcttatcctatttcaactgctctagaactcacatcatttttgattcattgattttttttttttttttagtatcccaatagaagccatcatttctaaggttccaccccaactttgctgagccttggcccagaaaatttgtttagcttttctctgctgttgttaagctattttaaattttaaatttttgtgtttttaaacctttctgtgtttttaaagcctttctggtttaataaacaattctaaaatctcaagaaaatatccaaattcttttgttaataatttggcacttagccatctattcaatttatttatcatggtaaattttgcttatacttaattatttcctctagtcctagaactccaccccttaccataataaaggggcagtttataaaacaggtgtttttgtaagtaatttacatggtttagtatgcaaaaagtacaataatagagctgtttagctgtcagtacttgtgaggaagtaagcagttttttcgttattaggatgaccatataacttattagaaaaactcagatgcttttgagagtgaaagagtggggtgctattaataatactaggacagttctgggcaaaccagcccatatggtcacactaatcattatagatatttaaacaaaaatatttggtaaaatgaatttgtgtattggttgaggtttttggctgtgtttatttctaacatttcttccagtgaaaagattcttgatcatgtgctaagtatatgccaggtaatatagaacttaaaaaaaacatgagaacctctaatctcaagcaggacaagttggagaggcaagatacttatagataatgcagtaatgtaacagcacaaataaattcaattcattatggttttattgagtgcctactgtatgtcaagaattgtggttataaagatgaacaaaacaaaaactccttttcttgaaatctagaagagacatacttaaataatatgatgtgaaaaatgatattattttcatgaactaatttttatagaacaaatggaacaagaagttggggaaagcttttcaaagcaagtgatgtatgaactaggccttgaggaatccttacaattttggcaagttgagattacaaaggtattcaaagttaatgaggtaataaaagcaaaaggcagagtccttcatatgatttgttacaagaaatggcagaagggagatatggggcaaccatctctgaaatggtaattgtgatgggatttaaatgctatgctgggcaatacattattaagtgcttaaagtatatatatatatagagaagacatcctttggactgagaaacattttgtgatcagtttaccgtaattccataaaagaaaggaatcacacttccatttgtttataaagccctgtttcagagggatcaacaaatactaaagatgaaaatcctttttttaattaaatgctaaagaataaaagctgcaataatccctctaaaaagtattagtgatgaacaatcccatggggttatagtgagacaaatgtgatagggttagaaaaattgtagagaaaaattatggtaaaagcactagggaaatgccttagaaaattaataaagattggcttggtttaaagacggtaaataaagactaatgcaaaaggctaatgaattcagtcatggagaaagtttatactatagtgtttgctaaaagaattaccactagatgggattttattaagcatttttttattcaaagaaaaagggtaactcattaataaaatgtgtagttgatactaaataaataaatcaactagtgtagttgatactaaattaggagatagtgtagttgatactaaataaataaatcaactagtgtagttgataataaattaggaagatactgtagctgatactaaattctagaaattctggtaatagactctagaaatagatgtttgaaataggtgtttaaaataatattttaaagaaaatcatattcaccccattttaaatccacatagaagcagcagttaacattaaaaacttgtgtccacttccaggagatagtcatggtttaagggtccagaaatcaatggtagaatcacctgaaatttagaacagtagaaatatgtcttcactaaagagtctaaattttttttttttttttttggaggagtcttgctctgtccccaggctggagtgcaatggcacgatctcagcccactgcaacctccacctcctgagttcaagcgattctcctgcctcagcctcttccaagtagctggaactacaggtgtgtgtcaccatgcctggctaattttttgtatttttagtagagatggggttttaccatgtttactaagctggtcttcaactcttgacctcaagtgatccacctgcctcagcctcccaaagtgctgggattacaggcatgagccactgcgcctggcccaagagtctaaatttataggatgtatatgattaaaagtgacttttgtgaacatttaaataaatatttgtgactgaattttctatggaacatttttccttcagtggcttgcattttaatgaaggaattattttaaaattaccttattccctcccaatgttgtttaaatatctagagggtatctagggcttaaggaagattggatgtggaacaatgagtggaggcctagagaacaagggtagtttcctgcaacagttatatggatccctagcaaggttcatatttctgtctatactgctggttaatctgaatattcccataaattgtggaacataatccatggccttggttttctgtttcttgtagtaagatttatcattttatttctaccataaattagagatcattacatgattactatgaaggatctacattgctatttgttatgatcaaataaacagtatttttgcagttgactattcagggatctgttaaagcatttagaccttaggccctcatagcatatatatataagctttttggagacttggctctcactactttgagaatttggcacacagggtaatcaaaaaaaaaagctttcttggctcttgcctgtaatcccagcattttgggaggctaaggcagaaggatcccttgagctcaggagttcaagaccagcctgagaaacatagcgagacctcatctctactaaaaaataaatagtaaaaaattatcccagcacagtgatgcgcacctgtagtcccagctaatcaggaggctgaggtgggaggatcacttgatccagggagtttgaggctgcagtgagctatgattgtgcacactccagcctgggtgacagagtgagaccctgtctaaagaaaaaaagctttctttcgaaatggcctcaggtttatcgatttttaatttaacattgctctacagatttattttgttgagtttttttttttttaagtactaagagtgttttgggcaggggaaagaaattcacagtgtttttttgttgttgtattttgttttgttttctgagacggagtctcgctctgtcacccaggctggagtgtgcagtggcacgatctcggctcactgcaacctccgccccctgggttaaagcaatcctcccacctcaacctccccagaagctaggattacaggtatacatcacctcacctggctaattttttttggtattgttagcagagatggggtttcaccgtgttggccaggctgatcccaaactcctgacctcaagtgatccacctgccttggcctaccaaagtgctcggattataggtgtgagccaccacacctggcctaccacaatgttttttaactgaacagttggctgcagtaagcttttagaagcctacacgttggtatttgagcatacgaggtggatcataatggggatcattaggtttctttgacaggtgatattaagaacccaacccagcatgccacttgtaaaccatctatacatagagacatttgtcaccattgacagttgtgacatttaatctgggatctatttgcaactcagcttcctatgtattactatgtatttaacagtctcaattcaggctcaaagcatcagcttttttcttctagtttttctaggttttacttaacaaaggaaaatagaaatatctgtttactattgaggtgatcatttctcctcagatgagtcatgccagtcacgattcttggatgttgacctcttgtgctgtttttgtagttcacaagccaaagctgcactaaataggattatggaaattagattaatggtccaggaatgaggcatagggctccnnnnnnnnnnnnnnnnnnnnnnnnnnnnnnnnnnnnnnnnnnnnnnnnnnnnnnnnnnnnnnnnnnnnnnnnnnnnnnnnnnnnnnnnnnnnnnnnnnnnnnnnnnnnnnnnnnnnnnnnnnnnnnnnnnnnnnnnnnnnnnnnnnnnnnnnnnnnnnnnnnnnnnnnnnnnnnnnnnnnnnnnnnnnnnnnnnnnnnnnnnnnnnnnnnnnnnnnnnnnnnnnnnnnnnnnnnnnnnnnnnnnnnnnnnnnnnnnnnnnnnnnnnnnnnnnnnnnnnnnnnnnnnnnnnnnnnnnnnnnnnnactaatctaactccaaaggggtacaacaacctcatcacttctaatatgaatacaaccaagatattgtgtgagctgagagtggcagaagaaaactggaaaaagctctctcttagatagccagtgtcacttggagaagtctattcttatgtaaaaggagttatattggtcttctaagaagaaaggttgtcaggaactggcaagcactaaaatgcctaaccaacaccttggagttagagcagtctagttttagaaggcagagactaggagggataatcagtcatagctaaagatagggaatctagaccaaagctcattccagttcctaggattagtgcagaatacaatttattaagctagaacagaagctttgcagtcacaattagatcatcacaacgtacatctggatgtcagaaataattctgcaccctactcttttttttttaagttaaagagactgtctcccaggctggagtagagtggagtgatcttagctcacttcatcctggaacacttgggctcaaacaatcctcctgcctcagcctcccatatagctgggactacaggcacacgccaccatgctggctaatttttttctattcttttagagacagggtcttgctgtgttgtccaggctgatttcaaattcctggcctcaagtgattctcctgctttggcctcctgagtcactgggattgcagggcaccctattcttgatttttattcttcccttgtcaggactagcttagaactgttaccccaactgtataagtaagtgcatccttaactatcaagacccaagaaagatatgagcagagcaaaatgaggagctcacgcaagcaaaattaagacttgaaatgtcagcagataaggtatctgaacatgtctatgacaggaagccagttgcaacttaactactgcagtgctaaattaaaccactgctatgtataccatatttgaagtaataattggatacaaaggtatatggcccttacttcaaagagcttatacttgtgaagtgtacactagaagacagtatgtagaaattttaccaaatttttatcaatttacagtatgaattttaccaaaaaattcactatagaaataatgcatgacttcacatcacactggtgatcagagaaacaatgtattttaaaagtgacatatgaactggtttgtgaaatacaaatgaaattttgatgcaaaatataactagaaatgaccttagatatcagctggtacatcttagaaattcgagaaaaattaagacccactactagtgggataaatgttggtgtacagtttttcttggtgacagcttgagaatacatatcaaaagccttaaaatatgcatatcctttgactcagtaactttacttacaaattaatcctatggaataatttaacatatgcacagatttacatgcaagaatgttcttcatagcattggtcttaaattttttaatttttttaacttctcattttgcagcaaaaaaaaagttgtaaaaatagtagatattttccatatatccttcatccagctttcccaaacattagcattttatataaccagagtacatatatcaaaaccaaggagttaataaataggtagaatttttgtcaaataaataaataaaattttaaaaccagcaaactactatagatgtgatactattattgaagctacagacctttttcagatgttcccaattatcccacttttttttttttttggtccaggatacaatctaggattctactctgtgcttaataggtaatcatattcttttattctgttactatctggcataattcttcagtctttttttctcctccttaacattaacacttttgaagagtactggccagttattttatagaatgtctctcaatttttgtttgactgatgtttccctgtgataaaattcagattatgcatttttggcaagaataccacagaaataatattatgctcttctcagtgaatcatattcaaagacgtgatactaattagcctcgatagtagtgatgttgactctgattcactttacttggttaaagtggtgcctgccagttctctccattgtaaagttagtattttttctttcttattgaataaatatctcatggggaggtacttcaagatacgtcttccatacatacatggattaatcttgcctgaaataattattactgtggtattagccaaagaattatattttatttttattattccttataaacttctcaattcaaaattatacacttattaatagagaagagctttcccctttttttgtttattaatttacttatgtcatatggactcatgaatattttattctattatttaaaatatattactatcactatttattgtgtttctcaaattgtcgtagatttgaccattggaagtgccctcaagttggttcttatgaacttccaatgtactacagttattttctgacttccttacattctgcgaccacaagatctccaggttcagcttgtgttttccttgccccagccatgaaataggaatttctccaagaagccctggtttcttttattgtacactaagaatttatacacacatctatatctgtgtctatatttaacctgtgtgcgtgtgtgtgtgtgtgtatgtgtgtgatatatatatgatttatttattttttttttttgagaaggagtttcactcttgttgcccaggctggagtgcaatggcgcaacctcagctcactgcaacctctgcctgctgggtccaagcaattctcctgcctcagcctcccatgcccagctaattttttgttttgtttttttttttttagtagagatggggtttctccatgttggtcaggaatggtctcaaactcctgacctcaggtgatccacccgcctcagcctcctaaagtgctgggattacagacgtgagccactgtgcctggccctgtgtatatatttttaaaacatgagtacacagtagtatcacctattgcaatccaataccacagagttcaggactggcttagagctgttaccccagctctgtaagtgcagcctgaaccatcaagaccagggaaacatataagcagagcaaaatgaggagctcacacaaccacacatcctggttaattttaattaagttttttaaatatatagaaaattaccatggttctaaaagtcaagaactattcacaaagatagagtaaaagaagtgtcacttccctgacattactttttcgccattcttgttttagcgttcttcccaccctgttcccacctacctcttgtaggtaaccaatctcagttttttacttatcttttctgtatttcttctttttttttctaacagcttcactcagatataattcacacaccatacaatttccttatttaaagtatacaattctttttttttgtatattcataggttgtgcaaccgtgaccacgatcaattttagaacattttcatcatcccagaaactgtctctctccagcttcacccatcttctcccaaccttaagcaacgattaatctactttctgcctctatgcatttgccttttctggaaattgcatataaatggactcttacaatatgtggttttctgtgttaggcttctttcacttaacataatgttttcaaggttcatccacattatagcatgtgtcagttttttacttctttttattgccatgtaacattctattgcatggtttattcatttcctagggctgccataacaaattaccacaaagtgagtggcttaaaagaacaaaaatttattatttcacagttctgaaggctagaagtccaaaataaaaggtatcagcagggccttgtaccctctgaaaactctaggaaattgttccttgtctcttcctagctactgggctcctggaaatcaattcttggcattccttggcttgtagctatatcacttcagtatttgcctctgtcttcgcatggccttcttccctgtgtatatctttctgtgcccactccttttattttaaagacaccaataattggatataaggcctaatctaatctagtgtgacctcatcttaactaattaatctgcaaagactttatttccaaacaaggtcacattctaaggttccagatggacatgaattcaggggcaacactatttagctttctacatatagagatacaacattttatttacctattcttcagttaatggaatttcattcctgtatttatttatgcccagatgagcagatacatgagcattttcttatttctccttcctttttatttgaaaagtggcatactgttgatatgtttgttttttccttttttcagtttataatatattctggaagttttttcatatcacttcacagagctctagctcattctaatctaaatattcagccatagagaatttattaatatatacataagatggaaattgatttagtattttaatttttatgaacatggaatgatgtatacaatatattggggatgttttcttctataggttttttaatctgtgttttcaaggtattatattcacacagtatgaaattcctccttctagatgttacccatctaatcagccctttcccagagtgaaccaatgcttccactgaatgtcagctatacacattgttccacaccttgcctttttgcttaatatatcttagagattgttccatttttttatagctgtataatatttcattttcttgtcacatcatactttattttactaatcctcttttggtacacatcttggtatttctagtcttttgctacaacaaatataacagcactatttgcaatgaccaaaataattggaaacaaccccaaaggtccataaagagtaaactgaatatattatatatttatgtgatagcatacataatgaagagagaatgaatggattaccactcaactcaacaatatcaatgaatataacaaacataatgtggaacaaagtcagacccaaaagagtgtatacagaattccaaactaaatagggtaggaatagctcatgtcagaacagcccttcttcaggtagcaattataactcttaacaaaatattacaaaaccaactacctggagacactggagaagaatgaaaatcaggcagaaactgaaggagagtctatacttggaggaggagaatggccttgagtacatttcctatttttatgactctttctctagggccagcccaagttggcaccaagtagcatgcctaaaagttggtagaaaacacgcagtcttactggcttgaagatccagaggaagagtttaggtaaaaagtgagtgaggaaatttcagaaaggagaaaaaccatacagaggtagccctaaattctacatacagaccttatccaaatctctggatgacccctcaattacgcatatgcagagtggattcctagcagcccagctaaggctaaaagaacttaataaagatgtctcattgtccattgctggggtgcagagtttggaatttcattctagccaagtttacttgtctccttaaaaaaacaataataatcccctccttagaaacatttgagtagactgtacaacagaggtcagcatttttatttattttttttttttgagacgagtctcgccctgccttccaggctggagtgcagtggagtgcagtggcgcgatctcggctcactacaagctccgcctccccagttcacgccattctcccgcctcagcctcccaagtagctgggactacaggctcccgccaccatgcccagctaattttgtttttctatttttagtggagacggggtttcaccgtgttagccaggatggtctcgatctcctgacctcgggatccgcccggcctcccaaagtgctgggattacaggcgtgagccaccatgcccggctggcatttttttcttaaaggaccagagagtaaatattttaggttcacagggtactctttcagtaatttaaatatgacaaggagcaaacttgaatataggtatgtagaaattatcaagtgtggaaaatgaagagaaaaaaaacaatgaacatggccgggtgcagtggctcacacctgtaatcccagcacttttggaagccagggtgggtggatttcctgaagtcaggagttcgagaccagtctggccaacatggtgaaaccccgtctctactaaaaatacaaaaattagctgggtgcagtggcacacgcctatagtcccagctacttggtagggtgaggcaggagaatcactagaacctgggaggtagaggttgcaatgagccgagataatgccactgcactccagcccaagtggacagagcaagactccatctcagaaaaaaaacccacaaaaacagagaacagagcttccttgacctttaggacaacagcaaaaggcctaaaatgttcataattggagtctcaaaaggaaaggagctagagaatgaggcaagataaatatttgatgaataatggctgtaaggtttcccacttctggtgaaagacatgaacttacagatttgggaagccctgtgaaccacaggcagaataaatacaaagaaaaccacacctaaacatttaattagactactactgaaaccaaaagatgaagagaagatattgaagagcaaagtagcacattgcatagaatgggaaattatatgaacaactacagattccttacagtggagatcaaaagaaagtggaacatctttgaagtgctgaaacaaaactgtcaacccagaattctatctccagcaatattttccttcagtgatgaaggtgatattaaaacattgttatataaacataagagtatatactatgtgattccatttgtataaagtcaatggaaacaggcctcaagttacttttgatggggattagtaattgcaaggaggggagggaatttttcaccataatgaaccactccataaattagtaacataaaaaacagcagttttattttctcatgattctccagtcaaggctaggctcagccgagtagttctacttgtcttgacagtggtcacttgttggctacattaaggtagtacgttggctgcaggctagactcattagggatgttcagaactctctatttagtctaaaggccaacatttccagagtcagacttccaatttgtactcttctctgtatgtgtcatacctcaattaaaagcccactttcagactaggtgcagtggctcacacctgtaatcccaatactttgggtggccaaggtagaagaattgtatgaggccagggattggagaccaacctgggcaacacagcaagaccccatctctaccaaaaaaaaaaaaaaaaattagctgggcgcagtggcacatgcctgtagtcctagctactcagaaggctgaggcaaggaggttcgtggagcccaggagttcaaggcagcaacagtcagccgtgatcacaccattacactccagccttggcaacagagtgagaccctatctcaaaaaaaaaaagtctactttcaaagggcaatagataattatttttttaattacaatctaacaaaaatagaataatctaatataaatagaaactacaaaatgttccagaaaatgtaagtattcctgtgtgactagtgtagaattaatataagaaacattaataggtgataaagtaaaaaagataacttagggttagattacactgagatttgagtgcttggctacagagctgggtcttatttgaagggaagtgggaaactattgaagggttttgagcagaggaatgatatgttcaaaacagtggtttaggaatataatcccatgctagtgtacaaattagactagaggagggagagactattatcaaacggatcaatttggaaacaatttagataagcaccaataggaattgaattaaaataatagcaagctaatgaaaaaaagggaataaaatgtattaattctacatctacacagattgagagcctactatgttctatgtacttggtaaaggactgtatatatttttgtctttatagtcaaggaattcacaacatatgaaatgtagaagtatgaaaaaataacaatttgttgtaataagaactataatagatgaatatttaaggtgttaaggacacaagaagaggaagcagccaataatacagaggagtctaagacatgctttagataagatttaaccttacatgagtagttacagtttaccaaacaaagaaggcaaagaacaacattctagccagaagaaacagcacataaaaagtcacaggcaaagaagagtagagcatggtgaattgggggacatagttcactatatctacatgtgcaagctaagcataggtacagaagctagaaagataaggatcacatcactaagggcaaaagacatgaaaaatttggtgactatatgagatgaaacaagatttagtgactttataagaagacaaggatgaccttaatattttgaatttaagtgactagaaggataatgataaacccaatagtaagaattgtataacttatagacacttttcatctgagtggacattaaatacctaggagttctttttatatgtgtgtgaagaatagcactagatgtgtttcatcaatgaaattctgaatataaaataatcatcataggttcttaaagccagtcaacaaccaagaattgatactgaccactggcacagtttttttcaaaaatgacaaactttaaaagaaaaaaaaatgccttgaatgaatgtttttcttaactcagaagaaaagaaaaatctttaactacatatagcttacctgaagaaaaaacagaattgcagaattgctgtgaatgttctaaagacctggttctatataatcaagttaattcctctttcatgtgttttaaaatattgttgatccaagaaccaaccatcagctatgctggaagtctataattatgcattgatatatgagaaggctatcattctctacagacgactggtaccatccttagcagaatacttgaggctgcttttggtttagggaatctgtagctcagagattttcctagaaagtaacctctgttgttcaaattagatagccatttgtggagacaaaacccactgggtataggtagtattacctgaatcactaaaagataattgattagaaatccaaatcaaaccttgagactgctgagtctagatgagtggctgcctagggatagagggcaggaaggggtgggaccttacaaagacacatgaagaaacttttagaattgatatgtttgttgttttgattgtggtgatggcttcatgagtaatacctattcaaacttttccagttgtacacttaaatagtgcagtttattgtatgtcaatcatgcttcgataaagatgttagcaaaggaaatgactttcatcttagaatggtcagataaactgttttaagtgctacaccattatccatataaagaagagatggccatttaaaaatatttatacaagacttgaagcaatgtaggtaacctgaggtataataaattgagtgtcttgatatttagagtcctgatgtaatacactttattaagatatagatttgtaaatttatgctaattctggatgattatttttcttgagttggtttctatggactgaatgttaaagtgggttttaagcaggttttatataatatatcaataccacattagcttgattttttttattgcgagagatgcagaaagatcaatatcttacatgctctatatcaccataaatactttcaataaagcttttttggcctggtagggtgactcacacctgtaacctcaacactttgagaggctaaggctggagaatcacttgaggccaggagttcaagaccagcctgggaacatagtgagaccctgcaaaaaaaatatggaaattagccaggcatggtggcacacgcctgtagtcttggctacccaggaggctgaggcaggtgatcacatgagctgaggagctcgaggttacagtgagctatgatcataccacttgcaatgtagcctgggcaatagagtgaaaccatgtctcattcaatcaaacttatttgaaccttcgtacatttttgcttttattaatgagcttttcttttaaaatcagacttttaatggctttctggcagtgtcatcctggttgtggttgagactaatatgagctctagtttgtgttttttgttattgtttttgtttgtttttttgagacagggtctctctctgttgccaaggctggagtacagtggcacaattacagctcactgcaaccccttcttcctcccagactcaagtgatcctcccacctcagccttccgagtagctgggactataggtgcacaccaccacacctggccaatttttaaatttttttgtagagacagggtttcatcatattgcccaggctggtcttgaactactggactcaggtgatccacccacctcaacttcccaaagtgctgggattataagcatgaaccaccatgctcagctgagctctaattactgaagattaattctataggttgaacctggatatgttagaagacataggggactttcataaagaagttcaaattagaatatgtgagataggagaattttttaaaagaattgttatttgatacttagggtgtagtcatatactcttaatattgctagagtgtaaattggtaaaagttttcatatccttttatacagcaatttcagctcttggaatttaaataatcaaaagtctgggagcatctacatgtgaagacattcatgtcacttttatgtataatagtgtagcaacttgaaactatatatattatgttacatgaaaaataaactaacacagtgggttcattcactttgtgaaacttcatcacttatttgaggactttgagtataaacaaatcagaatataaaattacctgctattacgaagtagcaagagaggctgggcacagtggttcacacctgtaatcccaacactttgggaggccgaggggggcagatcacttgaggtcaggagttccagaccagcctggccaacacaataaaacccatctccactaaaattacaaaaattagccgggcgtggtggcatgtacctgtaatcccagctacatggcagactgaggcaggagaatcgcttgatcccaggaggcagaggttgcggtgagccgagatctcgctactgcactccagcctgggtgacagagcgagcaagagcaggcgagcaagcgagactccatctcaaaacaaaaaacaaaacaaaaacaaagtagcaagagtgagtatgccagtgtgctgggggtaagatgatttagatactctgtattttccatgtcttattttcatactttaaaaaacatatcagttgtttctaaaagaacatattccttttagttacaaacatatacattcagcaaccctaaagtagcatagactactactggctgaagctctggggttttattagtacagtgatgacttaattaacaaatcctctttgaacaaagcctcttcactcaagactggccttggtgcagtaggcatgagagaaggaccagttttctctgagctagatcggtagcagcagggactaatgaggcagggccttgaaagtggctctctctcagatctaactcctcagggactggctaaagctgaagctgagggtactggtgcactcctgggacctacacagcctggttacccaggtgttgaaaaaacagtttctgtgccaacaccatatgtggcttttaagagactcggcaggactcttgctttaggcagagcattccttgtgtggaatgagtaagctggaaaataacaaagagggaatcccatgtgctaggaagcttcctcttgtcttctgtgtgctccgtgtactgctttttcaattctctgggccttattttgttcaactataaagtaaaaggagtagctaaaaaatctctaatatatctttcagttctaatagactacatgtttaaatcaggaatcggcaaactttttataaagggtcaaatagtaattattttctgctttgcagggcatactacctccattgcaagtgctcaactctccctctgtagcgtgaaaacagctgtatataaacaaatgggtgtggctgtattccaataaaactctatttataaaaataggcagctagccagatttggcccacaggccatattttaacaagcccaggtctagatgttaatgtaatgggaatgtcatattaagagaattatttgatgaataggatataattcttatttcatagagaccattctctcagactttttatttttaaagcgtaggcaaatataaaatattatttcactgtcaggatgtaataccatgggaaaaagattaaaaatactctggcaccaaactgttgtagtaaattatctgaaatagagcctttgacttcccaattaaggaagaaaatggtgtctgcaacacctgtgactgggttattttaagtcttcaaaagttaggggcctagtagaagagagtctcaagggcttgttcattttctttctcatcaaatgggccaaatcatgcttttcatagtagaaggtaggctgtggaccctttactattttatttttaaatatttctcttggctaggcataatggcccatgcctaaaatcccaggctgaggcagaaggatcccttgagcccaggagtttgagaccaccctgggcaacatagcaagaccccgtctctactaaaaaaaataactttttaaaaattaaaaataaataaataattttttggtggtccagaaaggggcagctgccatgctttgcaggtttcagatccccatctatcttgggttgggtttctatcttggtcttaagttatcagtattctaatatggagataagtctgccttcactttggagacctttgttagttcttccatgtcaggcttcagctagtatagtttgtctaatgcatttatataaaacttgtttccaacaatgaaaaagcaattacaggttgggatatgtaattcaggcccattactacataaaaggatcagcacagtggtactttatctgactagggaagtctaaaatattcttgttggccagcttgctttcacataagcactgttcgggatcttttctaagttgcagaacatgaattccttattggcctatcccactagccacagctgtgagcacaacagaactgacacatacctggtaattataccttatctaaagtgaacagggccaccttcccagcatagtgacagctatagcccttaatctaatgcagtggttctcaaagtatagactcactgggggtgccctttctgaggctctttcaaggaatctcttctatgaaatcaaaactacttcacagtaattcaaatatattatttgcctttttgactctcaatgacagtagagttttccagagactacataatgtatgatatcacaacagattgaatactgaagcaaatgttaagaatccagctgacttctgttaaccagatattaaagagattagcaaaaacttaaatgtcatactctctactaatatttttgtttggaatatatagttattcttatgaaaatatgttaaaatgtaggtttattcagaaattttctgagatcattttattttctaatacagtaaatattaataaatatgactcacacaaaatctatttggagtcctcaatttttttttcttttttttcctggcttacattttttgatgcactcaatttttttttttttttttttaatttaaaaagagacagggtctcactatgttgcccaggctggtttcaaacttctgggctcaagcaatcctcctgccttggcttcccaaagtactggtattacaggtatgagccagtgcacctgacctcaataattttttaagagaaaaagtttgagaacccctcctctaatgtaatacccttagttgcaatactctgatctcatggttactgatatcatctttaccatattccctcttataaaatatttactaaaattatccccagagataacccttgttaacaatttagtgattacttctagacatctttctactgagtgcttgcattcacacataatatatatacttttacatttattggatcatactgtggtctttcaaaacttattctcctgagtttaatttttctacctgatcactctctgaattcttataaaatcttaagttcttttttttttttttttttttttttaagacagggtctcactcagtcactatcacccaggctggagtgcagtagcatgatcatagctcactgtagcctcaaactcctgggttcaaaggatcctcttacctcagcctcctaagtagctaggactacaggtgtgtgccaccatatctggctaactttttttatttttagtggagacaggcatctcactatgttgctcaggctggtctcaaattcctggcctcaagcaatccacccacctcagcctcctaaagtgctgggattacaggcatgactcaccatgcttagcctaaatcctaaggtcttaaaattgaaagggacagaggggtcatcttatctcattcccaactcaagtcagaaaccctctctaaaacattcacaacctgagaggtccatttaatttggttttataaaccctaaattgttagaaactttttccttctcttggacataaatttgccttcttgatcacttttacccataggttctagttctactttgggaaactatatagaatgcatcttatctgtcttcactgggcttcattgtgggtattttcttctgttctatcttccagttcactaattcttttttaagttgtgtctaagcttctattaaaactatccactaaatttttactttcaatttccatttaaacctgttgtattctagtcctctgttaaaattctcgattttatctttaactcttgctatttcaaagtttctgtttgttaagttcaatatctggaactgctttattaagctgtaatttctgctggttttaatttcctgcttgcctctttgtattactgtttattttttattgtgggtgatatgttgtatttgcaaaattgcttatagaaataatttgaagtataggatgattcatgtttgcttttggcaggcatggggacattggcacactatatttatcttcatctaagtttaaagatttagatgattagaggctaagctacaatcccttgtctaggtctttctactgcctgttcacacacccttaatccttttgattcccaccctgagataaggagattttaactaggcccattactcttgacagactgggttccagactttgtcctcctagcatcaaacaccagactcacttctctgggtttctatcatcctctgtattatagcctggtaattcttcattcttttgttaggacttcaatgccttcaaacagattttttaaaaatatgtccagatgttctaattcttgataagacagttggtctgaattacctaggctgccattagtacctgcaacctactttaatccgtattaatatttttctgtccttctggattgcttgggaaactgttaaagagcaggaataaccctgaccaggcatctgtaccacattcaaccagatgctctgtaagagctcctcttgaaggtttaatctgatattaatcagataggaagtacagttcttatgaacagattcagtcttcccacagggatgagttcagttaagaggggcaatggatacggtgtacagtggccccattttcctttatgtttatattctagtcttgtaataaaactaatgctcagaatgaaaggtctcaatttaggatttaaaccaagtataaacaaaaagttaaaacaagctattgttcaaactttgacttaagtgaaagaattggtttttttatttgtttgtttatttttgaggcagggtcttgctctgccacccaggctggagttcagggatgcaatcatagatcactgtaacctcgaactcctgggctggagcagtgctcccgcctcaggctcctgagtagctaggagaacaagtgacaccacacccagctaattttttaatttttttgtagagatggggctttgtatgttgcccaagctggtcttaccttctggcctcaagtgatcctcttgccttggcctcccaaaagtgctggaattgcagacatgagccaccatacccggcctggttttattttaaaaaacacttttgctgcccttctgtaaaatgttaattatatgtatgcacattttcttttatctggtgcttctctaaattcctttagcccacgtcttatccaactagtcatgtgggaatttcctctttggggaattaaatatttaatattaacttctaggtagtacagagcagcccactgtgtttcacttttgtattattcctttgttagcactaagttttctgtatcagcttgtctagaatttttgtttcaaaattgtattcttctaatttatttgcagtttttctcttctaattgtttaattgtccatcccctaccccctgccccaaggcaaatgtactgtcttttatccatatgtgcccataaattctaaactcaaagatttctggttctcccttatatttatggtatttttctacttctctgttcagtatatttttgcaagtgtttcagttttcttcagtgtttgaggttctctagtgtgtcatttcattttcatgcatcagagtaattcctaccattcttatatggagtctcttacctgatgattttttaattagtaaagtgcaatattgaacaacattgaagattttatttcttaatctaaaacataatatttatttaataatgaaatggaaatataggttttgtgaaagggagaaaggtgtttctctaaatattatacctgtgtcaaaaagctgcaagtgctactaccactgttttgtgacccctgaatgatttctgctttctttatattaatacttactctaatagtaattgaactcccaaaaagatcacaaagtccccaattgctagctttataaatacattgatgtgtaccttgtttgatgagataaaagcttcagtaagtgatatccccacctgtgtggttaatttcaaaatattgtttgtctaatacattgttgtcagtgacaactgaacaagaacttttagaagcagttggctgtccattaatggcagatttcaaggctatgcaaattgtgccagttcagccctgcattttttcgatattatcatatcaattgagtcagttcagagtagacaaagcaaggttatgggaaccacctagagcatcatgcaccatttaacatcaatgcagcatacatgaacatctgcaacttcgatcttattaacagaggatagaatggaaggcagtaaacagctttcttcatcacttaattgcaaaatagtatttcctaatgtttgcattgtttatcaacacgaacttcatcaataattgtataattatggttgcctagatcacagtgccctcatgcatcttgtcacttattatagagtggtctgagtttaatttgaatttgaacacatgatacaaggataataatacaagttccttgaaatgtgagttgcataatacaaaaattttgtgtagtaggagaatggcaagttatgattcttcagtcactttggggattaacacaaggaaaaacaggactgaaaggcagtgaaagatgaggggaagccactagttagattcaaacatagacccattggacatgagagtaggttatgttccttagaattaatcatgagtaattcgatgtttgctttaggcccaaattgagctgaattaaaacaggattattatgcttaggtcttcccttcagtctctgtagttaaagagagaaaatggcagaaaactacaaatatagtgaggaaaaagctatggtggccaaagttaaaaataccacatgctgaggaaagccttgacatagctgctcagccttcattgctgttgcttttgaagcctgataatgccacactactcctaattagcaaatgttagtattacagtaagcaatcaagtgcagtcttcaggctttgtggcagcagtttcgcagtgcaaaatattgaagaaaaaatgaaggaaaacaatataagctcagccacagttattggtgtggtcagtgggagttgtctcacaagagagcaggaaaaggaaaatgtgaaaaacagtgggtgcatttaaagcatgtaagacaagagctggctagtctgaaaagtttgtctattttaatcatgaaaatctcacatttttacttaaatccattttatatttaaggaaaaatctaaggcttgttcatgaaattacacttgaaatattttaatttgtggttagagtctcctccccatctcaaattaaaaggtattaaattgtatattgagtgagctccgtttgtactcagctcttcccaattaataaacatagtcatttccttaaaaaaaaaaaactctagagttagaatgttttctctcactaattagtctgtatttatgcctttaataattatctgttcattttctagcagcaaatgtttgttctcagattaaattggagaaggaaggaaaaaaaagatagctacccacagtatagtatccacagacgatatagagttatgtccctctttgtgtggttcttgagtataatagacataacagaagctttcttaatatgatagttaatctattattttctgtatttgggggatgctaagaactggtttactagaggtaatagtttgatctgtagttatttatgttaaaatacttttttaaaaggtaattacagcttctactataaacttgaaaaagttggtctaactctgtgccgaatgagcggggagatattactatatacatacatataagtgtatatgcctcttacctgaatacctcagggagcacacttttctgaaccagggttttgtaataaatgtgtgtactactaattctgacacatgtatagttctcctttaaataacttgtatgcaaacgttattcagaaacgtcttctaggagctatttatcaaaactgctataataataactttgtcctaatgagtttcagtctctgtttagggagtaatcgataaactacaaattaatgttccataattcacattataatgcacatataattattttgagatgaggcaaaccctatgcatttaatttacagctataattaagtaagctcatttgatactaattaagtaagtctaaaaggatcataggtttgtgtatttaattatcaaggtacaatcagcaactaattccttgaaaagctttcctatcttcagttcaacactgatctcagcccacactacaatttatcttcttgcatcttcaatagattaaaatgcattgtgaattgtggagaatctacttggtaagttagcttctttatttaaaaagtatatatatgtatatatatatacacatacataggcttaagaatacagaaattctataatctggcaaaactgtccttaagaagtgaaggagaaattaagacatttccagataaaagataaagaggtttattgccaatagacctgtcctacaagaaatgctaaaagggaatgcttcaggattaaatgaaagaatgctagacagtaactgaaagccatatgaagaaataaagaactcctgtaaaggtatctatataagtaaatataaaaaccagtattgctggtttgtaactcttctttcattcatgaaaggaaaatgcctaggccgggcgccgtggctcacacctgtaatcccagcactttgggaggccaaggcaggcagatcatgaggtcaggagatcaagaccatcctggccaaaatggtgaaaccccatctctactaaaaatacaaaaattcgctgggcgtggtggcacacgcctgtagtccctgctactcgggaggctgaggcaggagaatcgcttgaacctgggaggcggaggttgcagtgagccgagatcacaccaccgcacttcagcctggtgacaaagcgagactccatctcaaaaaaaaagaagaaaagtgcctaaaacaataattatatgttaatggaaagacatgtaaaatatgtaatttataacaacaacataaagagggaaacagagctgtataagagcaaggttttttatactgtccaggctaagttggtaacaattcaaactagattgttatgaatttaggattttaattgtaattgccatagtaaccactaagaaaataagaaataggtcagggcgcagtggctcacacctataatcccagtgctttgggaggccaaggcaggcggattacgacgtcaggagatcaagaccatcctggccaacatggtgaaaccctgtctctactaaaaatacaaaaattagctgggcgtggtggcacgcagcctgtagtcccagctacttgggaggctgaggcaggagaatcacttgaaccccggaggtaggggcaggagaatcacttgaacctgggaggcggagtttgcagtgagtcaagatcgcactactgcactccagcctggatgacagaccgagactccatctcaaaaaacaaaaaaagaaataaaataagaaataatgaagttttctctagttttgttaaagtagtatataaaaattagattattagaaaatacacttaattgctagcttagaagtcttttaaattctactgtcagccgggcacagtgtctcacccctgtatttccaacactttaggaggccaaggtgggaggatcacttgggcccaggagttcaagaccagcctctgtaacatagggagaccctgtctacaaaaaattaaaacaattagccaggtatgatggcaagcacctgtcatcctaggtactcaggaggctgaggtgggaggaccacttgagactgaaagattgaggctgcagtgagtcttgattgcaccactgtactccaacctgggcgacagagtgagactctatatcaaaaaaaaaaaaacaaattctgtcagtcaatcaactaatattcaagtatttaatatagtaggcttcctgctaagtttcaacaattgtctccatttcttcccactaaattttttaatgtatagtcaagaaggaagagctatctgatgtctagagtgacattctagtgttgggaaatgctagataagatgttcacattttcagatttcccagccacatttaagctcaaaaaatatgaatacttgtccccatgactttcctgaaggtctaaaagatatttctgtctccatcccttcaaaaccaagatacctgattgtgaggagtagaagacccctatatggtccagtgtatgttctcttcaatctcaaagcgtgtttagagtattgccattgctatcagaaatgtgaactttcccctcagatcctagattttcagattaagctaatcttagaacatgggctttcctccttccttatcagaggccactgtggtaaaatattatagaaagtaattgttggccagtcgcagtggcttatgcctgtagtcccaacactctgggaggctgaggcgggcagatcatttgaggtctggagtttgagaccaccctggccaacatggtgaaaccctgtctctactaaaaatacaaaaattagccgggtgtcatggccggcgtttgtggtcccagctactcgggaagctgaggcaggagaatcacttgaacccaggaggtggaggctgccaagatctcgccactgcactccagcttgcgtgacagagtgagactctgtctcaaaaaaagtaataataataattgctaatacctaatgttgcgctttacagctcacatagaacatttacttatattatctaaaatgaggtattaaaatagatgaacaaactgatatctgggctgggagggagttgttgcttcttttatttctttggggtactactagcacagcctgtcagtacattaaaaatagagactttttggcattactttgttttttccaagattaactagcacaacacaaatttcttgtgcctaggtgtaaccagtgttgagacttcacataccacacacaattaatgacatcaaccttgcagtactgacagcgatatcatgcccagtttgtatatggtgtctgggtcatctgaggaagttaaaatagtattgtgatctgtgaacaggccaagtctagcaggtgccatttgcatagactagaatataaatagtatcctctaaagctatatgatgtaatgtccctaaaatgaattatctcccatcttctttcattctcagaaacaaaaatactgattcttgtattgtttgatggaaaactattagttgttcaacataaccagcaaagtataaagacttgacacctaatggcttctgttttctctgagagttagaattagtatgtagcttaagaagagctgtaggcatttagaatgatatttggggtggtggtggggaaatggaggcatcagctagggatagtttagaaccagttctaaattgagtggaattgccaaaattcggtatggtattggataacaaatatggcctattttgacacagggtcttaattttttttttaataggcttgtgccattcttcttaatctaataggcattggcaatccctaattacggagaactggtttgtctagtgacatcccaaacataggaagaatgtttccttctttaaaattttttgatagacacttgagtcaaatgaagaaatcccagatgaaaaattttagaaaggacattctactctcctgtagaatgggaaaattgtcccattcagctagttgtaagccaaaggagaaaacttaaggggttgtattatgcagctacatttttgaactgataacagttacccttccctgtcctttcctgcctaaacagatcctgatgctgcaaaccaacatttctttctttttttttatcactgttgatgaaggttatttaaaacagaatcagtgatatgttagcaaatattttatgactggctttcaggaaaaaagaacatagattcatagcaattgtgtcatggtttaaatactcccaccatcaatgtgaggtcactgaatgtagatttgagaagagctttgtatatgcagaattaattctcattagccaatctgagcaggctccagcacaccactgacagttaaaagaggtggatgactgatgtgagtaaccacatgaatgaatgtcaaaaacattatgctaaaaaaaatgtgctgaggtaagaagccagatataaaagaacatatactgtatgattacatttatttgaatttagaacaggcactattaatttacagtgatagaaatcagatcagtagctttttggtttttgttttattgagaaggaatttggctatgaagggatatgaaggaactttctttctttctttttttttttttttgagacagagtatagatcttgtcactatgctagtagcgccatcttggctcaactgcaacctctgcctcctcagttcaagcaattctcctgcctcagcctcccgagtacctgggattacaggtgcccaccaccacgcccaactaatatttttgtatttttagtggagacagggttccaccatgttggccaggctggtctcgaactcttgacctcaggtgatccacccaccttggcctcccaaagtgctgagataacaggtatgagccagcacacctggccaggaactttcttagatgaaaatattcatagcagcattacccaatagaactttctacagaactatcaacataacaattgtattttcaatctctgcttaggaaaaataaccaaacagcaatttaaagatagcctgtaggccaggtgtggtggctcatacctgtaatcccagcattttgggaggccaaggtgggcagatcacttgaggtctggagttcaagaccagcctggccaacatggtgaaactccgtctctgctcaaaatcaaaaattagccggctgtagtggtgggcgcctataatccaagctacttgggaggctgaggcaggagaatcacttgaacctgggaggcagaggttgcagtgaactgagatcgcaccactgcactccagcctgggcgatacggcgagacttagtatcaaaaagaaaaaaaaaaagcctaatagtaagatggaacccagtatgctagtatatatttaacagtcagctcatagcaaaccaagccctagtttgttgtgttttctaatttctatggtgtaaatactctcaccatgactcaccattcaaactaccaagatgaaggcattgaatggtgagttggaaagagaaatgtacgatcaattcataagctggtgtgaactcagtttctgaactgcttctacccgtcactattattgacggactgaattttcttggttttagtttagttctttagattattcaatctttcccagagctgtgtctttgcccagagactttattgaacctcagagatgtctggctaggctgtagctcaactttagatcctttaacagaaggaagaacacgagggctgagtgcggtggctcaggcctgtaatcctagcactttgggaggctgaggtgggcagatcacttgaggtcaggagttcaagaccagcctggccaacatgatgaaaccctatatctactaaaaatacaaaaactagttgggcttggtggtgggcacttttaatcccagctacacgggagggtaaggcaggagaattgcttgaacccaggaggcagaggttgcagtgagccgagatcatgccattgctgtccagcctgggtgacagagcaagactccatctcaaaaataataataataaggaataacatgcgtatgatccttaaaatatttctgcaactttttttttcccctggtgctgcagcttctattcgtaaagaatggtgaggaacacaaccaagctttaaaatcagtgtacttgagaggttttgttgttgttgtttttacaggtaattaaccatatgttacacattttaatctgcttttaagtgcaagagagattggcaaatgacttaataaagaaatgacttctgcttaaattggataaaatggttgtttactggtgtttattgctgtattccaagtagacaagtaatctgtgaatccagtttagtttattggacaataaatggtactcagaacttttatcagtgtttgattgtcaggatgcccattgaaattgacttcatacttagggaactttaattttattgtacagtatgcactgttaaaaaaaatatccttgtctttcagtataaacctatgacattgccttgtggcattatcatccctgagatgctttcttgctctaagatttcttctatgtcataaagaaaaaaggaacttttggttccttcatatctaatgcagttttttcttttgtaaactctaaatattttccattgccaccatcaacaattcaaataacaatcttactgatggaaagtccatgattagaaatagctgcttcttcaaaaataaagaactttgtatgtacctatccattttgaaaatcttaaccattgtgctcagaaggagagatatgattttaagaagggtcacatttagaataccaataatgtcctactcctgaaataattgggaccaggccgctaaaaagaaagcacctgatgtttggcctttcagtattttctataactatgacgccttggtccaaattatctaataaatgcttcttcctattctcccgccctaagagtccatggtctctttataaagaagaatcatatacatacagatattacttgaatttatatggcatcctcatgaggtgaatcccacctatgtcacttaggattcatttgattgccctggtttgatccaattcaagtattaattcaggccaggtgcaatggcacatgcctataatcccagcactttgggaggccgaggtgggcagatcacttcagttcaggagttcgaggctagcctggccaacatggggaaacccccgtctctactaaagatacaaaaattagccgggtgtggtggcaggcacctgtagttccagcaacttgggaggctgaggcaggaggattgcttgaacccgggaggcagaggttgcagtgagtaagccaagattgtgccactgcactccagcctgggtgacaagagtgagaccctgtctcaatagaaaaaaaaaaaaaaggccaatatgggcccagggcctgccattcagacttccgcttgtggcagagaccaagggatggcagcaggttagtcgcaggtgaagtcataacaagcggtgtggagccgcacctgggcaacatgtcggaaggaaatgcagtgagcgaacccagcactctgcaagggccccgacccctcctgactggggcccaggagctcagcaggcagcgactggcaccccttcaccccgggccgccttcccttcatccgctctgggaaccttaccctgggggttgaggttgggggtcaagaagaaaaccttcaccccaaatatcatcagtcagaagaacccaaggaagaagtaaccgtcaagaaggagaaacatgaaagggacagagatggacagagacaggtgcatggacagggatgaggccacccagaagtgatccagtctcactccatctttgagaagggcccagctgaaatgatgaagaaaaaaggaactggaataagaaagtgaatgtgtcagacatgggaccttctcatatcgtccacatcaaaaaagagaagaaagagttggacgaagacacgaaacatctcaccatgctgtagaaggacgatttcattgatgaccctgggctgaggaatgacactcgcaacatgcctgtgcagctgccactggctcactcagggtggctttttaaggaagaaaacaatgaaccagatgttaaaccttggctggctggccccaagaaagaggtgggggtacctactgtgaaactgaaagaggagctacaagatgaggaggaggccaagataaaggctccttccagagcagccaggaagacccccgggcctcccgaaggacatatccgtggcagagctgcccagggagctgagcctcaccaaggaggaggaattgctgttcctccagttgccagacaccctccctggccacccacctatccaggacatcaagcccatcaaggcagaggtacagggcaaggacagagaggtggtactcatcaagcaggagaacgaccaggaagccaggctggcaaagaatgcttctaccctagctgacctgacagagggtcaggttggcaagctgcccatctgcaagtccgaaagggtgcaactcctcctgggcaaggtgactctggacgtgaccatgggaaccgcctgctctttcctgcaggagctggtgtctgtgggccttggagagagtaggactggggagatgatagacctgggacatgtgaagcacaaacttctgtgttcccccgattttgaatccctcttggatcacaaacactggtaaaatgatcagatggaggaggatggcggctgctgtctgctccagacattttgttctcgaatctctgcaacccaggagaggccagttgagcccacccactccagcctttggcagccattgtcccagtttcccccagggcccacagggcttcctcccacagcagctgtgaatggcacagttaccttcccacagtgtgaagatggtacatccttgctgctggggacttgtccatgctatttgtttttgtatttatattttgtattttgtcttaatctcttcaactgactgcatcctcccaagggaggagggaggatctgtgggaaggtgcaggcttttggtggctgttgggccgtcaggcagcaagtgtgaggactgcagcttttgctggtgctcccttcttcctcccagaggcagtataggagagagagcaaggattgagtctgagacttaagcatggggtcccaactcatcagttcctggttctgtatccttgcgcaaactacctaacctttctgagcctcctgttcctcatctgacaaaaatggggatgatacctacttcacagggttgacgtgaggattacatgggatattatagatgaaaactccttgcacaaggccagaaccagtagccactcaataaatgttaatttccttttaagtaaataaataaataatcaaatgttaattcaaagtcccacatgagagcgttctgtgttttgtggtgtttgttttgttttgttttagagacagggtctcattctttcacctaggctggggtgcggtggcacaatcacagctcactgcatcctcgaattcctggactcaaaggatcctcctgcctcagcctcctgagtagctggaactatagacatgtgctaccatacctagctagtttttttttttttttaatctgtagactgcctctgtggacagtttttcaaattttttgtagaaacagggccatgctttgttgcccagactggtcttgagctcctggcctcgagtgttcctcccaccttggctgagacgacaggtgtgagccactgcacgtggtcagccttctatctttaaacaggatctgaatctagattcatcaactcataaatatgttctcatttttaaatgatggaatgatggaaagtgaaagcaccaatcaaatcatattttcattatttccagaatgtgttcagcacagttaggtctggaaaggtttttgggaaaggttgtgcaaggttgaatttattcactgttgaaatagcacctctaaatttcaagcaattgtatgatttacttttatacaagtgtcagaaatgctaaattattaaatcccaatggcaggatcactgacaactagaaacttgagtttatttgcttccgtggtttactaaactaagctagagaaatatagtacagttatttactacttaagatcagccagaaaatgtatagtgagttcatactgtactagattctgggagataatcaaatgtaaaacatataccagtctcaaggaagttaaaatctagtaggaataatcactatattcagcaataattgttaattgagcacctactctgtactagatacagtactaagagctgggaataagattaagtcataattcctacctataaggagttcaaagtttagttgagaagacatttgtaaagaagtaattgtaactatgatagataccttcctggaagtatgtgaaggttataagtgatggcataaaagagaataatcagttctgcttggaggccaaggactatagccaagaagacatgccttatttggaactaagagtgaaagacaatttgaaatgtagacttgatacatacacaagaataaaagatcatggcacatttgggacatcatgagtatgaccaaagagtaactgactaaagttactcttttggtcagggaaagataaagtttgaacaataggctggattcatatcctagagttaagagttcattcaatagagaaccattgaagagtttttaacaggggaataacatcagatttgtattcatgaaaaagtactctgtttattcatcatatatttattgagcccctataatataccaggcatagttctggatgctagcaatcatcagaaaaaaatattgccttttctatagctcctcttacctaggcagccaagttttgtgccctgagccctagctcctttcctgtgctcagctgagtgaatcagggttaggaacataaccaaaggtagacagtccatagatggtcagtgagctatgagctaaaacagcagaggaaatcagttttttgtctgtctgtttttgatgtaggatctccctctgtcacccaggctggagtgcagtggtgctatcatggctcactacagccccaacctcctgggctcaagcaatccacccaccttagttagcctcccaagtaactgggactacaggcacgcacccccatgcccggctggcttttaattttttttgtagagacagcttgttgtgcaggctggtctcaaactcctgggctcaagcgattctcctgtctcagcctcccaaggctctgggattacaggcataaatcaccatgcctggctggaaaccagttcttcagataagagagtgcagcatgtaacatttaaagaagtagagaccaggttgacatgaacagctttatagtaagattaaagtgatatgcttcatttagtgaacctattaaagataacagaaacctcgttaattcattatacacacacacacacacacatatatacacgtgcatatatatatgtgtatatatatagtcaggtgcagtggcccacacttgtaatcccagtacttcgggaagccaaggtgggaggatcacttgagcctagaagtttgaaaccagcctaggcaacatagggaggcccatctctataaaaaaaataaaaataaattagctgggcatggtggcgcatgcctgtggtcccagctacttggaaggctgaggcaggaagatcacttcagcccagagctcaaggctgcagtgagctgtgatggcaccactgcaccccagcctgggtgacagagagagatcctgtctctaaaaaatttcttaaatgcagtcacacacactaaacaaaggggaaataaggttttagagcagtaattccatctatcattgttttcttggtcatttttccatggaaaactatttttgtattcaaagtcaacactcattctcttatatgtttacattcagaactgaagaccttaactggaattaacttaaaacatttgtagaaaatcagatgcaaacatgaacaaactaagagattttaccacaaacaatgatgtagaggcaggtagtctgcaaggtcagaaccatgccttcagaagcagcaattttaagtgagacctgaatctcctatactcaaaggtcttgcattagtcaggattctctagagggatagaactaataggatagatatgtatctatataaatgggagtttattaagtagtattaactcacacaatcacaaggtcccacaatagaccacctacaagctaggagcaaggaagacagtccgagtctcaaagctgaagaaagtctgacgttccagggcaggaagcatccagcgcaggagaaagttgtaggctgggagggtaagccagtctggccttctcatgtttttctgcctgctttatattctctggcagctgattagatggtgcccaccaagattaagggtgggtctgccttccccagcccactgactttggcaacaccctcacagacacacccaggatcaatactttgcatccttcaatccaatcaagttgaccctcagtattaaccatcacaagtttcatttcaagattaataatatccttgtccatttaatcataaaaaggaatgcttattatgtgccaacttttccaagtgctttatatgtattaactaatttactcctcagaaaaatcctgtaagtacctgcaaatgctattattgttccttttttctttctttctgagacaacatctggctctatcacccaggctggagtgcagcagcactatctcggctcactgcaatttccgcctcctggactcaaaccatcctcccacctcagcctcccgaatagctggggctacaggaatgcaccaccacacctggctagtttttttgtatttttttgtagagatggagtttcgccatgctacccaggctggtctcgaacttattagctgaaacaatctgcccatctcagcctcccaaaatgctggggttacagacacgagccaccgtgtctagcctcctattttaaatatgagaaaattggcctggcacagtggctcatgcctgtaatcccaacactttgggaggccaagttgggaggattacttgagcctaggagtttgagaccagcctgggcaacatgacgaaaactcttctctacaaagaatcagctgggcatggtggcatgcgcctgtaatcccagctacctgggagtctgagataggaggatcacttgagccagggaagttgaggttgcagtgagccgagattgcaccactgcactccagccagggtgacaaagtgagaccctgtctcaaaaaaaaaaaaaaaaaaaagaggccaggcgcagtggctcatgcctgtaatcccagcactttgggaggccaaggcaggtggatcatgaggtcaggggttcgagaccagcctggccaatatggtgaaaccccatccctactaaaaatacaaaaattagctgggcgtggtggcacgcacctgctgtcccagctactcaggaggctgaggcagaagaatcgcttgaactcaggaggcggaggttgcagtgagctgagattgtgtaactgcactccagcctgggtgacagagcaagactctgtctcaaagaaaaaaaaaaggaaaaaggagaatttaatctgattaccagattgtaaatggcaaatctggaatgtgaacccaagcagtctgacttatgcacttaaccacagttatactccctctactctctatggagaatttatcaacttaatttagtcaaatttggttatcagtaccaggcttaagggaatttaaatgtcagttaactgctgtgtaacaatgaatcaaaatctatttattccatcatcacctttttttcaggaaaatagtagcaacattacttgaatgacaactttgggatcatattttactacttctctttcattcatttgtcccaaattcctgcctttgccatgggactctaggcagttgacaaactctgtgagcctcagagtcatcatttataaaataaggttagtgataccttactcatgtgagaattagatgagataaagtatacaaagcatttgatgcagtgctttttcactcagataactaccgttgcattccattgcctgatgtatcaaatccaaacttttgcgtggctttcaaagtctccctagaaatggctagatcccacccatcttgatttatttcttgccttacttgatatataaactttcttctgtctctattcctcttgggacatacacacctttcttttcctctctttttcattatccacatgtttaagacctagtttaagttcagtcttctccgtgaaagcatctccagttaaactatattgttctttcccttttttgaactcctgttgcagttataatagatgttacattgtgtgatatttcacaaattctttgatatatgctaggtttctctttccatctagattctaagctccttgagaagatagatcatgtcttaatatttttcctgtatctcccccagaggatctaacagagtatcataactattgttctatgagatctaatgagctcacagctattgttcaacaaatacttattacctgattgaagaaaataagctcctaaaaatacctgataatattatataggtctttatattgtcagggtgtttttataacactgttaatacttaatccatataatagtcacagaaaataggtagaacagatattatcttcattttttaggtaataacactgagtttaaattacattgtggcttgcccaaggattcttggtaagtagcgttattgaccccaccctcaacccctgccattccagtccattgtccgttctctatcaggctgccaaaataattttcttttgagacagggtgttgctctgtcatgcaggctggagagcagtggcacaatcatagctcactgcatcctcaaccacctgggctcaagcgatcctcccacctcagcctactgagtagctgggaatatagatgtgcaccaccacatccagctaatttttccattttgggtagagatgaagttttgccatgtctcccagtctggtctcaaactcctgggctcaaccagtcctcccgcctcagcctcccaaagtgctgggattatagacatgagccactgtgcccagcaatattttcatatcaaagatgagattgcatcactcccttatttaaaactttccaacagtttcccattttacatagaatgaaatcctgcaaaacccccacattcagtatactccaggtacagtggccttctttagcttcagcagtcttagtttgccaagcttgttgctagtctggggcctctgcacttgaatgttctacccctggaacttcacatggcttgttccttcttacccttgaaatctcaactcaaatatcacctcctcagtgaggaagtaatacctatgtaaattaactcccctcccttgtcacacttcatcatatcatcctgttttattttctgtatggcacctattaatatctcaaattaggccgggcatggtagcgcatgcctgtaatcccagcactttgggaggccaaggtgggtggatcatggatcacttgagctcacgatttcaaggcaagcctggccgacatgatgaaaccctatctctactaaaagtacaaaaagttagctgggcatagtggtgcacgcctgtaatcccagctaagagtagctgaggcacaagaatagcctgaacccaggaggtggaggttgaagtgagccaagaccacaccactgtaccccagcctatgcaacagagcaagatgctatctcaaaaaaaaaaaataatatatatatatatatatatgtatctcaaattagcttgtttatatatttgttacttgtgtattgtctatccccactagaatgttggcctcataaaagcagagtttttatcctattcacatctgtattcccagtccctaataaagtacctgacacatggtagagtcttaataaatatttattaaataaaatagctaagcccgaactagactaaaactatggcttttttgctcctaatcaagtgtacttcccatgaacatttaatttttcctactttttgtggaagcacttatacctttggaactacagtaagaattgatgttcagaataatgacattaagatgtgctgtaggattctctattatcaaagaaaaattttattcagttcaataaactaaactaattaaagcagggatgtcatggcatattattatattaacacatttagaaagatttccaaataaaaagactttctgctttttctttagttaactagaaaattaaattaactcagagctctttatgcctcaaaagtccttgttaattaggattgttctataaatctctattattagcagagttcatcatcttttttattgccctgtttattagggcagtctaagcagggtgtctttgctcatatcctgatatgtgtgtcctagtgaaaagaaaagcatttccggattctcattttttccctattccttgatataggcatatttcatgctgttagtgtaacaatttagtttccttctatcagttctctccataaagctggaatgatattattgacctatgaagcaaaataattaaatttaaggtctgtttaaaagcattaatgctttgtgacgttgtttatgataatagaagattgaaaatagcctaaaagtccatcagtaaaggattggttaaataaattatactatatccatgtagtggactattatgcagcaataaaaaataatgaggacattctctgtttaccaatatagaaagatatccaagattttaaaatatgatccagagtagcctagatagtatgatacctttttttgtgtgggtgaggggaggaaaaaattaagaatgtagtttattgtatatgcatagaaaaattctagaaggatatataagaaagcaataacagtgataaccagattgggaagtagaaggagcagaaaccagctgaagggcagagatgaggagagggagattttatagcatagcttttcatatgttttatatttttgaatcatacgaatacattacctactcaaaaagttaaattaaaaacaagcacaactaaaagtaatatgtggccaggcatggtgcctcacgcctgtaatcccagcactttgggaggccaaggtggatggatcacttgaggtcaggagttcaagaccagtctggccaacatgatgaaactccgtctctactaaaaatacaaaaattagccgggcatggtggtacacacctgtagtcccagctactcaggaggctgaggaaggatatcgcttgaacctgggaggtgaaggttgcagtgagccaggatcgcaccactgcactccagcctgggcgacgcagcgaaactccatctcaaagaaaaaaaagtaatatgtgattctggactgaattctataccagatgaaaaatattgctataaaatacattaggacaattaagaaaattgaactgtggactatagattagattaaaatgttgttttctgtgtttatcaactataacctggctaacagaatatcatcactcttaggaaatacacactgaagtattaaggggtaaaaggcataatatataccacaaatgctaaataaaactttgaaagaataaataatgttatatatatgggaggaatgatcaactaaatgtggcaaaatgttaaaaaatggtaaatctggataaatgttgcatagaaattgtctgtatttttctgggaacttttctgttaatttaaaattatttctaaatagttttttaaaagaaacaaacaaaaacattttaatactatggatattaccttattataagcaatggcataagaatgtgaagggttctggtttttacgtagtcatacttttcactttctggagaagtttttaccatcacttttctgtttcttccatgcctattgatgctgggtcagaggcagtggcaggggtagtgactgaattttaccttgaggttgaaaaacaccaggccaagtgtggtgactcatgcctggtgtttaggaggctgaggcaggaggatcacttgaagccaagggctcaagaccagtctggagaacacagcaagaccctgtctctacaaaaaaaatttaaaaattagccaggcatgttggcttgcacctgtagtcctagctgctcaggaggctgaggcaggaggatccttttagcccaggagtttgaggctacagtgaaccatgatcacaccactgcactccagcctgggaggcagagtgagaccttagctcttgagagagagagagagagagagagagagagagagagagagagagagacagacagacagaaggaaaatgaagaaaggaaggaaaaggaagagagagagaaaagaaagaaagaaaaacacctgcctacctgcctttcaacctgctggatcaccttcacttgtatcttctcaacagtttaggacatcaacaaaacagtaacaatgtggcattttaaaaattctttgaacaaaattttctaaggatatcgtgaggttgtgtgtatctagtgctaaaatatatagttaatttagtggaggtaaacctgcagaaacatttaattgtttggcattgagtaactggatttgtattattgttcaattagatattgtggcaattgtagaaacttaaccatctctaatataattgactttcattattgatgcatgaagatgtttttattctaattagattggcctcttaagtgattaggtagtgaagcttgtctcatatttaagtgaagagtaaattatttgtatgaagtgtctagaggatgcctaaaattgattattttgtattctaggtaagctaaattttattgttttgaatgaaggcactctgcaagtcttatctaataaatgacacaaaacaaatctgttatcaactgaattgttagtgtttgtttcctgtctgcttggggaagcttatgatttagtggttttttagaaatccagaaagtaggaataataattattcccaacccttttccttctcactttacaaaaagtttgtgaagaattgagaaataaatgctacgaataatcttaagctcttaggtagaagtacttgatcaaaactaaccaggtcatttttctacaattagtgcagaaagctagtttttactaattgttcccacagctactccaggcccatttcatgcctaagaaaactaggtcccagtgagagtcatgtgagtgttgtaggcttcattggttgaataacgtccttacctgtaagtgtatattcagatttagtgaatgtacttcatgtgttcatataataaatttcctagaatagctatggagtaggtcatgccggtaaaaactgttagttttgtgacttttttttttttttttttttgagactgagtctcactgttgcccaggctgaagtgcagtgacatgatctctgctcactgcaacctccgcctcccagattcaagtgattctcgtgcctcagcctcccaggtagctaggattacaggcacatgccaccatgcccaactaattcttgtatttttaatagagacagggttttaccatgttggcgagtctggtctcaaactcctgacctcaagtgatccacccgcctcagcctcccaaagtgctgggattacaggcatgagccactgtgcccggccatgactttttataatagatctgtaaaccagcttaagtcatttgaaaatcagagcatactgaaaatgtaataaaacataaatattattgaagatttttcagagtcatcattttgaaaggagttcttgtagttctttagataatagaaaataatgaaaactgagtttatgacgcatcttttgcatatatgatattcttatatacttatctgtactgataagtataaaaaggtagaaaataattctactttgtatttcaggaaattgagcttcatatgaaaactaaggataaagtatctcaatgatgtgtgtgtgtgtatatatatatatatatctccagaaaaaatcattataaagctgcatttatgtagaattttcagcaatttagataaataagtcatgatttttttttttttttcctccgagagggagtctcactctgtcgcccaggctggagtgtagtggtgcgatcttggctcgctgcaacctccacttcctgggtttaagcaattctcctgcctcagcctccagagtagctgggatttcaggcatgtgccaccatgcctgacaaatttttttttgtatttttagtggagccgggattttaccatgttgcccaggctggctgaactcctgacctcgtgatctgcccacctccacctcccaaagtgctaggattacagatgtgagccaccatgcctgaccagaagtcatgattcttaagaataaaattcaaaataatctcttccgttgtcgattaggttctgttcataaataaatatttatgcagtcaaaaatgaataattgttttcaaacgaggagctcaaggaattctatgtaattttggtttacttactatttatatataattattttccaatctgtaagtctagtgattaattcttatattacctaaaatgttttatagacatgttagattattacataatgtaaatgtattgtaaatagtaatggtttcattaacttgagctcattttacttatttagtacctgtttggttttagtttatagttgttatttccctgtatagtgtagcttgtacttggaagtagtaaaaccagatttctttataagtatttatggtacagaccttttcctaaatcagactgcagacctttcctgagtatttctaataaagtctgcttacattttttttttggcctgcatagtagtttgtgctatatatactctctagaaaatgtaattctggatatttgtgccataactttcaattaatcaaaatcttgtcaactgccatataggccctcatgttacaaaatgtggaaagttcagttacttaaagagtttggctgggcattgtggctcacacctaatcccagcactttgggaggctgaggcagtcagatcacttgaggtcaggagttcaagacgagcctggccaacatggcaaaacctatctctactaaaaatacaaaaattagctgggcgtgatggcacatgactgtaatcccagctacttgggaggctgaggcaggagaattacttgaaccaggaggcggaggttgcagtgagctgagatcacgccactgcactccagcctgggcaatagaatgagactccgtctcaaagaaaaaaagtttaagccagatgcagtggctcatgcctgtaatcctagcactttgggagaccaaggcaggaggattgctcgagcacaggagtttgaaaccagcttgggcaacaaagtgagaccctgtctctacccacccgccccccaaaaaaaagcaaaaaattgaccagctgtggtgctgcgtgtctgtggtcccaactacacaggaggcagagagaatcccttgagcccaggaggtcaaggttggagtgtgttatgattatacaactgcactccagcctggatgacagagcaagacctaaaaaaaaaaaaaagattttaaaaaagattgactaagtgaatgagtcctcttcttgaatatcagtcattccaggagagtattttcattaacatatttatgtctcttgttgaaagtatccattaagagcaggtagcaaaagctagacagaatatgcttttgaagattctctatgctctttattaatacctttcttaagtttctcaagatctccttttgcctccctcttgatcttaaacgagactgaagtttaagagtctttagccactctgtccccatagggatgcaaatttatgatttcagaagttccagcccccaataagaagcactgtccaatcgtttgcagatgtatcttgtaagccagatttcatgacagataagtccattccactgtcatgtgccatgtttaaagtactaaattaggttactctgtagtcaaaacaagtaagccctggtccagactactctagggcaaaatcccgttgcactgtcccttttgttctgcccatgcattcagttgtagctttcccttttgccagttgacagatagtgacttctttgcaaaacataaccagattaggttatttttagtaaaccaactaaaataaaaaattcttgacattgggaagaagtattttaacagaataatagtaatgtttttattgtgccattgtgattttctataaagaaacacccaatattcattatttatatttttttaaatttacaactctttaactgtatccaacatttcactgccaggaatatagtcaggctcgaagcttttttagaaacccatgatccaatccataccaacacttcctttagtttatggcttctgttcatttgcactgtccagaaaggtactgctaccatttgtagtcactccaaaaaaaagtgtgaactacctaggtataactctcataagacgtatacagcagcatctgtatgctgaaagttaccaaaaaagtattacttgcagatgattttgcaccttagttcccaagtgcccctgtacagaatatggagcttatgtcctgtctctctttgaatgatgagtgatgaaggagcttcagatgttactgggtgagcttgtattgagtgttacaaagagaagtcattctgcctttctttggctctaattgcagaaagtgaagtcactgcttttgctgtcttggatcaagaccagaaagaaattattgataccaatggagctggagatgcatttgttggaggtacagactaatttatttcattcttacttacaagtaaaacattttaacccttgtttctaccatataaccaagatttattcatttagtaacttctaatttcttcttttaaataattaacttctgaagttctttccatatacttctatcattgtcagtattagagggttttaccagaggaaaaatatgtgtttggaaaagataatttgctactatgctgtaccccagtcattttcacaagattaattgtatctgtcagaaaattgcataaacaaactgcatcaagtacagtatatagtatattcatagcccttcaggcttaaatgttaacacatttttgttctttaaaacaagttgtgatgaatattaaacagtatgctaataactaaggatgatgtcttttgatgataatcctttggttaaaacatctgtttcaaacacaatagtggttgtttgttatactaaaaagggttaaatttttgcctatttttggctcaataagaactggcaaattttatgtgaactaatgattttggtaatgaatactcaaaaataaaatcaaaacaatagaagacttggcttgatgacttagattgatctaaaatctgattcaaaaattcttttgataagtctaaattccttctagttaagtgtagttaattaagctagtttatagtctctagaaagctttcgcttcctcacagataccccaaaggggtctttcctggtctctgtttctttctcttaacatcaagccagaccaggttaatttaaaaaaaaaaaaaaaaaagcaagcaagtggagctgatgattgtccctttttctctggaggataatttgaatcatgggaaacttatttaagtttgtgtgatggttttaacttaatattttattttaatagtcttttgccaacataaatttttatttttctttctctaaaactattcatgcccagtcttttttttttttctcccaggctggtgtgcagtggtgcaatctcagctcactgcaacctccacctcccgggttcaaatgattctcctgcctcagcctcccaagcagctgggaccacaggtgcatgcctccacacctggctgatttttgtacttttagtggcgacggggtttcgccatgttgggcaggctggtcatgcccagtcttaaatgaactattaaccattaggatgccccatgcccttgttctttggaaagagtctgtaccacagacaacattctacttcactgttatgattgtgttttttatttccttgctcggaaagtcttcattattgataatattagagtacttagcagccaattttcctattttttactttttagagctatagatgtatgtaggctaaaatattttattctgaatttaaccatattctgtaatacattaagaaaaccctagtgatttcttggttagaaattggtcaaaccaggaatcttagtctagaaacttttaaacttatacactgtatgtacattacttaagtactttaaaatctttaaaacatgaagtattctatttctttgacattcagtgggacacataatgaggccatcatagatttgatggtgacctaaatagccactacctctggccttgggttacttggcttcctggcccggcaacaacagattctgttacagacacctaactatctgtaatgctaccgatactaggtgagaacatgtagactttttgagggagggagaggccattcttaggatactgaggtaggaacagctagctaccatttgtattgtggttacaacgataaataaactacttcatcaaagcaattgggatttttttgttagaggatttttcagcctctttttatcctacttcattatatttattgttggggtatagttaggtaagcaaaaaagaaaaagagtatagaacagggatccacagtcgtcttttttaaaggccaaatagtgactattttaggctttgcaagtcatatacaggctgtattgcatatcttcttgttttgtttgcttccttgtgttttgtttttttacagcacttttaatacgtaaaaacctttcctagctctccagctgtacaaaaacataccataggccagagttggcctacagactatagtttgccaaaccctctttaaatcatgggcagcttcctcactttattcatttctagcatttcaaagctccagacactggatttcactatacattgttgaaatcagaatagagaaagtagaaagcaggtagaaactaggcaggactttactggtaatacaattagatagccatttttctcactttgaacctactcagttcccagggtaatcagatcccaaaacactgggtcatgcaatgagatgaacatcctaatgtcagtttattaatagaatacttatgttgccatctttagcacattctgtcaaatgtgaatcaagctacaaagtaatagcaatagataacttttatacagtacctactaaccaaccaatatcttaaacactttatatatatattaactaatttagtgttcacaaaaacttcttggggtagattatttttacccctattttactgatgaaaaaaacagagacaaagaaaggtgagataatgtgcccatagtctcatggctagagagtagcagagccaggattcaaacccagaaagtctggctccaaagtcagtgcttttactcaccacactaatactgcttctctaaacatttatgtaaatctcaccattagaactgagaaccacagaccagccttcctgacaaaagctggttttgccagagaatcttcctgttatctgagtagatgacttactttattgaaaaggatctgttgtaatctgacagggttctggggactctaaggtaagattgttgaggaaaagaaagaaaaactgaaagggaagagaatccaagaactgtagtccctggtgagtttcaaccaagagctttttgctaagcagtagaatcgattgcactacagagatacagaaagccagatgataaacttgcttggttagcatgggctccaaataagagagttatatgaatcagctgtttaatagtgaagcaggatatttccctaagcccttctcaggcagaaattgcagtgtgtgggcgcaggaactagccagccactttggtgccagcaggagcgaacttcactcactcgcttctccactgctcacaggagggtgagcacacgtgagcaggtgcaggagctgggctgagcgcttttgggcactggtaagagcgaactccataccagaccagtggcagcatctaagggaagctgcccgtgacccctggatccccagaggaagcgttacagtgcccttttagctttgctgtctgtagacagcttaagcattaacagctcagttgagtgaccctccattgtcaccaatgtgacagccctttgcacccacactcatggcacccgagttcttgtccggcatccaggataaatgaggtcacacaaacgagttggagatggtaaatgcaggggattttattgccgatgaaagtggctctcaacaggaaggggagctgaaagggggatgaagcaggaagataatcccctggagtccggtcatccccagccagactcctctccaaagctatgccatcaagctgtccctctgaagtcaagccgcttctctccgatgtccaaccgtggtctacaacatccagctgcttctcctcttctttctctgttggctgagcctggggtttttatgggcacaggattgtgggtggggtgggccatgggtgattttggaaaaggcaacatttgagcaggaaaacaaggatgtaagttctcactttgggccatggtattaggctttttggctttaggatggggcgctcaccagagacctaccctcttctgcccagaaatttgcctgcctcctgtccctatcaatagcacccatctaacaactgatgcatctatcttacaacagaaatggtcttgttagttggaaatactaaaagatccattggttaaaaccccctgctccctctccacaccagcaggagcctttctactgggattggaaataacagctgttggcttgacacagtggctcacacctgaaatcctagcactttgagaggccaaggcaggcggatcacttgaggccaggaatttgagaccagcctgaccaacatggcgaaactctgtctctactaaaaatacagaaaattagctggtcatggtaacatgcacttgtagtcccagctactcaggaggctgaggccctgcccgtatggaaaaattaacaaaatggatcaaagacttaaatgtaagtactaaatcagccaggtgtggtggctcatgcctgtaatcccagcactttgggaggccgaagcatgtggatcacttgaggccaggagtttgagaccagcctggccaacatggtgaaaccccatctctactaaaaatagaaaaattagccgggcatggcgttgcatgcctgaagtcccagcaacttgggtggctgaggcaggagattcacttgaacccaggaggcagaggttgcagtgagtcaagatcttgctactgcactccagcctgggtgacagagtgagaccctgtctcaaaaaaattaattaattaattaattaataaaataattgtcgttgactccttccaccttgggaatgaatctcaggcagtggcaacttttacatttactatgtagtttatttttcttcgcttcattgcccaattaacatatcttctttctgattgacacattctatatttggatggttaatatattcatcctgtaactttcaagttttgctggcctaagagtatttctgtcttttgtgactttgcatatctatattttagtccactttgtggtaatttaactctctgaaggacaataattttctttgcataaatttcaagttttggataaagtatcactccagctaccatgtgctaattatctatatcagtaccagagtgccatgtgttcctttagccagctaaaaagatatatgactacatcatggattttcatgtataatttaaaaatgagtaacccaaatgtacataaattaaattaaattaaattcgtagttccatctcacgggtttagtgacagtaacaaatccctccagcctctacaagcatcgctccttgttctatttggaggtcttaagcactttgtgatatttgttctttatttgtcactgcccagccctgatagaactaatcttttcacattcttcctcaaaagcccaagtgctaggattgtactcttggaaatggatacaattctataatctctaagtatgatttcctaatttcctaggtcaggaaaaaatttcttcctgttgtcctgctgtgctttgtcacagcaggtctaccttttcatttggaaccctctttgtcactgccatagtaacaaatggaaacattgagaacattttgtgacaggcactgtcattgttcccagtgaaatctcttcccctgtgtcttcccagtaaatgaaactgagaagaaaaatcataacaaataacatgaaagaggacctaatcaatatgttcccactgggctgtcaataccagcctgtgttaatctaatatgatttagtcatatgttttatggcagctgtgggaatatggacaggacctacaaatcatctttagactgaaagtgagtacacctttgacagattatgtgtaggcacttatatacaactctcagataaaagactagagacttcacccaagaaccaacattcttagaattaaaaaaaaaaaaaaacaccttcattaagtatggttaaaagccacgtatagattagaagattttactttgttggttttttttgttttgttttcgtttttgttttgagatggagtcttgctctgtcgcccaggctggagtgcagtgacagaatctcggctcactacaacctctgcctttcaggttcaagtgattctcctgcctcagcctcccaaatagctagaattacaggcatccgccatcacgcctggctaatttttgtatttttagtagagatggagttttgccatgttggccaggctggtctcgaactcctgacctcaggtgatccacctgcctcagcctcccaaagtgctggatttacaggtatgagccactgcacctggccagaatattttatttggaatgataataaagtaactgtgctgactcataatactttttttggagggggagatggggtctcactctgtcacctaggctggagtgcaacagcacaatcatagctcactgcagcctcaaactcctgggctcaagccatcctcccacctcagtctcccgagtagctgggactacagggtttttaaaaaatgtttttgtagagacagagtctcactctgttacccagtctggtcttaaactcttggcctcaagcagtcctcctgcctaggactcccaaagtgctggattacaattgattaaaatgacaattcatttgggattacagacatgagccaccacccccagccagaatactctttattttaaaaatcctcacaacagcttcagcagagaaaatgtattacccttaaaaatattacctataatatgcaaatgactctgaaaaccactcagcaatcacaatgcaaataattctcctatttcccatctaataaaaaggaacactaattacattctctaggctgggagcagtggctcacacctgtaatcccagcactttgggaggccaaggcaggtggacagcttgagctcggcagttcaagaccagcctggacaacgtggcaaaaccccatttctaccaaaaataaaaaaattagctgggcatggtggcataagcctgtggttccagctactccggaggctgaggtgggaggattgctggagcctgggaggtcgaagctgcagtgagctgtgattgcacccctgcactccaggctgggtgacagagcaagaccctgtctcaaaaacaaacaaaaaacaatttcattctctaattcatgtttagaaaagaacattggtttacaaaaaatttttaaagagttttttcagaacaaggatgccacttcctcttcacgtggcacctatctatacttctgagaaccatgaagactctctaattatcttcatattttatatcctcaccttgtttctttggtcccaaacatttatagcttccttccccattcttcttaattgctgcttcattgtgctatgcatagaagtggtgcagaattcttgggatttgttttttctacactacccccttcctttgctctccatctcagaagactagaagacaacttggtaagtgttgaatatattgtttctcagacttcttcactcaaaaaccaaaaccttcatatgacccacatctgctgaggatttacttgatggtgaccaagatgacagctgcccactgctaaacaacccaatgtcaacaactctttttcttgtctttctgctctaatgggacatcttctctgttttatttcttgagcagaaatttttcttaaaaccatcaaatgaacagtgaaattggcttggtcattaggaatatgaaacagaccaggcatggtggctcacacctgtaatcccaacactttgggaggcagaggcaggaggatcacatgaggccgggatttcaagaccagcctgcacagcacagtgagaccccagtctctacaaaaaaaaaaaaaaaaaaaaaaaaaaatagccaggcagggtggcatgtgcctgtagtcccaactactcaagaagctgaggtgggaggatagcttgagcccaaaaggttgaggctgcagtgagctgaggtcacgccactgcactacagtctgggcaacagggggagaccctgtctctacaaaaaaaaaaaaaaaaaggatatgaaacattcaccacagatagtagttcaggttcatgcaacagaaagcaagagagagctatacccttgcacagtgataggatgctttattacatgccacactagtgttatacatccagagtcttagtcaagctgaagctagaccagcaccaaatttcataaacactgtctatgattatttgagccttcgttagttaaaaaaatgtaaagattatcctctccagccatgatttaaaaaaagagagagagaaatcactttgttcatgtgaaatacaggatgattttagagtgaagcctgtaatttctcatcaacgcaaatgttccctcaaagacctaatatcctgaatggccttcatctagaagcaattgtaaatagataatggaattgaaaggagtttatcttctgggaatgtggataagacacagacagtctgaaccatgtaggctatcagactccaaagctcagatgtgaaacttaggtttcttatatttgatgattattgagaaatatttattctaagaaaatgatgttgatatggaaatttttatttagttgcagaggtccacaggaaatgtagtaagtaaaatttctgaagttcattttcttaaacagaattgtgacataacaaaatatatgtgtgttagttccctgacctagaatattggtgagccaattggaagtaatttgaatcctaaaattctctcagctgctattaaatgaatctggtcaattttacctgtctgatacatccaacatgtatcagttagcttttactgcataactaaccactttcaaaacctagttacctaaaataacaactcatttatttagctccacaaatctgtgggttgacagctgggcctgtgcttacctggacagttcctctggccttagagtgttgagagattaagtaatttgcccaaggtcatattgaaagctaagattcaaactcaaaatttggcctcaaagttcttagccctagccattttgctatactcccttttattactacaacatcttagcttcctctctaaaggaggagaaatagccaaagtggttttataaacactggtctgtcgactggtaccagtctatgacataagagttttcatcagtcagtatcaaaatgtaaaaaggcaggggcaagaaagtaaatttccataaaactaaatgtattcagttttaaatcttgcccttcctactttgagggagttcagttttctttctttatgaataatgttggtaatagtggattttttaaaaatgttcttatctagcagaattaaagtttgccagctctgtgtttatccctaaaatcttttgggcaagtttcaatgttctgtgaaatcccaaagtctgggattcactgatcaaccatattttttcataaattctacaaaattatttggccttttttttttaatgccagtaaaaaattactgatgacgtgaatgccattcatgttgggcttttctaatatctggcccacttcttcatataaagaagatgagtataggccaggcgcaggggctcacacctgtaatcccagcactttgggaggctgagacaggtggatcacttgaggtcaggagttcgagaccagcctgaccaacatgatgaaaccctatctctactaaaatacaaaaattagcaaggtgtggtggtgggtgcctataatcccagctactcaggctgaggctggagaatcgcttgaacccaggaggcggaggttgcagtgagctgggatggcaccaccacactctagcctgggcgacacagcaagactccatcccaaaaaacaaaataaaaagtaaagaagacaagtatagaactgtaagttctatacttactgtaaacagatgagtacaggccgggcacggtggctcacgcctgtaatcccagcactttgggaggccaagacgggcagatcacgaggtcaggagatcgagaccatcctggctaacaaggtgaaaccccgtctctactaaaaatacaaaaaaattagctgagtgtggtggcagacgcctgtagtcccagctactcgggaggctgaggcaggagaatggcgtgaacctgggaggcagagcttgcagtgagccgagatcgcaccactgcactccagcctgggcgacagagcaagactccatctcaagaaaaaaaaaaaaaaaatgatgagtacagagcaataagtataatatgatgtgatttgtattttgttaaaaatggtcttatgtgtgtatgttgtaggtatacttataaaagcatataaaagttccaggaagaaacactccaaacagctaacagtggatgtactgggaggtggctgaatgaaataatcactttctactctgtatgtctgaatttttttttttttacaatgtgcccttattggctttgtaattagtgtaatctttaaataaataaaatcacatgtgtgtagcactgatgcagagcctagccaaccttagtacctagcagaaatcttcactgtggtaaataagtcatcagacacagcatttcaaactatacgataatttacataaaacataacctctgatgttttaaggctacttatcagcaaaggtctgaataaaacaaaattagcagcatgattgtcaaattaacagctactctctcttcagatatataagttctgaaaccaggggtataaacacaggcttttaatttatttttcatttaattatccaattaacgttgacattttatagaatttagatatatttctagcccacaaagtaaatggcaaattaaaaactgatttctgtcatcaaatgctcttaaaattttagaaccatcatgctatgagaaattttcagttgatcaaatgtaggtttttgaattgagttaaataataacaaaatgatccttcttatgaattagggcataagcacagcttcacataaacaatgttaccatcatcttatcccagcagctattactttgccccattgaatcttttgtttttaactatatcatttagagtgtttgtgctgaaaggaaaattttaaaaaatcatattttctggttttcagtttccagtagtgaaactcttttcaaatgagatcttatctgaatcagaatgaaatgaacccacaaaaattaaaaattaaaaatgtttttaagaaagaatgaaatgagattaaacaaactcccatttgtccctatccacattttatttggtggctcatgatgtcacgtaggaaaaccatgacctattcaaaagcccctatttgatgaatgaagaaagtaaggcccaaagaaaggtaagatgagttgtccaagggagttaattgcaaatacgagacaagaagccagattactgaattcatgaagcagcagttacttgtgttcataatccaaatgaaagttgtcagttaaggctgagcgcagcagctcatgcctgtaatctcagcactttaagaggccgaggtggacaaatcacttgaggtcaggagttcgagaccaccggccaacacaacatggtgaaaccccgcctctactaaaaacacaaaaaattagccaagcctgatggcgggcacctgtaatcccagctacttgagaggctgaggcaggacaattgcttgaacctgggaggcagaggttgcagtaacccaagatcacgccactgcactccagcctgggcgacagagtgagactccatctcaaaaaaaaaaaaaaaaaaaagttgtcagttaagctgtctgttatttagtcctcttggaaacatataggtcaagagtcaatatcccaaatgcacagaaggaggggttttttgttttgttttgtttttgtcttgatgtttgactttaacaataaacagaagcatacgctaaacttttattttgggaaccacatcaaaagatcacacattagctttaaaatcaaatactgactcagtgttgtacatctatgctccatgaagaagaatgacttttaaagcagtgttttgaaagggattagggtgaaagggcatcttatctatatgagtgcaaaatactgcttagcagtactcttcaagagctttcttccgaaattaagatcatttttaaattgatgggcttttggttttgtttttaattcaaatacaatgtcccataccatgttaacagaacttagtaagcttccatttttagccaccacaaagaaggaataagaagttattctcaaagctgtagctataggacaataaagttattctttcttatagctacagtactgaccacttgcctgtatattacacattgcttctcagttgctcactttatgtgggagggtgtgttgtgctgaactatcttaaagcaacctttgctctaaattgacttcctgtacatgtcaacaattaacaccatctgacaccaattaagctttagttttcttttcttttcttttctttttttttttttttgagacggagtctagctgtgtcgcccagaatggagtgcagtggtgtgatctcagctcactgcaacctctgcctcccaggtttgagtgattctccagcctcagcctcccaagtagctgggactacaggtgtgcaccaccactcctggccaacttttgtatttttagtagagacagggtttcatcatattggccagaatggtctctaactcctgacctcagatgatccacccgccttggcctcccaaagtgctgggattacaggcatgagccactgctcccagcctggttttcattatgcaaatacctgctaggtcagaccttaccctggcaggcacagtagctttttcagttatttcaaaatttaatatttattattttccctgaaaaatcagttttctaaaatttgggtcacaagttgttatttgagttcatgactaattggtagtcaatatgaagtcaaaacaaaattttactaactagactacatagaaaatacaaaaagtttacatctgagcacttttcagcagggggaaaccattactttgtcacatctggatattctaagctagccaaattgaagtgggaatttcctgccagatgttagttctttgagcaacctgtgaacatctaagtaagtgaggggttatgagtccttgtttggtagagctatacccactctggaggcttgctcctaacaggcagcagacattttatatgtactaccaccagtcaggaggttgtgcaacctatttgaagtcaatatgatgtgctcttgttaaatgtcaaaacatccaaggcctcattttgaatgtacaacatcagtcttacagatattatatccagggtgaacattgcattgaaatgtcctcccaaatgtagatgacaaaaattttgtttcattaatagaaagaaggtaagactgaaacaccacaggtattccagataacttggatagggccattttgtaaagtcagtgtagaccaaaatatgtctctaaatatgagggaaataaagaatctgaaatgacatgaaaaataccaagtatttatatcaacctcctgttctagacgcacatgggaattaggaagtgaaaatttcattcagaagagctgtgcacaaaaagtggaaatgcattattcaattgaaacaagtaacatttttaagggggataaaatactttctacatgatctcactggttttgtcgtcctccgtaagggaaaatattgacatttaccagactgtttgctccagctttctgatctcctgcagtttatttttataacaaccttatcgatgggcctcttacccagctctctaggtttaactgagttgagtcgatttgttaccacagcttcaagtagctgttacagaacaagcaagacatcctaataaagctgtaaacgtgtttactcaaacagagtattgattttacttggaggggaagaagccggttcttagcacagtgtcagggtggatgaatttcactgcagtttttcattgtcatctgtcagggttgtgaaacactaagtaaagccatcagaggataattagaagtaccagaagtttagcccctaaaatcagttaaccacttgggagttttgtagcttaattagcttttattaaaactttccctagtattaatagccaagcacttttaatggtatttccaagtagatcaagatatcaagattgtgacttgttaaatatatgaatttaatggctaagggtttttcagaccttttctcactctaaattaggctaccactagaacataattagaaccaaaaccaatgtaaagatacagtgatctgtacttatactagcagaataaatgcatgatttttttttctgaaaaatcaacttaaaagaagtagtaaaacaattataaaataatttaagccaggcgcagtggctcatacctgtaatctcagcactttgggaggccaaggcaggaagattacttgagcctaggagttcaaaatgagcctgggcaacatagtgagactcccatgtctacaaaaaattaataaattagccgggcatggtggtgcacacctatagttccagctactcaggaggccaaagtgggaggatcgcttgagctcaggaggtcaaggctgcagtgagccgtgatcacaccactgcattccagtctgtgtgacaaaacaaagccctgtttcaaaaaacaaaaataaaacatgtctttgtagaaaaatccagtttgcgtctttattacacttaaatgtttttgtaacacaatgtgatctaaacacataaaactgtcaatgccacccttatttttaaataccttgattaaagcagattctaaaatattctagcttactttaagttagtcattgtcttaacaataaaagctgatgcacgttgtgcaaaaggtaagcatcagagtaaggagttgcttaccttctgtagaaactgcattagctactgagcttcatgaaaagcattcatgtgaacactacctgacctcttccaaatgtctagaaaaacaaatcacagttgaaaaaaatcacccacctagaaaatgaacaaaaaaactggaaatttattaaaaataagtttgaccttctctcatgatgctgcagtcaagcaaaaatgaaaaataagtttgaccattatatttaaagtacatcttcccatatctaaataattcatttagtgctttatggtaaactttttatgtcttcttgcactactgcctcggcctgtctaaatgactaataaaaattatgatatctctgggatgaccagttctaaagcctaagggtaacagactctgtcagaaagaacagcaaaagatgttgggttttctttgtctttgaaatgctttgtcacatgtttatctgtgcatatagttctaagccaaattctaccctgaattgctttaagccacaaagtagcaggttgtaaaatattgttgcataagagggcacctctagagcttgctcttctaatttttctaaaggtagaagaaattgacttttcacaattgtatttagatcattcttccatattaaggtattcaaaaacagaaaacataaaggatatggatttatgattatatcatttttatgtgcatttcaaaaggcccacaatacagtaatttattttattctatgcaattttcttgagaatgacagcatgtgagagagctcgttggatggggaggggcagtatatagtagggtagccatatttgagcttcaaggcactgtttactctgactccttcagtcaaaaggagcataaacccatttcacctagttcaggttaaggaattttttttttgtaaggaagatattataacagtggttaagacactgggtcaaaatatgtggggttttttgtttgtttgttttggttttttttgaggtggtgtctcgctctgttgcttaggctggagtgcagtggcgcaatcccgactcgctgcaagctccgcctcccgggttcacgctattctccttcctcagcctcccgagtagctgggactgcaggtgcccaccaccacgcctggctaattttttgtattttttagtagagacgaggtttcaccatgttagccaggatggtctcaatctcctgcctcctgatctgcccgcctaggcctcccaaagtgctgggattacaggtgtgaaccactgcacctggccccaaaagatgtggttttaagtcctggtaccacattaactagttgtgggactgctgtggtttgaatgtgtcccctctaaaattctagcattgtcaatgtgatagtattaagaggtggggactttaagaggtgattaggccttgatggctcctctctcattaatgggattaaggcccttataaaagaggcttcatgcagcatttggctagcttgctcttccactctggcttacccttccaccctcacaagacaccaaatgccaacagcttgatcttgaacttcaaagctgccataattgtgagacaataaatttctgttctttatgtattacccagtctcaagtattctgttgtagcagcacagactatgagagagactatggaaaagttaattctcttttttgtttgtttgttttttgttttttgtgtttcttttttagatggagtcttgctctgtcaccaggctggagtgcagtggcatgatctcggctcactgcaacctctgcctctcgggttcaagcgattaccctgcctcagcctcccaagtagctggcgactacaggtgtgcgccaccacgcccggctaattttttgtattttagtagagacagggtttcaccatgttggccaggatggtctctatatcctcacctcgtgatccacccgcctcaacctcccaaagtgctgggattacaggagtcagccacagtgcctggccgttacttaacatctctaagcctccgtttcctcatttataaaaatgaagataatgagtacctatctcatttgggttattatgaaagttaaatgaagtaatgtttataaagcacaacacctgatacatagtaaggattcattaagtgttacatattataagaggggtctcaaagaagtctcagacaagagccagaatgacaagttttcactgaaagtatagccagatggtgattgtaggttcaagtcagttctggagacctcagcagcagatactggatcttcactccagttcttcactaattaatcctactcagctgcattacgtgtctgcgtcttactgtctcacagtcagcttcccagcctgtctttgttttccattctggctcctaaaagagaacactgggttattagctcaattcactttttatacaatgtcatcagtaggacactaggagaaccataagttgtttgcccttgaacgagatgcctaccctttgttccatttaatagtaaaggttgaatttacgtgcacaaaacattctgcagtgctggaagtgatttttcttaaaagggtaatacgtggatgggctctataaacattgtgtttgcatgccttgtccactaccttcttcccatatttatagttctgaaaatgttccctacaacgtgatccatctatcatacaatacatggaacatcaaacagcttgtatctcaagctagaaacctagacgcccttcctgagtccttccattccctctctccaaaccgtcagtgagttcttttgattccgctttaaggatgtatctcaaatttgtccacttctatttctctgtcatgactttagcttaggcctgttttccacttactgtagtagtttcctaactgatgtctatgccttcactctttctggaactttattccattttctgtataatagccaaaataatcactttaggaagaagttgaattatttcattcccctgcttacaacctttccgttgcttctcactgcacttagcctaaaaatccaagctcctgtggtgatttaaaaaaatctatatgatctgctatgtttgtatctttatttcattccattttcacctttgcctgcatgatgtagctatactgtcagtcttctttcaggccttagacactttgtacagtggagtttactttgcctagaatgttcctcccctactctttaaaagtcaactcttctgtaatcatcctatctaaaatgggtcccttgactaatattctctcctgttactcagttctttttcatagtagcacttaacactctggaattgtcttatttacttatttgtttacttgtttttgtctatttcccccattacaatgtaagtttcagaagaacaggaactgtaagtgtcttatttaccagcgtatccccgggacccagcacagtgcctagcatagaagactcagtaaatattagttaaataaatgaatatatcaatcatatgcacagctgcaaaccgatttgcccctaccatcaagtaaagaccatttagtcggtatttctaggaatttggttattgaggtatatcataagaaggggttagaataagtcaggaaacagagtaggccatactttaggatcaggtcaacttggtttaagagtaacccacgctaggccaggtgcagtggcttacgcgtgtaatcccagcactttaagaggctgaggtgagacaataaactgagcccaggagttcaagaccaaccagagcaatatcgtgagacccccattggtatcaaaaattaaaaaattagccagacctggtggcaaacacctgtagtcccagttactcaggatggtgagataggaggatctgttgagcccaggaggtcaaggaaacaatgagccataatcatgccactgcactccagcctgagtgtgtatgtgactaatccagaaacagagagactgatcatactacctttagtatcacttaaaataaaggatgctgggctggggggcatggtggctcacgcctgtaatcccagcactttgggaggccgagaccggatcatgaggtcaggagatcgagaccatcctggctaacatggtgaaaccccatctctactaaaaatacaaaaaattagctgggcgtggtggcgggcgcctgtagtcccagctactcgggaggctgaggcaggagaatggcatgaacctgggaggtggagcttgcagtgagccaagatcatgccactgcactccagcctgggtggcagagcaagactctatctcaaaataaataaataaataaataaataataaaataaataataaaggatgctatggagagaatacatgtgttaggaaagaaggtagtatttaataataattgtactaagtagttatagtacagatacaaaaaatttattctcaagatcataatcctgaacatcagttcctgctgtaataggcagtaacatacaggtcagagactccagtcaagatttcataaaatatattaaagttatccagtagatctccaagttgattcctgacatcactctcaagtcccctaatacacacatcacactctcaaacttacaaatttggtttgccaaaatgtccagtgggaagggtttaattcagcagataatagaaccttgccctgtcctacctaggatctttgctgccattccttcgtttataggtgtgagtggggtaaaaagtagctcatccataaaggaggcagtgaaaatctctagtgaagagcactgagcctgggacataacctgtttcattttccacagcttctttacctcaagccacagaattgttcttagctctttaacttttgtcagcacccacatcaaatcaacaaacttgtttatttttcttctttccttactatctatcacccagaatagtggttctcaaacttgagcgtgcatcagaatcatctgaacacttgttaaaagatctgttgctggaccctctcccagggcttctgatttagtaggtccgtgatggggcttaagtgatactgaagcagctggttcagggaacacgctttgtgaaccatttctggaaagaattttacagtagattcccatttgatctctctgcaagcagtctctttcctagtaagttcatattccacacttctgccagagttagctgcccaaaagcaatgtaatatgcctcccctgtatcagagtttggttggctctctatttattatagtataaaatccaaatcaggctgggtgtggtggctcacacctgtaatcccagcaatttgggaagctgagatgggtggatcgcttgaactcaggagtttgttaccagcctgggaaacatggggaaaccccatctctaccaagaatacaaaaaattagtcaggcatggtggcacacacctgtggtccgagctactcaggaggctgaggtgggaggattgcttgagcctggaaggcagaggttgcagtgagctgagatcacaccactgttctccaacctgggtgatagaatgagaccccgtctcaaaaaaagtccatatcacatcatacaagatccttgacgatatgtccccattttgtctttcccgctgtgtccccaactcagctgacctttgactatattgcaaaataagctttgtcctgtcaacagcatggctttttttcctgcttataatgtctatctctgcaaaatgttattcattcaacacccagctcatgtcaccttctccaagatgcatttctaaatgtcccccaattgaggtgttatgttatttttaaagtgcatacgtggctttctctcctaaagctataaaaccctcaaggacaaacactgtgttttatccatctttgactcctttggtgcacccaaagcccagtacctagacattcaatagctgttggttgatggaatgaatccaggtacttctgacagattccagattttcactttcttttgtttcttataataaaaatgtagtatagaagcagtcatggcatgagtctagtaaactgaggattcagatcagtcaaagttataatttatcttattccctttcctaaagcagctagagataatgaaaataaaacctttaaaaagaatgtaacacctttaagttgactgcctcgtgtacactgtggcagcatatatctggtaatcattggtataggaggtaagtttaacaggccagtttaagacagcatataaatcatcactaaaggacagatagctaagaaagatggaaaataaacaaataattgaaaaaccagattgacccagaaatgactaagaacaaagtttgtgcagggagacagggagaattgagtttagtactgttagttgctgtaaaatatatcaggtttgctttaattacatggtaatgcttctaagaacaaaggtaattacatgataacttatgttactactcccatattatctctaaataactatgtaattagcttgtcactactatacagtgtgaagtttgatattactcatggataaagaacattggtaacttaagtgagtgagcaagggtggggtgagggatggaggcagcagggaaatcatagaattattacaatcaggaatgcaaatggttaattagatcattgcacccagtccttaaggatctgagccagagccatggagaataccaaacgagtctgaggtaaattctccatggcttgtcacagtgtcttctgaagaccataaacatacaacaaagtaagttgacaaagcacgcaacagatcaatgagtttgggatataatgcatgtaattttaaacagttccttttatttggggaggtttttcttttaagtaaatactaagaattttttttaattgaaaaatatttcactcatctcattttccaacatcctgaggttatatgtgtggcctatggggtgaggatgtgtagcactgggaactctcatttattgctggtaaaaaatgcaaaatggtaaacaaccactttggaagacaatttggcaatctcttacaaaactaaacatacttttaccatatgatctagcgatcaggctccttcgttgcccaaatgatttaaaaacttacgtcttcacaaaaacctgcatgcatatgtttatagcagttttattcataattgacaaaacttggaagtagctacatatctttcactaggtgaatggataaacattatcgatacaataaaatatgattcagccaacaaaaagtaatgagctatcagctgggcatggtggctcacacccgtaatcccagcattttgagaggcaaaggcgggcagatcacttgaggccaggagttcaagaccagcctggccaacatggtgaaaccctgtctctactaaaaatacaaaaattagctgggcatggtggcaggcgcctataatcccagctacttgggagactgaggcaggagaattgcttaaacccaggaggcgaaggttgcagtgagctgagatcgtgccattgctctccagcctgggcaacaagagcaaaactctgtctcaaaaataaaaaaaagaaagaaggaaagaaatgagctattaagccaagaaaagacatgagggaaccttaaatgcatgttgctaaatgaaagaaggcagtcttaaaggctacatactgtgtgattctaactacagtcatgcaccacataacattttggtcattgacagaccacatatatggcagtggtctcataagattataaaaccttatttttactgtaccttttctatgtttagatatgtatagatacataggtacttaacattttgttacaattacctaaaattcaatagaataacaggctatacaggattgtagcctgggaacaataggctataccatctaggtttctgtaagtacactctgatgttttcacaatgacacaatcacctagtgatccatttctcagaatatatccccgttgttaagcaactcaagactgtatatcacattctagaaaaggcaaaactatggagactgtaaaaaagtcagtagctaccatgggctggagctgtggcgcaaggagagagggatgaataggtagagagcactgaggatttttagagcagcaaaactgttttgtgtgatactttaatggtgtatattattatatttgtcaaatcccacagaatatacaacacaaagtgtaagccctaatgtaaactatagatattatttaatgataatatgtcaataatggctcatcgattgtaacaaatacacccactaactaatgtaacaggttaatcataggtggaactggggagtaaggggatgagggaagatttgggaactctctgtattttctgcttcattgttttgtaaacctaaaactgcccaaaaatataaagtctaatttttttaaacccaagtgggaaaacctttcttcgatccatcttattctactgacatcttgggtgtgtatgatggtctgtgtttcccagtgtcatcaatttcactgccttaaggtgctatggcttagacttgtgtcctgtggccagtgacctcacagtttttaccaaaatacttgttttcattgctatcacgtgatagctactctaagtatgattatccttcttaattctgttaggaatccccccggcattccctgtgagggaagtatattagtccttgaatttccgtttcaaaagatgcgtactgatttacttggtatatagcttctgtaagaggaagtttcatttgggaaagaaaggttgtgctaaggttccctcagaaactttctaaattgccttctctaaaattgcctgtgtttccctaagcctaagagtaaaatacaggaaatagtgatgatttttatgtgcttgaggaatcttctaagaagagtgaccaattttattctacttatactgatacttgtactgatttaccttgtggaaaattcatccagtggctacaattactaactcactccaaaggcatgagtgggaaactattaaaataacacatcacttagctgaaactcttgaatggttgctcttaataaccatttttctgaataatttaaagttcccatgttttttaaaaaggtttattgacttagatctgatttgaaaagtgtaatgtagcttattatagaatatttaaaacataagaaaaacaaacaggaaaaaagtcatcccaactctagaaacttaacttttttcaaacacattttttttttttttttttttttttactattttgactaaacatgtttctaaatgtacttcttggatctgactaaagactaaaaatggaaggaaacacaagtagaaattataaagtcaggatcaggccagtgtggtagctcatgcctgtaatctgaaaaccttgggaggctgaggtgggaggatcacttgaggccagaagttggagaccagcctgggcaacctagtgaggccccatctctaccccaaaaaaaaaagaaaaagaaacttatttatttaatttcctctctttaaaggtatcatatgcaaaacagaaggtttgggggttttggggttttttgtttgtttgttttttgagacagggtctccctctgtagtccaggctagagtacagtggcacaatcatagctcactgcagcctcaaactcctgggctcaagcagtccccactaccttagcctcccgagtagctaggactaaaggtttacaccaccatgcccagctaatttttctattttttgtagatacagggtcttgctgtgttgccagggttggtctcaaactcctgggctcaagcaattctcctgcctcaacctcacaaagtgctgggattacaggcatgagctgctgtgcccagccagaagttttcattttagcacagtttaatctttcactttctggtttctgctttttgtgtgtcttatttaagaaatattttctacctctaggacataaagatattttttattttcttctaaaagtcttactatttttccatttacatttaactcattgatagacctggaattctttttttttttaatatagagtgaggtaatgttatttttccaaattgaaaactagttgcctaaacactacttttctaagaagccatcttttccccatgaatttgcaatggcaactctgttgtagctcaagtttccaccttttctctatttatttatagctatgccaacaaacactgcatttattattatagatttttagaagtatttaatctggtaagactagtctctcctatcatttttacttcagtaagtgtatatgcctgttcttgatcctttgctttttcatataaattttagaatcaacttatcaggttcccaaaaacattgttgagactgtgattgaatttgtattgaatgttatcttcttctccaataacccagcatatctctccatttaggtcctttgtaatatctttccataaagttctatagttttctttattagaggctggcataacttgcatcgcttttgtatttttaccaaattacatttttaaaactgttgctcttgtatatatatatgtgtgtgtgtgtgtgtgtgtgtatgtgtgtatgtgtgtatatatgtatatgtatatatgtatgtatattctatatacaaagctgctctcaatgaaaatattgacaaatttatttcttcttttacaattcctgtgtgtgtgggggtgtgtgtgtgtgtgtgtgtgtgtgtgtgtgtgtgtgtgaagatctcgcactgttgcccaggatagaatgagtacagtggcatgttcacagctcactacagcctcatccttctgggctcaagcaatcctcccacctcagcctcccaagtagctgggactacagtcatgtgccaccatgcccagataatttctgtattttttgtagagccgaggtttcaatttcttacccaggctggtcttgaactcttgggcttaagcgacctgcccaccttagcctcccaaagtgctggaattacaggcacaaactactgcacccagcctccctttacaattcttaaattttttttagtcttgttactcttgttagggcttccccactatgttaaatagtattgattttttattttattttattttttgatacagagtcttactctgttacccaggctggaatacagtggcacaatctcagctcaacacaacctccacctcccggattcaagcaattctcatcccttagccaaccgaatagctaggattgcaggcacacaccaccacacctggctaatttttgtatttttagtagagatggggtttcaccatgttggccaggctggtctcgaactcctgacctcaagtgatccaccagcctcggcctcccaaagtgctgggattacaggtgcaagccattacgcctggcctgattattattattttatttttattttttatttatttatttttgtttttgtttttgtttttttttgaaacgaactcgttctgtcacccaggctggagttcagtggcccgatctcggctcactgcaagctccacctcccgagttcatgccattctcctgcctcagcctcccgagtagctgggactacaggcacccgccaccacccccagctaatttttttttttgtatttttagtagagacaggttttcaccatgttagccaggatggtctcgatctcctgaccttgtgatctgcccgcctcggcctcccaaagcactgggattacaggcatgagtcaccatgcccagccctcattattatttttaatgggactgtgtatgttttctatttatttgtaattttactgtttccctttttccacattttctgcagttattgggtatgacttttataatcagaaaaacaatattttcacttgctttcttaaaaataaataatctcttagtgaaggcctgaggggtccttataggtgtaatatggatggccatggagctgctatggcttcaggctttatatatatgaggtattgctgtctattcacagtattctctgacctttaaatttatgtggcttaaaatctattttcaatgcataaacatttgtatatttttccaggtgaacaatgtactacctagatgtataataatttaaatttagtgtaaaatgagattttttacaacaaattatatatttccaaaaactttaaaatgtttaaactctacataggcatatggtggtctactatatataaaaggtttctgggaactatttaagaagataaaaatagagccactgacatgtatttgtactgtatctttgggaaaacaatttcagcgtaatatatacttgtaaaaagtgaattagtaaaactattctggccgggcacagtggctcacacctgtaatcccagcactttgggaggctgaagtagaaggattgcttgagcccaggggttcagaccagctgggccacatggtgagactccatttctacaaaaaatagaaaagttagtcaggcatagtggcacacacctgtagttctagctactcaggaggctgaagtgggaggattgcttgagcccaggagtacaaacaaaaacaaaaaaaactttattcctccaagtttaaaaagtgcagcttgcttacttgttgacaagctgctgaatatagaatgaacagtaatagagtctactgggttttaggttccagctaccatgaaaaactattaaggaactataaatagaaaagaaaaaatggactcataaagactttgttcatttccttctaaaatatccctagcttattaagtgtctccattaaggcttccgtacccactgacaatatttcttgattctctgtaaatgacactaagaaaattctagatgctatagctcttctatagtaactacatggaatagacagcttaagttaggaaattacattgccttttgagcacaccagcaatcctacctctgtgtgctttgaggaaactagtgtagcacctcctctttttgtacaactttaacatatgtttcaggtctcatgtcaaataccagatacaatttgtcaatttattgatcacattttgtaacatcagtaaaagtctaaataaaatcaaccagaagataataggctacaccaattgttaatgaacagaggtttatttggaaagattgttccaggattcagagccagctaacaatagctctaggaacccaatttattgtcgatgagagattctcaccttatgcctcgtcagctagaggacctaaagtctataacgtctcctaaagctgggaaaagcctgagaggcccaggttgatacgcctatgtgtaacaggatagagagaaggaaccaaagtaaaaaggcaacaacaactgcctcagcatatgagttcttgatttggaaaaacctgcactgatggttcttgttctctggtgtaatgcctcctatgcctgctctcttggctgtgttgaaaagcatacatacagagctgtgctcttcattttcaagatgatgtactgataaggaccacaagccagtggcactgggaaaaagggatcctaagagactttttcttattaaacatacattcaaagtcagttatttaatattttgctttttggactcttggtaagcccaaatcttgttctaaaaagagcagacttttttgttttgttttgttttgtttgagatagtgtctcactctctctcccattctggagtgcagtggagcgatatggctcactgcagccacaacctcccaggcttgggtgatcctcccacctcagcctcctgagtaagtagctgagactacatgtatgtaccaccacgcctggctaaatttttgaatttttttgtagggacggaattttgccatgttgcccaggctggtctcaaacttctgggctcaaatgatctgggtgcctcagcctccctaagtactgggattacaggcatgagccaccaggcctgacttgtttttgtttttttgttgttgttgttgcccaaactagagtacagtaggctcaatcacagctcactgcagcctcaacctcccacctcaagcagtccttccacctcagcctcccaagtagctgggattgcaggtgcatgccaccacgcccagctaattttttttttttttttatgtagagacgagtctccctgtgttgcccaggctggtttcctgggctcaaatgattctcccatctcagcctcccaaagtgctcagattagaggtgaggcatgagccacccaacctagccttttttttttttttttttttaatacctgcaagccacatttatctgctatagtgtttaccaaccacactctggggcctgaggctgtgtttcagtgaatgaaatattaaaaagtactttgtttacttgctgacacagtacagtatttgtatctattaatagcatattgttattgttggttttttttttcgaaaaacactttattggaataatatacttaaaatgcagggaacttttaaaaatagagtgaggccaggcatggtggctcacacctataatcccagcactttgggaggccgaggcaggcggatcacctgcagtcaggagttcaagaccagcctggccaacatggtgaaacccgtctctactgaaaatacaaaaactagctgggtatagtggtgcatacctgtaatctcagctactcaggaggctgaagcaggagaatcacttgaacgctggaggcggaggttgcagtgagccaagatcacaccagtactccagcctggatgacagaggagactctcaaaaacgataataataattataaaatagagggtgaaagaccaaacatcctatagaaaaataagcaaaagataaaaattaattcacagagagatttgttctttaaagatatataaaaagatgttcagcttcacttaataagagaaatccagattaaaattatactgaaatatttctaacccatcggactggcaaaaattcaaaagctggacagtgtactatattggtgaagttgtggggaaatgggcactcttacattactagtagaaatagaaaatccttaaacctctatgaaggagaatcactaataaaactatgtatgcatatagttactcattaacctagcagttctacttctagaatttatcctgaagatacgcccctaataacacaaaaatacatatgtaaaattttattcattgtagcattgtttatatttccaaaacattggaaactatgtaaatgcccacacataggagatagattaaactacagtgtatttatacatggagatactatgtagctgtaaaaaagaatgaagaaaatctctaccaattgatgtataatgattaccaggagattttggtctctgactacaggagtctcgctctgtcacccaggttggagtgcagtggcgtgatctcggctcactgcaacctctgcctcctgggttcaagcgattcttctgcctcagcctcccaagtggctgggattacaggcacccgccaccacacccggctaatttttgtatttttagtagagacaggatttcaccacgttggccaggcaggtctcaaactcccgacctcaggtgatccacccgcctcagcctcccaaagtgctgggattacaggcgtgagccatggcacccagcctccaagagatacttttaagtggaaaaaaagcaaagtgtaagagagcatatatagtgtattacctccttttgtgttaaaacaaaaaaaaaaagaaaagaaaaagaaagaaaaggaagaaaatgtacatacatctgcttacctttactaaaagaatacaggaagataaaccagaaaacagtgaaagtggttgcttaaagggatggtgaggaggacatggtaaagagagtcactcttctttgagcatatcttttatagaatttttacttttagaaacatgttaatgttctacatattttttaaatattaaatcaataaggatagaatgtaagaaatgggactaaaactgaaagcaaactgaaaaacatgaacccaactatttccaatcttttcttaagtaaaatgagctccccaaagggggtaaaaaagagaaccaatctaagttacatgctgaacacagtatttgactacaccagagaacagaaaattaaccctaaactctttttagtagatttggatttttttcttttaaagttagggatgaagtgacttggaaactattttagatgtattacaaaagtgagtaaacaaataaatttgttgatatttttgggagctaggttctcactataaaagaaggaacatacaaataatgggatgaggaaaggcaagaaagaaccctgtggagatggactagaattggaagtactggtgtcagctcaatttctaaaataggtctctgtacacatgtatacgtatacagttatggatgtaagtgtgtgtgtgtgcatgactatgtatacatgcatacttcccagctctgttcattaacatggtctagaagcaaagagcacagctgccacccagatcttggtctctaataccattctgtgctaaaaagaaccagttatcctcagataaatggctgattccagggcatagtagagcccagaacattatgccagaacataaagaagggatcaaaaataatgtgatggcatatccaatgacacgggagccaccagcctgaacggctcccactggcaaaaactggaatattttaaggaccaaattaattaagggctgtaagggattataaaccattgatttaaaaagaattgtgggccaagcatggtgtctcacacctgtaatcccagcactttgggaggctgaggtgggcggatcaccttaggttgggagtctgagaccagcccgtccaacatggtgaaaccctatctctactcaaaatacaaaaattagccaggcatggtggctcatgtagtcccagctgctacttgggagactgaggcaggagagtcacttgaactggggaggtggaggttgcagtgagctgagatcgtaccactgcactccagcctcggtgacagagcaagactccaccacacaaataaaataaaaataattgtgcattcttattgataataaatagattttaaaataataaatgggagaagaggtaggctcttgtttatggtagaatggtgagggctgactggtaaatgtgaaaatcatttcacagctgcagttggaaaatcatcacagtatgagttgcttcagttaaaaattatgagtggatactcaatctgggagggggttgggacttttgataaagaacagaatatttatgtgatttttttttttttttgagatggagtctctgtcgcctcggctggagtgcagtggcgtgatctcagctcactgcaacctctgcatcccggattcaagcgattctcctgcctcagtttcccaagtagctgggactacaggcacccgccaccatgcccagctaatttttgtatttttagtagagacagggtttcatcatattgaccaggctggtcttgaactcctgaccttgtgatccgcccccctcggcctcccaaagtgctgagattacaggcaggagccaccatggccagcctaatttgatttgaggatttgctcagtctgtcttccttccttctttccttccttccttccttccttccttccttccttccttccttccttcctctctctctctctggtctctttctttcttttttctttttttttgagatggagttttactcttgttgcccaggctggagtgcagtgacatgatctcggctcactgtgacctctgcctcctgagttcaagcagttctcctgcctcagcctcccaagtagctgggattacaagcaagtgccataacacctggcaaatttttgtatttttagtagagacgaggtttcaccatgttggccaggctggtctcaaactcctgacctcatgatctgcctgcctcggactcccaaagtgttgggattacacgtgtgagccaccgtgcctggcctatgtgatcttaaattgtctattcacaaactgcttgttagatgcaagggaaaaaataggtactatacaatggagaagtaggacaacaccttgatcaggtggtcagaattcctatcaccagtgcacagcagatggacatgatgtgcctctaaatgtgacactttgagaaggatccatcataatgtgtgtagtagtctgcctgggtgtgcatagtctgaacttaatcatgagaaaatattagacaaatccaaaattagaatcagtctattaaaaatgggaaaataaataagtaatgggataagcgcgtcagacacagtggctcacacctgtaatcccagcactttaggaggctgaggcgggtggattgcttgagtccaggagttcgagaccagcctgggcaacatgacaaaaccgcatctactaaaagtacaaaaaaattagccaggcgttgtggtgtgcacctgtggtcccagctacccgggaggcagaggtaggagaatcacctgagcctagggagttgaggctgcagtgagccaaaaaaaattatgccactgcactccagcctgggcaatcagagtaagaccctgtctcaaataaataacaaataaattaaaaatgaggtgaggtaagttatgactatattcttcaaaaatgtccgtatctcaaaagtcaaaatctgaggaaatgttccagatttttaaaaactataaagataccacagttaaatcctgaactagactctgttccagaggagaaaatttccataaaggatattattgggtaattgactaaattgaaatatggacagtagattagataacagtgttactgaagttgatgttgatgtccacactgtagctatgtaagagaatatccttattctcagaaaagatacactgaagttttcagaagtaaaaagacattgtaaatgtaacttcctctcaaatagttcagggaaataaaattgtatgcagagaaagagtacatgcaaatggtgcaaaatgttaacaatattgtgcacctgggtagatgatatgcagatgctttttgtactatttttattcctgcaacttttttctgaatttggaatccttttcaaataaaatacattttaagcaggctaataattaaaaatctaaactaagattatattgggaaacattatgctaagtgaaataagctagacacaaaaagacaaatattgtatgatctcacttatatgaggtacctagaataggcaaatttatagagacaaaagtagagtagcagttaccaggggctagaagtaaagaggagtggggagttattgtttaatgggtacagagtttcttttggggtgatgaaaaacttctaaaaatgcatagaggtagtagttgcacattgtgaatgtacttaatgtcactgaattgtgcatttaaaatttgttaaaatagtaaattttatgttacgtatatttttcaaaataaaaaagtatcttggggatgtttacttccattataaaaggattccctacaattatttaaatataagctccctttgtttatttaaacaattttatacagctttcaagattcacatcagatactttttgaagattccacttataactgattatgtagtatctgtatttcattttagttggtttttaaaaatagattattgaaaaactgacattcaccttgggcaaaggtcttagcttttttcagcatccaggttctccacttgtcaaagcaaaagattcttcagaatacttcattcatcatctagttctcttagaaaaaggatgctggtggttttgcttcacaaaaatatttcataaacatgagctttttctttttctcacaatgatcataccaggcggaatgaagaaaacagatgttgcttataaggcgtctaatagacatgtttgcattgtaagctgatctgactctgaatttggcatctgctccattcactgtgtggactgagcattttcgcctcacagtttggcagaaaagttaatattgacttttgactgttacctgaaaacttggtgataaaatactcttactaaacctcttgagagagtgattttacagtctcagcaaatgtctttaaaatacatcattctattaaccattttaattttattctttggttgggaatacttatttgtttcatctaatacagagcattccccaaatctgactgggaaaagtctgtgtggtcagaatggtagaagaaggaggacataaatcacttataatgttctctacaggtcattataccacagcttctcaattaaccttcatccccctcaggctgcccagggcctcagggaaggcccagaagcctagctgcagcacagtttctcattattatctgctcttctgagtatttgagtgttaactgcagcagctcaggtttcccctaaggggaaggtagcccagattcttctgctcttgacctgtcttatttgcaattatcctttttttcttttttcacagttttattgtggcataatagacatacaataaacggtatgaatctaaagtttacaattgtataactttggacatatgtgtacacccatgaaaccatcactatggacatatccactgctcccatggccttttctaatcatgccttcctgctccttctcatccccttttggattgtttccagtttggggctattacaaataaagctgctgtgaacattcatttacaagtctttgtgtggatatgtgctttcacctaccttgggtaaatacctagaaatagaacggatcatatgatatgcacatgtttagctttttaagactgacagatggtttgggaaagtggtcttagcattttacattcccacaattagtgtgtgagagttccagttgatcacacccttgccaacacttgttatagtcagtcttttcagttttagccattctgcgagtgtgcagtggtatctaattgtgattttaatttgcatttctttaatgaataatgatattgaacattttttcatttgcttatttggcatctatcttctttgctaaaatgttaaatacttttgcctactttgtgttgagttgtttcttgttattgaggtaccaagtatttaattgtgacaaagttcagattattttttcttctataaaagttgtattcttagccaagtgtggtaacttatacatgtaatcccagtgctttgggaggccaaggcgggcagattacttgagcccaagagttcaagaccaacctgagcatctctacaaaaaaatgcaagaattagaggaaagctgaggtgggagaagagcttcagcccagaaggtcgaggctgcagtgagccatgagtgtgccactgcactccagcctgggtgatagtgagacactgtctcaaaaataaataaatttttaaaaaagaaaagttcatactttttacctcttactaagtgatctttagcaaacccaagatcactaagattttcttctatgttttctcctcaagagttttaggattttattccttacatttatgtctgtgattcatttcaagtgaatttttgtagatagtgtaaggtaaaggttgaaatgcttttttttcacacaatttgttaaagtgtcctttcttgatgggattgtttgggcacctgtgtcaaaaatcagttggctatacagaagtaggtttatttctggactctgttcagttccattgatctatttgtctatatgctaataccatagtgtcttggttattatcattctataataaattttgaaatcaggtagtataaatcctctggctttgttcttctttttcaaagttgagtttttgctaacctaggtcctttgaatttccatataaattttagaagcagcttgtcagtttctataagaaaaatctgctagaatttttattagtattccaatgaattaatagaaaaattcctgcagaactgataatattgaatcttctgacctttgaacactttatgtctatttatttaggcttcttttatatttctcagcattgttttgtcattttcaatgtgcaggccctacacaacttctgtcagatttattctaaggtacttcaaatatttgaagtatgtgaagtaccttagaataaatatggataaatattcttaactttttaatcaatttttgtttttgagacagggtcctactctgttacccaggttggggtgcagtgatatgatcatagctaaccacagccgcaaccttccaggcttaagcaatcctctcacctcagcctcctgagtagctaggtctacaggcatgcaccaacatgcatggctaatttttgtattttttgtagagacaggatttcgccatgttgctcatgctggtctcaaactcctgagctcaagcaattcacccatcttggcctctcagagtgctgggattataggcatgagccacgatgcctggcttattcttagtaacttctaattgttcattgctcgtatgtataattatatatacacattaccagtatagataatttacttttgtatttttagtagagacggtgtttcaccatgttgattttgagaccctatcaacatatgcttccctggctgggtgtggtggctcacgcctgtaatcccagcactttgggaggccaaggcaggcggatcacctgaggtcaggagtttgagaacagcctggccaacatggtgaaaccccatctctactaaaaatacaaaaattagctgggcgtgatggaaggcacctgtaatcccagctactcgggagcctgaggcagaagaatcgcttgaacctgggaggcagagattgcagtgggccaggatcatgccattgcactccagcctgggcaacaagagtggaactccacctcaaaaaaaaaaaaaaaaaggaagaccagattgacttgatggcaagttgttgtgtctcaacttgagctctttagaataaatattaggggaagctcatgatgtttgggaaaagatctcccgaccgggcacagtggctcaacacctgtaatcccaggccaaggcaggcagatcacgaggtcaggagtttaagaccagcctggccagcatggtgaaaccccatctctactgaaactacaagaattagctaggcatggtggtgcatgcctgtagtcccagctattcaggaggctgaggcaggagaattgcttgaacctgggaggcggaggttgcagtggccaagatgatgccactgtactccagcctgcgtgacagggcaagactccatctcggggaaaaaaaaaaaaaaaaaagacctccctaacggtaacgcacaagactttctcttactgtcaaggctgaagaatgagacaggtgcttagatcatatattggtctgacccaatatgacatttctgctgctgttatacaatactcatgtgtttttttttgcctgtgttctaggttttctgtctcaactggtctctgacaagcctctgactgaatgtatccgtgctggccactatgcagcaagcatcataattagacggactggctgcacctttcctgagaagccagacttccactgatggaagagctgaaaacacaagcccaggagtgcagacactgccctaattgcttcctgagaattcccatattaataaagaagaaaattatctgccattttttcctactataataatgctgaatcttaatttagagggtacaagggtatggtaatgcttgtagaatctttattatctcaacaatctaaaaaatgatgtttatttccatagtttgatagtgccacttaaatgccaattaaacaagaatataacatttcaatagaaatttttatttcattttcaattactttgtaaattcgtgtgtatttagtacactgatttgtttttttacatttctgctttgaatgcagatgcaatttaatataatagattttttaatgaattaatcttaacatagtaatctttagctttttatacaaatatatttaatttaggagtatatgtgtgtctatacacacacatacataaatataccacatatacacctgatagtcaaataaggtacagaaattttatcttgtcaattatgccaaataatctctttaatgtgcactcaaacatgtaataaactttggataattaaataatgtgccaaatttaagttgtaccacaatattcaaatcatagtcttatggaactctgtaattggacacaaacaaaaacttgtcatataggaatttttttctgtcttttccctgtgtacagcaaactgaggaagaaagatcattatttaatactgggccctgaaatgacacccaatttgttaatggaattatgaagaacagcaatataatacactgaagaataacttagtatcagagaccaataaatcacttttttaaggatgacaaaatggtataattggacttctggagtcagactttatatgaccttaggtaaatcttcgaacctcagtttcctttttgtaaaatgagataataacccttacatagaaggtcattgagatgatttgagagagattaccaagtataagatatttgttataatgccttgtaaatgctttataagtagctgctgttattatcattatgattattttctttttgaagaaaaaaagataatgtttgtaaaactgaattcaaatcataggaaaggatttggccaggcgctgcagctcatgcttgtaatcccaacactttgggaggccaaggtgggaggatcacttgagcccaggagttcaagaccagcctgggtaacaaagtgaggccccacctctacaaaaaaatttttaaattatccagccacaggctgggcacagtggcttacacctgtaattccaccactttgggatgaggcaggtatcactagaggtcaagagttcaagaccagcctggccgccatgttggtgaaactccatctctattaaaaatacaaaaattagccaggcatggtggtggatacctgtaattccagctacttgggaggctgacacaggagaattgcttgaacccaggaggcggaggttgcagtgaggcaagatcacaccactgcactccaccctgagcaatagagtgagactccatctcaaaaaaaaaaaaaaattacctgtggtggtttgcacttatagctactcgggaggctgagttgggaggatcacttgagcccaggagtctgaggctacagtgagccatgatcacacccatgtactccagcctgggcaacagagcaagaccttgtctcaaataaataaatatataaagtcaaaaacttgtatgttgaactatagaaagttgagtactatctgtagtgcaattaatttaaatataaagtaatttgatattttacagtggtgccaaagtgatccaatggggaaaggaaaatcttttcaacagatgatgctataaaaacttgatattcataaggaaaaaaatgaatctttgaccctgatctcataccatacaaaaaattagagataaaacatggtcacaacataacagctaaaactattagacttaaagaagaaaacaggggaatattttcacaagttggggtaagcaaaagtccttggaaagaaccatgagagcatgagagcactaaccatataacaaaaatattgataaattagatttcaaaaaattagaactttatgttcatcaaaagataccattaagataccccataggccaggatacaataatcacaacacatatatctgaacttatattcagaatgtatcttaatactcttacaactcaaaaatacagatactttacaaaagaagatatatgaatcactaagaagtacatgataaagtattcaacattgttatcatgggagaaatgaatgttaagacctcattgagaatactactacactagaatgactaaaattaaaatgacaacaccaaatgttggagaggacatggagcaacattgccgatggactgaacaaccactgaacattgctgatgtaaactgaacaaccactttgggaaaaggccctcaagtttttcataaaaaagtaaacatacacctattcgttcatccagttgtttcacttctgtgtatttacccaacggaagtgaaagtatatgtccgccaaaggacttgcagcagttttattcatcattgccaaaaactggaaagggatagttgtccatcaacaggagagcagataaactgatatattcaaacagtggaataatacttagcaaaagatgaccgagtgtgatggcccatgcctgtaatcccagcaatttgggagcctgatgtgggaggatcacttgagcccaggagttaagaccagcctggacaatatagtgaggaccccatctctacagagaaaaagcaaaattatctgggcatggtgatgcacacctgtattagctacccaggaggctgaggtaggagaattgcttgagcccagaaggtcaagactgcagtgagccatgactgggtcactgcactctaacctgggtgacagacggagaccctgtcccaaaaagaaaaaatagcaaaaggaagaaattaactgctgataaaacaacatgaatcagttcaacaataaaaaaaaccttactgagttaaaccagatacaaaagcatacaaactgcgagattctatgtatttgaaagtctagaacaagcaaaaccaacctatagtgaaaaagagcagtggttgcctttgtaggggaggaggaaagtggaaactgactagaaagggtcgtgaggggactttctgaactgatgatgatatgccgcatcgtaataggattacacagttacatgcatttgtcaatgctcaggaaatagcccacttaagttgtgatttcattatatttaggttttacgtcacacacacaaaaagaattataggctggccatggtggctcacacctgtaaccccagaactttgggaggccaaggtgggtggatcactttagcccaggagttcgagaccagctgggcaacatgatgaaacgccatctctacaaaaaaaaaaaaatacaaaaattagctgggcatggttgtgcatgcctgtgatcccagatactcaggaggctgagatgggaggatcacttgatccccggaggttgagggtgcagtgagccttgattgcacaattgtattccaacctgagggaaagcctgcctcaaaaaaaaaaaaaaaaagaattatacgcaaataatgaattctagttaaataaaatacatactgatagagataaagtgtactgaggttttcaacctatggtaaagtgcatcaagaaataaacacaaagagggagatgagtagatgaaagctaaggtaaatataacaaaattttttgagacagggacttaatctgttgcccaggctggagtgccgtggcaccgtctcggctcactacacaacctccgcctcctgggctcaagcaattctcatgcctcagccaccctagtagctggaattataggcatgtgtcaccacacctgtctaatttttgtatttttagtagagatggggttttgccatgctggccaggctggtctcactcctggcctcaagcgatcctcccacctcagcctcccaaagtgctgggattaaaggtgagagccactgcactcagccaatttcctattttttaaaaggctgaatagtattcaattgtgtatatagattacattctaaaaattaatttatccattgatgggcactttggttgtttccatgtcttggctattgtgaataatgctgctgggagcatgaaagaacagacatatctgtgacatactgattccagttcctttgggtatatgcccaagaagtgggatcgttggatcatgtggtaattatatttttagttttttaggaacctccatgctgttttccaaaatgactgtactaatttacaatatcaccaacagtatgcaagtcttcccttttctccacatcaccagcatttcttatcttttgtgtttttgataatagccagtctaacaggtgagaggtgatacctcattgtggttttaatttgcatttctctgatgactagagatcttgagcattttttcacgtatttgttggccattcatatgttttcttttgcaaaatgtctattcgtgtctttttcacattttaaatagggttatttgttttcttattactgagtagttttgagttccttatatattttgaatattagccccttacgtgatgtatcatttacaaatattttcttccaatccgaggggtgtattttcactttattaattctttactatgctgaagctttttagtttgatgtaatcctatttttctacttttgttttcattgcctgtgcttgtggagtcatattcagaaaactgctctccagatcaatgtcattaagtttttctcctcttttcttctagtagttttatagtttcagatgttacatttaactctttacactctgttgcccaggttgaagtgcaatagtgcaatcacggctcactgcagccccaacctcccaagctcaaacaatcctcccacctcagcctcccaagtagctgagaccacaagcatgcactgccacacccagctaatttacttttattttttgtatagatggggtctccctatgtttcccaggctggtcccaaactcctgggctcaagtgatcctcccacctcagctccccaaagtgctggcattacacagcacctggcaaagttgttcattgtatgaggtgagataaggagctattttcattcttccatttatggatatccacatatggaagaatggaagttttctcagcaccatttattgaaaagactgtcctttccccattgtgtgttcttggcaccttgtcataaatcaattgaccatagatgtatggatttatttctggaatctctgtcctattctgttggtcaatatgtctgtttttaatgctagtaccatacagtttggttactatagctttctaatagattttgaaatccagtagtgtgatgcctcctcctttgttctttttagtcaagattgctgtggttattcaggtcttaggtgcttctatataaattttaggattttttttcctctttctgtgaagaatagtattggaggccaggtgtagtgattcatgcctgtaatctcagcactttgggaagctggggcaggcagattgcttgagctcaggagtttgagaccagcctgggcaacaaagtaagaccccatgtctacaaaacatacaaaaattagccagatgtagtggcatgcacctatagtcccagctactcaggaggcagaggtgggaggatggcttgagcttgggaggcagaagttgcagtgagcactcctgcctgggcaatagagcaacaccctgtctcaaaaaaaaaaaaaataaataaaataaaaagaatgacactggaattttgatagggattgcatcactttgggtagtatggacattttttaaatattaattattccgatgcatgaacaaaggatatctttccacttatttatgtctttagtttctcttttaacatatttaatgtttccaactgattcttaaatttctttcatcaatgtttatagtttttagtatatagatctttcacttccttggttaaatttactccaaagtaatttattcttttgttgctattgtaaatgggattgttttcttattttttttcagatagatcattgttagtatatgaaagtgctactcttttgtatgttgattttgtatcctgcaactttacttcattcatttatcagttctaatattttttgggtggaatcttttggatttggtatatataaaattctatcatctacacagacaatttcactttttcctttcctatttggatgccttttcttttcttttcttttcttttcttgcctaattactctggctagcacttgtagtaccattttgagccaaagtggtgggaatgggcatctttgtcttgttcctgatcttagaggaaaatccttcaactttttatcactgagtataatattagctgtggcccggtcatatatggccttaactgtattgaggaacattctttctatacctaacttgctgagagtttttatcataaatagatcttgaattttgtcaaatgttttttctgcatctattgagatgatcacatggtttttgtctttcattctgttaatatgatgaatcacatttattgatttgaatatgtttaatcagccttacatcccagggataaatcccatttgatcatggtaaatgatccttgaatatactattgaatatgctttgctagtattttgttgaggattttttacatttatgttcatcattgatattggctggtagttttatttacttgtagtgtctttgtctggcattggtattaggttaatgatgaacttgtttagaagtattccctcctcttcaatttggtggaaaaatttgagaaggattggtattagttcttctgtaaatggtaaaattcagccatgaagtcatctgatcctgggctttttttttttttttttttttatgggagacttaattacagactgaatctacttactcattattggtctgttcagacttccaatttcttcatgattcagtcttggtaggttatatgtttccaggaatgtaccatttcttccagattgttcaatttttttggtgttcatagtacttttttatgatcttttgtatttctgtgtgtgttatcaattgtaatgtctcctcttccacttttattttcttttttgtcacccaggctggagtggagtgatgtgacacaacgcactgtaacctcagactcctaggctcaagtgatcctctgcctgcattagcctcccagttggctaggactacaggtgctcactaccacacccagctcacttttttattttttgtagagacagggtcctgctatgttttccaggctgggctcaaactcatcttcccaccttgacctcccaaactgctgtaataacaggtatgagccaccgtgcctggccccattttgtttatttgagtcttctctcttttctttttttgtttttgtttttgtttttgagacagagtttcactcttgttgcccaggctggagtacaatggcgcgatctcggctcaccgcaacctccgcctcccaggttcaagcgattctcctgcctcagcctccctagtagctgggattacaggcatgtgccaccacgcccggctaattttgtatttttagtagagacgaggtttatccacgttggtcaggctggtctcaaattcctgacctcaggtgatctgcccgcctcggcctcccaaagtgctgggattacagacatgagccaccgtgcccagccctcttttatttcttattctagccaagagtccatttcatggctgggtgtggtggctcacacctgtaatcccagcactttgggaggccaagatgtgtggatcacctgaggtcaggagtttgagaccagcctggccaacatggtgaaaccccatctctactaaaaatacaaaaattagccaggcatagtggcgggcactgtaatcccagccacttgggaggctgaggcaggagaatggcttaagcctgggaggcagaggttgcagtgagctgagatcgtgccattgcactccagcctgggtgacagcgtgagaatccatctcaaaagaaaaaaaaagagtccatttcatttagcttttcaaaaaccaattttgttggtcttttctatttattgtctagtctctaatcatttatttctgctctgatctttgttatttccttccttctgctagctttgggcttagtttgttcttcttctagttctttgaggtgttacatttgtttttttgataacttttttcattttgaaggtagacattttttgctataaactttactcttagaactactttcactgtattgcataagttttggtatgttttgttttcatttttgtctcaagactttttaaaatttcccctttaatttattatttgacttaaagaataggtagaatgttctttatatgtcagttaggtttatttggtctgaagtagagttcaagtacaatgcttccttattgattatctgtctgaatgatctgtctgttgttggaattgagatattaaaatcccctactattatagcgttcctccagtctatgtgttccttcagatctcttaatgtttgctttatatatttaggcgctatgatgttgggtgtatatgtatttacaattataatattctcttgattaacagacccctttatcaccatatatgaccctctttgtctctatttacagtttttttctaaagtctattttatcagggctgggcacggtggctcacgtctataatcccagcactttgggaggccaaggcaggccaatcatctgagtcagcaattcgagaccaacctagccaacatagtaaaaccccatctctactaaaatacaaaaattagccaggcatggtggtgcatgcctgtagtcccagctactcgggaggctgaggcaggagaattgcctgaacctgggagatggaggttgtagtgagccaagatcatgccagtacactccagcctggatgacagagcgagactccatctcaaaaaaacaaaacaaaaaaaaggtatattttatctgaaataagtgtagctacccctgctttcttttggtttccatttgcatagaatatttttcccatgtcttcactttccatctatgaatgtcctttaaggtgatatgaatctctcataggctgcatatagttgggtcttggttttttgttttttaaaatccattcagacactctatgccttttgattggataatttaatccatttatattcaacataactttactaggtaggaatttaccaccaccatcttgatcattgctttcttattgttttgtagatgctttgttcctttcttcctctattgctttcttcctttgtggtttgatggttttctgtagtggtatgctttgggtcttttctttttatctcttttgtatctattgtaagtttttgctttgtagttaccctgaaacttatataaaacatcatataaatggctactttaagctactgacaatttaactttgattatttatacaaactctacacttgtactccccctcctcctatattttatatttttgtcaaaatttacatcttttattatttgcatcttaacaaattattgtagctctagttgttcatacttttgcttcttaacttttatactacagatataattgatttacccactgcccttaccatattagagtgttttggatttcacaacatacttatttttaccaatgacttttatgcttttatatgttttaatgttactaaatagcatcctcttccttcagcatgaagaagttcctttagcatttcttgtaagccaggtctagtggtgataaactctctcagcttttatttgtctgagaacatctttatcactccttcatttttgaaagataagattgctgggtatagtatcatgggttgacaattttttttctttgaggtttttgaatatgtcataccgcttccttctagcctgcctttgctgcttcccaaactctctctttgttttaacttttaccaatttgattatgatgtgtctcagcatgagtctcttttgattcatcctatttggtttcttttgggcttcctgaatcaggatttctattttcttcacccaggcttaggaagttttctgccattattactttgaaaatgttttctgtccttttatctctcccctctccttcaggtataccagtaatgcttatgctgttacatttgatggtgtcccataagtcttttaagctatcattactcttttaagttcttttttgtttttgttcctcagattggatgctttctaatgatccgtctttaagttaaatgatcgtttcttctgcttgatctagtcagctgttgaatccctctatttaatttttcagttcagtcatagtattattcagcgctatgatttctgtttggtactttgttttcttttggtttttgttttgttttgttttgttttggagacagggtcttgctctgttgcccaggctgaagtgcagtggcacaatcatggctcactggagccttgacctcttaggttcaagcaatcttcccacctcagccacctgagtagctggaaacacaggcatgcaccaccacacctagctaattttttaataaaaatttttgtggagatacatctccctgtgttgcccaggctggtctcaaactcctgggctcaagcaatcctcccaccttagcctccaaaagtgctgggattataggcatgagccactgctcccacaccctgattggtactttttaatactctctcttttttgaaattctcagtttgttct

SEQ ID NO: 395 - DNA, 2020 bp, Homo sapiens
cgccttccctccaatcagcacgccgggccggctagccaggggccgcccgcgcgcggggtgtgtgaggacgcgctcccagtcgctgagtgcctgagccgggaagcagttgctgtggtacctgctgctgcccgagcggaagagaaaatattctctttggaatgggaaatcctctgcttgacatctctgctgtagtggacaaagatttccttgataagtattctctgaaaccaaatgaccaaatcttggctgaagacaaacacaaggaactgtttgatgaacttgtgaaaaaattcaaagtcgaatatcatgctggtggctctacccagaattcaattaaagtggctcagtggatgattcaacagccacacaaagcagcaacattttttggatgcattgggatagataaatttggggagatcctgaagagaaaagctgctgaagcccatgtggatgctcattactacgagcagaatgagcagccaacaggaacttgtgctgcatgcatcactggtgacaacaggtccctcatagctaatcttgctgctgccaattgttataaaaaggaaaaacatcttgatctggagaaaaactggatgttggtagaaaaagcaagagtttgttatatagcaggcttttttcttacagtttccccagagtcagtattaaaggtggctcaccatgcttctgaaaacaacaggattttcactttgaatctatctgcaccgtttattagccagttctacaaggaatcattgatgaaagttatgccttatgttgatatactttttggaaatgagacagaagctgccacttttgctagagagcaaggctttgagactaaagacattaaagagatagccaaaaagacacaagccctgccaaagatgaactcaaagaggcagcgaatcgtgatcttcacccaagggagagatgacactataatggctacagaaagtgaagtcactgcttttgctgtcttggatcaagaccagaaagaaattattgataccaatggagctggagatgcatttgttggaggttttctgtctcaactggtctctgacaagcctctgactgaatgtatccgtgctggccactatgcagcaagcatcataattagacggactggctgcacctttcctgagaagccagacttccactgatggaagagctgaaaacacaagcccaggagtgcagacactgccctaattgcttcctgagaattcccatattaataaagaagaaaattatctgccattttttcctactataataatgctgaatcttaatttagagggtacaagggtatggtaatgcttgtagaatctttattatctcaacaatctaaaaaatgatgtttatttccatagtttgatagtgccacttaaatgccaattaaacaagaatataacatttcaatagaaatttttatttcattttcaattactttgtaaattcgtgtgtatttagtacactgatttgtttttttacatttctgctttgaatgcagatgcaatttaatataatagattttttaatgaattaatcttaacatagtaatctttagctttttatacaaatatatttaatttaggagtatatgtgtgtctatacacacacatacataaatataccacatatacacctgatagtcaaataaggtacagaaattttatcttgtcaattatgccaaataatctctttaatgtgcactcaaacatgtaataaactttggataattaaataatgtgccaaatttaagttgtaccacaatattcaaatcatagtcttatggaactctgtaattggacacaaacaaaaacttgtcatataggaatttttttctgtcttttccctgtgtacagcaaactgaggaagaaagatcattatttaatactgggccctgaaatgacacccaatttgttaatggaattatgaagaacagcaatataatacactgaagaataacttagtatcagagaccaataaatcacttttttaaggatgacaaaatggtata

SEQ ID NO: 396 - protein, 334 aa, Homo sapiens [sequence omitted]

SEQ ID NO: 397 - DNA, 2279 bp, Homo sapiens
cggccatttttggggcgggcacccaatctctcgccctgtaaactgcggggtgacgggacgctgttactaggactcaagatggccaccgcgcccgctagtcatctcgctagcccgcgcgccagtgagctggcacgagacacgcggtggcccacggcgtctggggacgatctccagcccttcgcacggggcggagcgcccgccttccctccaatcagcacgccgggccggctagccaggggccgcccgcgcgcggggtgtgtgaggacgcgctcccagtcgctgagtgcctgagccgggaagcagttgctgtggtacctgctgctgcccgagcggacgtagagcatcggacgcgggcgccgtggcgctgggcaggagggcgaagccatgacgtcagtcagagaaaatattctctttggaatgggaaatcctctgcttgacatctctgctgtagtggacaaagatttccttgataagtattctctgaaaccaaatgaccaaatcttggctgaagacaaacacaaggaactgtttgatgaacttgtgaaaaaattcaaagtcgaatatcatgctggtggctctacccagaattcaattaaagtggctcagtggatgattcaacagccacacaaagcagcaacattttttggatgcattgggatagataaatttggggagatcctgaagagaaaagctgctgaagcccatgtggatgctcattactacgagcagaatgagcagccaacaggaacttgtgctgcatgcatcactggtgacaacaggtccctcatagctaatcttgctgctgccaattgttataaaaaggaaaaacatcttgatctggagaaaaactggatgttggtagaaaaagcaagagtttgttatatagcaggcttttttcttacagtttccccagagtcagtattaaaggtggctcaccatgcttctgaaaacaacaggattttcactttgaatctatctgcaccgtttattagccagttctacaaggaatcattgatgaaagttatgccttatgttgatatactttttggaaatgagacagaagctgccacttttgctagagagcaaggctttgagactaaagacattaaagagatagccaaaaagacacaagccctgccaaagatgaactcaaagaggcagcgaatcgtgatcttcacccaagggagagatgacactataatggctacagaaagtgaagtcactgcttttgctgtcttggatcaagaccagaaagaaattattgataccaatggagctggagatgcatttgttggaggttttctgtctcaactggtctctgacaagcctctgactgaatgtatccgtgctggccactatgcagcaagcatcataattagacggactggctgcacctttcctgagaagccagacttccactgatggaagagctgaaaacacaagcccaggagtgcagacactgccctaattgcttcctgagaattcccatattaataaagaagaaaattatctgccattttttcctactataataatgctgaatcttaatttagagggtacaagggtatggtaatgcttgtagaatctttattatctcaacaatctaaaaaatgatgtttatttccatagtttgatagtgccacttaaatgccaattaaacaagaatataacatttcaatagaaatttttatttcattttcaattactttgtaaattcgtgtgtatttagtacactgatttgtttttttacatttctgctttgaatgcagatgcaatttaatataatagattttttaatgaattaatcttaacatagtaatctttagctttttatacaaatatatttaatttaggagtatatgtgtgtctatacacacacatacataaatataccacatatacacctgatagtcaaataaggtacagaaattttatcttgtcaattatgccaaataatctctttaatgtgcactcaaacatgtaataaactttggataattaaataatgtgccaaatttaagttgtaccacaatattcaaatcatagtcttatggaactctgtaattggacacaaacaaaaacttgtcatataggaatttttttctgtcttttccctgtgtacagcaaactgaggaagaaagatcattatttaatactgggccctgaaatgacacccaatttgttaatggaattatgaagaacagcaatataatacactgaagaataacttagtatcagagaccaataaatcacttttttaaggatgacaaaatggtata

SEQ ID NO: 398 - protein, 345 aa, Homo sapiens
MTSVRENILFGMGNPLLDISAVVDKDFLDKYSLKPNDQILAEDKHKELFDELVKKFKVEYHAGGSTQNSIKVAQWMIQQPHKAATFFGCIGIDKFGEILKRKAAEAHVDAHYYEQNEQPTGTCAACITGDNRSLIANLAAANCYKKEKHLDLEKNWMLVEKARVCYIAGFFLTVSPESVLKVAHHASENNRIFTLNLSAPFISQFYKESLMKVMPYVDILFGNETEAATFAREQGFETKDIKEIAKKTQALPKMNSKRQRIVIFTQGRDDTIMATESEVTAFAVLDQDQKEIIDTNGAGDAFVGGFLSQLVSDKPLTECIRAGHYAASIIIRRTGCTFPEKPDFH

SEQ ID NO: 399 - DNA, 112013 bp, Mus musculus
  misc_feature (1)...(112013): n = A,T,C or G
ctaggattgcaggcctgcaccattcggtccagctgggttagtagacagttatgtcctaggtggtcccaaggccacatagatgattgcttcttaaatttttctacttggaaaaaaaaagagccgggcagtggtgacacacacctttgatcccagcacttgggaggcagaggcaggcagatctctgagttcaaggccagtcttggtctacagagtgagttccaggacagccagggcaacacagagaagtcctgtcttgaaaaacaaaacaaaaaaatttttttttctactttagactttctttcacctgagaaatttatatatgacactgtgtgtataaacttaggaaatatgtatataagccaaacacatactgacaataagttataaaaaattttatgacattttttgctatacatatattttcaacattagctaaagacaaaagcaaattcacacaccaataagatggatgagtttgttcatttttacataaagaattaagtcctagttggatatgcgatgtgcttttcacagttgatagatatttgattatataatcactaatattgagaccactggtttgcacagacatatagtacaaaatggcataaaaaagtttagagccaactcagaaattgttggaaattctgccttaatccccagccaaaattcatttgatgattttgttttcagtgaaattcaagtcagcaactcgtgtagcaaatttttgtttttgttgttgctttgagactggattggcctggcactcaaggatgtctgcctgcctccgcctcaaagatgtctgcctgcctccgcctcaaagaagtctggggtgagtagaatggaggctgagtcatggctgactcaagtagcaagttttaaaatcaaacatttgaacctaatataaatgaaagacatgctaatttaatgtttacatgctgagtaacagcagtaggtaaatattaaatgctattgttgtcaataatgaaagcatcatggttctataagagcagacaccttagaatgtgtcccatgtctacattctccagagtatacatcggaaggcatagcatacagtagttttgtgctggcgttaaagtgttctaggcattgtatgagcgatggcacatcaagtgcaaagtgcagatgttgtgtgttcaggaacaaggctgcagtgtgtgtgacatgtgcagtgcatgtcatgtgtgtgatgcatgtagtatatgtaacatgtgtgatgtgtgtggtgtgtgtaacgcatgtaacgtgggcaggtgccatcacaaacaaacactttcgattcatctcgtgtttcattttgaattaacatttgttcttcatgtgtttagaacctctgttaccagagttttcacaaccccaatattcagttctatgacaccgtatagagctatagctcaccaccggaggaggagtgtcctagctgtagttaaaagcagcatctcggggtctcccaggtaaaaccagggattctctgcatacacatgtgaaagagccaaggagaatctccagatgtgatccgcctcttggagccctcatactgaacacaggtccaacccaggacaccaggattacgtttgtaaccgagtacgaaccatacaagtctgattgctaacacagggaaggacaggtcccaaacctggcaatcttgggcttgatttcttggaaactgattaatgcatgagaggcctcaccaccaaacaccatcaaagagataaaagaaaaagatttgtttcctgtgtgtagtctgcttttagcttgaatgtcacttccaggaagccgtccctgcccgagaatctgattgatggcctccgactatcactgcccagctcccgtggtttaattacttaccaaagtctctcactagtctgtgagactccatggggaggcaccagctgcctctgtaatcatagaccttttggggtgggggcgggggcgggggggggctcatggaagagtgaacgtttgtatatagaacagccatggctcaacagctgtgttagggacagctacagcagcagttttcaacctgtgggttgtggtctctctggggttgattcactctttcacaggagtcacccatcagaaaacacagctatttacatcatgattcttaatagtagcaaaattatagttatgaaatagtgactgaaataattttctagtccggagtcatcacaacaagaggaactgcattaaagggtcacagtgcgaggaaggttgagaacctctgggctacagaatggtggtgacattacaggctgaacttctcagctctggttttactgacagtgtaaaggtaaaaagagaagccatggaattaaaaacaccgtgaaaaagcaagaggagagattgaaaaacaacaacaaaaacaaaacaggatttgatcagactcaggatttggactaactgactttgattgctaattaaactgatcatgataatagatattttgttttgttttgagagaatctcttaggtcaaactggtctcaaacttgccctgagactggcctgtctataacttgtaatcctcctgccccagtgtcctgagtgctcagattatagatatgggccaccatgcccagcaactaaagcaatcttttatactcaaactcccagttaatcattttctaagaaatgaaacacaggatgggcagttgttttccgctgtgtctcctctcatgcactaataatcaaacttacatcattcatgagtggctattaaagtgtggttaagcagatagccttggacatagttggaaaattcaaggttgtgaatgtcaacaagattgagaggaatcacggactctaactcacactgagcaggcatatttcaaaccatcacagtttcttagctcaaccaactgaatgccacagcttcttctcaacaatgtgaatagagacaagtttaatcatggcagggactaaagtttcttagaaaaactgtccttctgccagatgaagggcaatgaagaatgaaaaaggcatccctctacctctttgtgtttttaatggctcagcctttaaaggctcctgctgtggagcctgaccacctgagtttaatccctagttctctacagcacaaactcccacaagttgccccctgccctctgtgtgagtgccttggcatgcttgtgaccccacactgaataaatgcacagaagatattataaaaggtcttcaattcatggatgtctattgcttcttttaacttctgatgtttccctgtttacagagtctgaatatgtactcttcctgaaggtaccactccagtccgtacccacatcgtatcttttcctttttctcctctcatctgaccttgatctttgcttagaaaatgtctgtgaacactctcattcccttcctttaccaggggggaaaaaatagagaaagcggaaataggtctttttaagattcattcagtcatccgatagctggtgggttgctaaaggtgaaaatggaaacagagaagcagaagtctctgaattaaggagaattgggtttaatcgcggttagttgcctaaataactatttgtatccatgaaattctctagtttctctctgtataacattgggatatcggaaaaatgactgtctgtgttgctcagtcttttagctgaccctaacatagctcaagggctgtttctctcctgtcgagtattttcttcctctgcttgaagctgtgaactgatctgacactcagaacagtagaaaggtagcaaggcctggtgtgtctatgctgacaggagaattagcaattcaccccaaccgtgtttcagacgctgtgtctggtaggggttccatctatagtgcttgtgtccatcttgaagtctagtgctgggttgctaactgtcaatgttttaggcacagttatacagggaatttagctctatttccccccaaagtagaaagcaaagctgccactgggtttatcatgcttctcccataccccggctggtgcagagctgggggaagaagactgtgagcctcttttgggattttgaaaacagcttaggaacaacggagagaaatctcaccacaggagagctgagaaacctataaatataatagctaattattaaacacttaattttgagacaaaaaaaacgtccccccaaaaacaaaaacccctcattccgatgttgtatactagagttttctatttttgaattactgtcgtcttctgatccagatatttattgccttggtgtttgccaggaacaaggctgtttcctagttttttgatttcttgtatgtctttgcagtgttgttgggaggattatggtaacagggaggacagacacatctcttatcttattagctctgtaaccacaggtaaactctttaaccttttaagctcatctgtgagaaatggggattaacatatatgataagcaattaaagatttgccgggattatggtaagaagcaattaaagatcttaatatatgccaggcttgatagctaacagataacgtgcacaggggcaggccactcacgttttctatagatgtccatccatttcgatctgaaaccagttttaaactttaagaaatggtcatctgacacgtgctcaagagagaagggaagactaacactgcatagtagaaaaatcggggacattagcactgagtggtgtgcctttaaaccctagtcatatttgttgcttctagttgctccaaatggtcctccctgcgtctctgcctcctcctggaagctggaggataacgatgctcctcactgatgctggcagtgtaatgcttggaacagcgggccttggaagctatggttggattagagccaggacctgtcaccgcgcctggaccgccagaagatgggacccagagctaggaggaaaggccatggtgaccaggttgtattccgtgggctcactggggcctttgttgcctcccgaggttgcatgcgctcaggccggagggtacaagccagatgtggcggctgcgctccagccccggccgcaacaccgatgcaaaaaggggctggggagaaatatataggctgctctattgcgccgttgagtgacaggctggccggnnnnnnnnnnnnnnnnnnnnnnnnnnnnnnnnnnnnnnnnnnnnnnnnnnnnnnnnnnnnnnnnnnnnnnnnnnnnnnnnnnnnnnnnnnnnnnnnnnnnnnnnnnnnnnnnnnnnnnnnnnnnnnnnnnnnnnnnnnnnnnnnnnnnnnnnnnnnnnnnnnnnnnnnnnnnnnnnnnnnnnnnnnnngtcccgaggccgccgtccgatcgcgcgcgcaccgggcctcggaaccgggagcggggcgcgggccggccgccctccgcgcctcgccgcagccgcagcccctcggtgctgcgctccttcccggtggttggcctggagcctcgggcggtcccggagcaccgggaaagtgcagtgctgtgtgcgcgtgcaccgagaccaagagttgcgggcaggatcccgcgactggagggttggaaggctggagggttggagggctggggggctggggggctggaggtggcgccgccgcggggcaggtagggcgggggccgcttgcctgcggggaactaagatgttccgggaggtacggggggagcgagcccggattcctcccaggcctgggtttcctccatcccatggaagcggcgagtgggatcccctccccgacctcaggtggggtctcggacccctccaggtgtgacaggtgatgtctggaaggcttggcgttaagtggtggcagtggtacgcttcccgcgcccgcttttatttctctaagcgttgtgatctcaggagcgggttcacggcttacatttagaattcggaaatagctgtagatggtatgttatcttcttcgagcctgccatctattttgctgttgtgctttttgctgccgacaaattatttagtaaaagataaaagaatgacatggttattcacttgaatgtaaaaatctaaatttagaatcatgtaacacgcgctctgtggttcaggctcctttctcttccaaatgcttaaagaatagttttactaacaggttatggtgacataggttccattaacccctgagtgtaaatcataacacatactagacaatgaaattatgtaagctgtataaaagaaatatttatgttctctaagtggaaagggcatgagtttttcataattgcggtttataaagttgtgcaggcttacgtcatggtgttcattgatccggggtgtcatgaatcgtgcctcttgttctttcaggcacctctgttttgtctgtgggatgctgatgaaggactctaccaaatgttaaccaaagtgttcttagccgtggaacatatgggatatttcagagaacactttaaaaacttaatttaaaaaaaaaaaaacaaacccagatgcaagattgttaaatctattaacaaaacatattcctcattctgcggtttagagttgaagcctcttttggaggatggaggaatggctagttacgtagtcatttttttgttcaaagacttggtttttatcaattaatatagccaggacagtcttaaggtaagggcggtagataagtattcacatatgtggcctcggacacaaatgtaggtcacctgtgtctaacgagccagcctcaagctgcctggggtggtttaagggtacgaggtgtgttctgtttcctcctctctggagatttcattcacgtgtgcttcacgatgaagcttagtttggaaaaccctggtgtaaaatgaatagctgcattccggtggagtgtaacactcctcctccttttgagatgtcagaacttattagtagaattccctaaccgtatcttccctaaaatggggtttgctaacttcttaggcccagtatttaatactccatatgcttctggggtattatggatggctaatctatagcatttatacttttatataggcttcatttgtatgtaataaaacaacttctctctctctctctctctctctctctctctctctctctctttgttgttgtttcttgaaacaggatttctctgtgtagccttggctgtcctggaacttgctctgtagaccagactggcctcgaactcatagatatctgtctgtctttgcctcccaagtgcttgcattaatggcatgggccaccaccacttagcttaataaaaacttttttttaaaaagatttatatatttattatgtatatagcactctgcttgcatgtatccctacaggccagaagagggcatcagatctcattacagatggttgtgagccgccatgtggttgctgggaattgaactcaggccttctggaagagcagacagtgctcttaactgctgagcaatctctccagccccattaataaaaccttttaaattatcattttagaatgattctgcatatctctacttcctgatttatgtcagctagatatttattctaataatcagctctacctgcccttccccaacaaaatcctccctgaagcaaaatatgactatatatagacagaaagtgaaaagtgtgtttgtataatgtcataccaggcttaaaattccaagtcacagtttactgaggtagtgcccctgttcttagagtcagaagtcatcattgagtgttttattgagctaatagattaggtacttggtggaatttaaaatcattggattttgttttcccagtgaggacctttggttgtaggtggtcagcatgggcatagttgggataaagttagccatgggaggtgaataaattaggtcttagcaacttggagaacctctttggaataccaggtgctcaggtagtcacaggccgtgcagtggaatgtagtgcttctagaattttacatggaaatgagagctcctggccagagaaactaacaggcaggctttgttggggactcaggagggagggattagccaaaggctgcaggaagtgggaaatttgttcagagttgcacatttggactgtgaaattttctgttcattctgtagtttttataccataacaggcttgtgcctactgcagaacagaaaacattttttaaaatgtaatacatttggaaaatttatgttttctgtcgagccaagttaacactcagaaaggctctctagtctcatctgagctgcgactgtctcctgcagcaactccgtcctgctgtggtgtaagcggtcaatctgagggacaaaaggcagcagataagaattctgccaggccatggtgacacacacctttaatctgagcactttgggaggcagaggcagaggcagtggcagaggcagacagatctctgtgagttcgagggtagacggtagacagttctaggccagccagagcaacacagggaaaccatgtctcaaaaagcagacaaacagaaacagaacttaaacctagaagttactgaaactgaggtttctcattgggtttacctccttgtgtataaaataggggttgtaacgcttgccctgtaaggacttagtgaaggtttaagtcttgttactgcccagaataaaggaaaaaagccagtgaagtatagtaaccatcctcaccatcacactgtcatttgtccctgtgtggtcttccttggctagtggagattcccagtgattcacagtgctagaaatagctgaggttgtagtttgtgaattgcctgcaaatggctgctttaatcaggcgtgcccttccactgagagatgtgtctcttgggcctgataattgtttttggaggtacagtaactcaccccactagaggctcatttactgtagcatcacaggaagtggtgctaccccttggtgccactagaaatcaacgcttgcctgacaagcccctagggggtgagaccagttatgtctagcgtggaccacgcaggggctggctcatctgttggcttatttttctctttgatacagttggtatttattgaaggcctatcttgtgctgggcattctacttagcaacctcatgcctttccagttctaaagaattttagttagctgaacagcgagcgcggtcctcctcatttcttgagcatcataacccaatggggtaggctgtggccgagagagagtgggctagatcactgcctcttctgaacgtgtaaatatttccagctgtctctctaaaactcaagatgaggatattgataattgtaaggattttgtggtatgtgggataccagggtccgtcgctttcttatttcatagatgaaatttggaggcatggaagaaaagaggcacgtcagggcatttcagtaatgccataagtcagcactgggcagcagactcttcaaactattgcagttgtacattcccttatttttatttattttcttaaccattgcttgctcttatgcagcggaataataactcggggagagggggatgaaacttaaggctcagttgttagggatccctttgggaatctgtgagccccacaacttctccctttaaatgagcaaccataaatttttatgttttccatagacagaaccagccaggaaggaaggaatacagtttgaagctttttttttttttttttttttttttttttgaggaaaaagacccttataattctgctataagaaatgaatcattttaatatgggggtggtcttcataagtacagtttaggcttgacaagagtctgcctttgacactgaataataaatggagaaacctctggtttgtattatttagtgagttttcctttcgtttctttccctgacaggaagaagaaaaagaagcatcccttagcccccagcctctgaaaactgcgaagacaatctggaatagcaatacccactgttgctttgctgcctgacgccttctgcccagcatctgaagtgaacctcaatcatcaattcatcaattgctttttttttttttttttttttttggcccgggaccaaggcgttctggattctgttgatttgaggctggagagagaccggtcttgcttgtcatcgccaacttgctaaccagtgtgatggtgaaatgagatgaggctccgaaatggaactgtggccactgcgctggtatttgtcacgtccttccttaccctatcctggtataccacgtggcaaaatgggaaaggtaaggaggaggtctctgaaccactgtgggtgacagagtacaccatgccacagaggtgagccgagtggaaataggttgagcctgcatgcctgcagctcacgcctctgtctttgttctggtggctttttttgatacaaaaatgaaacagttttcttggacagactgatacagacttctgactcctgcccgtttgttttcagtatcttatgatcacactttggaaagccacattgtgtaacaaaggcttttttttacaagtcatcacaatcaatacatctttggtgtgctaaaccaaagttttgtataccagcagtgttgtagaaaatacttcgaagagggtgatcagggccttcaggaaacatacatactagttaaagtcctgacttggtggtgtgtggctaacgcctcgggctgcatgccttgacagattgctcctttggcaatcaggagaaattctgatcgtaatattagaagtttcataaattataattgtgtggagactctagaactgttgtctgttgattagaattactcgaaggggcgatggtcttttgctctttgttttgttttgttttctcttttctggcattgatttaagaagtgctgacggtagggagggtggcagtgttggggatgctgcgtagtcattgttagagtttatcacctggggtatttgacgcttgtcttgttgacattgccttcctggcccataaagatgattgatttctgctgtgcatttatgtctctatgcctgtgttagtaatacatacctctctgggcatatatactttatacatttgaaccgtagctatgtgcatatctgcttgtataccgtaagcagagggacatgagaaacacaggtaatctgtgaataagccttacattctttcccctactttctgtctttctgagttgggttctagctcaggcactggagaaatacaggtgaaaattttgctccaggcaagttatttgggtatgcttttaaagtctcagctgaaaattcttttagaaatacattgtatcattcatttagctattttgcctgtgtgccaccttgacataatttggatgacaagaagttagcttccaggagttggctcactccttccaccagctgggtcctggggattgaactcagggcaatggcttgtgggcagtcgccctaactcactgagccttccttctggcttggtttcagttcttgattacacctaatgagaggatgtaattagaatcgctagagtcaaagagatgattgttcttgacataaataaagctaatgactcaccgttaagaaaactgaccataacacgagtgcttgtttttttttttttcctatcagggaacttacctcctgggagagttctagtaatacagaaactccactctccctcagtgtgggttttgttttggaatctctctgctttggatctcgtttcttaaacatcagcaacattactagtgtttttcttaaagctccatctattacaatttatgatgatatgattatctttagcattgaggggggctgggacagtagagatgccttccccatgcagtactgtgtatagtcagatctctccaccgtggctctgacgtctcccccatgctggttttatgctttgttttgctcaggctcaggggtccgcccaggccttctgtttgcttgtgtaaagcccctgtgttgattgctaccgtttctgtgaccactctgactgttgagtttttggattctttctagagagttcaggcagtgagacagactggattttccagggcagacctgattccacatattcaatctagtatttccaggtaccttctgctttggttattttgaaagatttctaaaattcttggcactgctggactaattgaaacttaagtttttattcattcttggtaaaggaatgtatatccttatatatacctggatatatgatcccttatatatactcatatatatggacccttacatataaccatggacccttacatatacttggatgtatggtcccttacttgtaactgtatgtgtggtcccttacatgtaaccgtatgtgtggtcccttacatgtacctgaatgtgtggtcccttatatatacctggatgtgtggtccttatatatacctggatgcatggttccttatatataactgtaggtgtggtcccttacataaaggtgtcccttgcctagcgcaggatattagaaaccatgaaaataaagaagaagaatcttcatgcctttgagcagggactggcaacaaatacggtatggtcatctggggaagagagcggtaatagcagagcttgtcctgttccttatgtatcagccgcttagtcctcatgatccctagggcattagtgcctctgctctgcagttggagacatcaaatcagggtgttagagactctagctagctagctaggccatgtgttccttctgtagcagaggtaccttagagctcatgctcctagctaaagtttgctgcccagaacagtgcgggcagaggcttgtgattcttcatggagctttatagagtaggcacggtgtgaaagccaggccaggaagcgagcacattgggtgcagagccaatttctgaaagggaatagggtatgcactctctgcaattaggagctgctcattttgacaggcacatgcgggtacacagcgtgcagctccgtaggggcgctagtttggttatagtctacattcactacttgggagaatcagagctagcccatgaaattggcataggttgagaggaagctgggattcagggaagggagccagttcagcagggcatactggattcccacattaaaaaaaataataaaataaaataaaccaagagagaattccaggttcgtgttcgtggaaatggaaaggttgggaaagttgtaggcgggtgctgggagaatgggacgagaatgattccgagtgttatgcgctgctgtggatcgggtaccgtggaactttctccacggtcaaacacaatacagaaacaggaaaaccaagtaagtatcgcagatccctgcacctggccggtctgtgtccgcacgcctgactcagggccacatacatgctcatcacgtccctaagacacagcgcctgtgcaatgcttgcttcagcaaacatgtgtttggggaactttaaaacagccttattgagttataatttacatactaaacaattcaaccattgaacatactgacgaataataattcactggggggggggggtaggatgcctacagtaaaaatggttaccctgctgaggtggggatttagccgagtgatggaggacttgctgaatagtcatgaggtcactggtgtgagtcccgtacctattagttatcacagcatctctcttcccagccctaggctgtcactgaccaacttcctgcctacggatttccccgatcagaacttcttcataagtgggctgtgtaatgtgtgggtctttggtgactattttttctttcggttagttagtatgcctccaggtctaactgtgatgtggcatagatcagtcttttttcttttttcctaatgaatggtgtgtgcgtgtgtgtgtgtgtgtgtctatgcatgtgctcatgtgttttgactgtatgtgtacttaatgtgtacaggcatgtgtgtaggacacaggtttaatgattgtattctccgctatcgatcttttatttatttatttatttatatttatgtgtccctatgtgtgtatgtgtacatgtgtgtaaaggccggaagaggatgttggctccttggaaggaagctggaggtacaggtgactgagctgccccacatgggtgctaggactgtgagcttctcggaagtgcggtcccgctctaatgcttgtgactactgagctggccctctccaccttatttttagagtccgtgcccttcactgagcctggagctcactgttttggcttgtctggctgtcccagggtcccctccaatgctggggttatggacaccattgcaatgcctggtttttatgtagggatccagactcgggtcctccagctgacagaacaagctctttacccacccagccatcttttcagccactaatgatgtctttgtacaaatgtaacaaatgtggattcatcctttgatgggtgtttgggttgtctgtacctttctgctgttagtgataatgaacatgaacttgtcttaggttttctttgagggatctgttgaaaagcggaatttctaggtcctatggtaactccacttagtcatttgaggaacatcagactgtcaaagtgggtgaaccgtgatacgttgtacttcatggttttatttttatctgggtgtgtctggagctgtggtctgtctctttacccagtctgatgaccatctttaaattgttttgtgggtgcatttgtatctaatgggtttttttttttgatgcagttagatttattgtatttctttttgttttccatctttcgtgtcctttccatcctcatttctttcattaatcaagttctagtgtagtgtagcaattaaaattatgatttttttcactgtttccaggttttgtgtgtgtatgtgtgtattagtgtatccaaactcaactttagactttattatcttaattttaatccaatatagtaatgttactgattggctgatcagatgggtcgggggtaaaggctttgccatataagcctggtgtctagagtccaatccatggaacccatgtaaaggcccatgtagagccccagctctgccaaattggtctctgacctccacacatgcgctcgtctgatatcatgaactcatatgcacacacttaacattgaataagaaataccaatccttgatgcctctgtttgcttttatcctttctgcctggtattattgttacatatatttacatctattaatgttgcaaacccaacaatgcactgtaattatgatctcacatctgccattatgtattgttgcaattatgttgttaccatctgtctttccttcctcggcctgcggaagtttgatcaccatttacccccccccccccccgctgttactggtagttattcatgcatttcccaacattacagacccaacaatacattatgcctgttattttatattcttaagttaaaattggttaataaaaagaaaaagcagatgcatttatcattgtctgttatagttgcataattactaacgctctttgtgggttgtttggattatcttttgaggtaattttttttttttgtcagactggaggatgccctttctgatttcctgttagatgggtcagctagtaatggattctgcttttgtttattctagacaattttatttgacttttcatttttaaacaggatttaaaaaaatgtgtgtgtgtgtgtgtgtgtgtgtgtgtgtgtgtgtgtgtctgtgtgggtacttgtcctcaagtgtggatgcccactgaggctagaagagagcatcagatcccttggaaccagaatgacaagtagttttgagcagcctgactggtgctgggaagtgaactcaagacctttaaaagagcagtctacacactttaattctttattttatgtgtatgagtgtttgcttgaatttatgtatgtgcaccgtgtgcatgcctggtgcctgaggccaggggggagcaccaaggcccctgagattgagttgtagacagttgtgagctgttgtatggttgctgggatccaaatgcaggcccttagcaagagcgcaaatgctcttcatcacggagctgtctctccagcccgcgacttcatttggaaaggcgtttttcctggaccggggagtcttggttggcagtgtttttgttgtggttttgaatgcctcttgactaacgtgtgtgtgtgtgtgtgtgtgtgtgtgtgtgtgagtgtgtgtgtgtgtgtgtgtgtgtgtgtgtgtgagtgtgtgtgtgtgtgtgtgtgtgtgtgtgtaatccctgctgaggcagctggctattgatactgtttggatgccctcatacatgnnnnnnnnnnnnnnnnnnnnnnnnnnnnnnnnnnnnnnnnnnnnnnnnnnnnnnnnnnnnnnnnnnnnnnnnnnnnnnnnnnnnnnnnnnnnnnnnnnnnnnnnnnnnnnnnnnnnnnnnnnnnnnnnnnnnnnnnnnnnnnnnnnnnnnnnnnnnnnnnnnnnnnnnnnnnnnnnnnnnnnnnnnnnnnnnnnnnnnnnnnnnnnnnnnnnnnnnnnnnnnnnnnnnnnnnnnnnnnnnnnnnnnnnnnnnnnnnnnnnnnnnnnnnnnnnnnnnnnnnnnnnnnnnnnnnnnnnnnnncattgttgttcagcgtatgtcacctctgttgatcttgcttaagtttgctaattctttattctgctcatgtctgctgttgtattgggcgtctgtattggaactgtatatgcagtgaatgtacatatatgtacatacccaaaactctctagtgattttttcccccttattttacatatgagatgtgctagctttctgtgactgtctgagaaagtgagctggtggtttcagaggtctgggttcagggtccttttgtcctgttgtctttgggcctctggtggtggagctatatgtcaatcaaggtggcgaatgtaaggtggacgtggcctggtcacctcatcacaggcaggaagcaaagacaggaacttggtgttgcatgcccatagtcccagccatagagaggctgaaacaggagctaccctggagtgcaaggccagaccggactgcatagcaagactctcaaaaataaaagcaagcaaacaaacaaacaaaactccccaattcccccctctacacaaagagacagggctggggtcctgggtctgactttgagtttcctttctttagcctctacctctaaaagagcccaccattagtgccacaggctggttctactggggaagaccttttaggggcatttaggatccaaagtgaagcctagggagattgattataagaatcagctcctggggttatcgtggacaggaagtcccaggagacccctgcaagacagtgcatcaggcgactggtggtattagtttagtcaaagcccaaatacccaagagtaaggtgagctgtccaggctgggaggtccaagaaccagggagtccaaaggcagaatgttcttgcttagaactctttcttctgtgtcccccgacccccttcacttctccaggcaaaagggtctgtatacaggacaattggtgctgtgttttattaaaagataagaaatggcaggatatgtttggtgggggtgccgtaaggtgtgnnnnnnnnnnnnnnnnnnnncagtaccagccacatggtatagtatagaatagggtttattcaggacatggggaggggagttgagagaaagggggagagggagagggagagggagagaggagagactggccatgagcacatgggggggggggcgaggatagggagattgtgggagcaggagcaagagcaagaggagagggcaagatcaagagagcgaagagtgggcaagcagcctcttttatagtgagtcaggcacacctggctgttgccaggtaactgtggggtggagcctagactaaatgccaacagttggttctatatatgaaggactttctttggtcagggtgctccccgctcctcagtctatcagttcacatgctaatctctcccagaaacaggtggacactcctcaagtaatgttttctcagctctctgggcatcccttaacccagcaaaggtgacacataaaaggtccattgggaggctcgcaagtgagtgtattcttttacttgtcttgttttttttagctccttttgttttgtccttaaaattctctcctactattgggatttgatacttactacaatgttgccaagtttttttttttttttttgtttttgttaatgtaattttgaggtaagttcttactatgtagctcggactggctgatctagagctcactgtgtagaccatactaaccttgacctcaaaatctggctgcctctgcctcctgagtgttgggattaaaagtgtgcatagtgtcatcacactgtgcctttccttcctgcctattcattctttagcatgtctggggtttgggcaacagggatagtctgtgcggagtggacatctggagtcctgcaggccggaagaagttgtgggaatttttttggagttgcacttacagatagttgtgagtcaccgtgtgggtgctgggaatcaaacctaggtcctctggaagagcagtccgtgcctctagctgctgagctagctgtctctccagccccgtttctttctttaagttggagcaaaccctgcagaccatcatctggctccactcaaaggcagtctccgtttcttgcccttttcagacgcatgagctgtttctttgcacacctccatgtttttctttatttttcgaagactgcaatacattttagatgggcggatgttagcagttctgggtgctgggtctcccaccttccaggagctgctgacctggttggctaggctcttgttaaggtcttgctggcttatccaggaggctcctctccctggttatatagttgctccaggacactcttccattcttctggctgattgctttattggttgttttttgcgttattgctccggtattgctatcagctggagaagacaatcagccttcgactacagcttttcaaatgtgttttcttggaagatcagtgttggctatttgaccttggacgagctgctatctgcctgctgcttctgcaagtcgtaggtcttggctgtgtcgtcatcaggcccaggagacaacatgcaaccttgtatccaggatgttaggggacactctgtgaacatcagagcattttattgaaagctgtctcttctatttgcaaacaaaaacagttttttttgtttgtttgtttaagatttaatttatgtatatgtttgcatgtatttgtgtatacatatgccatgtgagaactctgtctgtggaggccagaagagaatgtcagatcctctggagctggagttacaggtgtgtgtgtgtgtgtgtgtgtgtgtgtgacttgctcagtattgttgctgggaaccaaacttgctgctgcttctttcttcttctttcttctttcttctttcttctttcttcttcttctttttcttttgtttttttgagacagggtttctctgtatagccctggccgtcctggagctcactctgtagaccaggctggccttgaactcagaaatccacttgcctctgcctcccaagtgctggggttaaaggcatgggccaccactgcctggctcaaacttgcatctttttaaagcatggtaaatgtttttaacattagtcatttatttcttcagccccttaattaaagttttttttctttagtgtgtctgcctatatgtgtatatttacatatgtgctggtgtgtgtgtgtgtgtgtgtgtgtgtgagagagagagagagagagagagagagagtgagtgagttagttcaggccagtggaccatgtcaggttttgttccttggaaatgagttatttttttttttttttttaaataaaaagacagtctcttactagcctgcagcttgcctaataggctagagacctggggattctcctgtctctgcctccccagtgtggtttctgaggattcagctctggtccttgtgttcccaagactagtactttactgactgagctatctcctctaccctaggtttttcttacagagcacagaaagctgagcagagtaggagagactaaaagtgagcccaaggtttgtagtaccccatcgttgtgagtccatttaggtccgttgcacagcttttgagtgctgggcattgtcaggctcaatctgggactaatggttcagccggtcacacaaaaatcccactctgctgtacaggaggagggggaggggtgcaaatgcagtatagagataaacagtaagcaactgctgcttgcttgaaacatttctagtgcaaaatgattttatatatgcaatcaatttataaaatctagtctacagagttccttcatacttccccacagtgttaccaaccattgtaacaacttacagggcacattttttaacattttctgtattagtgtgtgtgtcctcgtgcacagatggaggtgggagacaacttgctggagttggctctccttccagcacgtgggttgtgggaactgaactcagggcaataggcttggcggcagaggactttacccattaagcgatcaagttggccccagactacagttttctaaaccaaaaaaattagctccactactggatacttcagcatagacttgccagctattttaaagacttgctttgcccttgtctgaacacttttcctggttaggcagaggaaacaggttttggtcagactcccataggaatagctaggtatgttgtactagcacaaggcaaatgttgtgattttcccggccttaggtgacaagactttgggcattctacctggaaatcgctggatttttcttgtggcccttctcagaaggaaccaggtcttatgtttcatttcttaatgtagcttgtatttagcctcctgcctgccattcttaagcgttcagaatgccgtctgtctgctctgacactgagtgataagaagatgaacaggaggaaagcacagaacctgacccctgaaggaaagctgaggtaggaatgaaggatgagtcacaggaggccacgggaggccacgggaggccacgggaggctcactcacctatgcctggggccgtggctggatgtctgtgataggttgtaggaacaactcctttccatgaggtgtctgcaaagacttcctactagaggtggtgtccaagttgttcctaatggagatagaaataaaaggggaaggcttcactgccacgtaggtgttggattgcacctatgtgtgccctcttgacagagggctaactggtaacctgtgtgacccagcagcagacaaaagagtagatgagagcaggaagtgacctgggtagacaggaggtcataggggctagaaagttctgttagcctggagcagggtaatgtcgcaggaggtctggtgatcctggaggagtttgtgaccacaagtgtcatcatttacttcctgtaaaatgtgtgtgcgtgtgtgtctgtctgtctgtctctcacacacagaggggaccgattataatggggccctttcctgtgaatatgcatgtgtcttttttcctttatatgtaaagatatgactcaattgttttaaacttaaagcagtacagtcagacaaaagaggcacaaatcccgcaaaccgttatgtttaaaattactcaaagctatcagtgtggcagacttcattcttttctaaaacatgcttatttttttaaataattatttataatataaatgaatgtataatatatttatttgtgtgtgtgcttgcgtgggcatgagcacacgagtgtatgaggccaggagagggtgtggcacgaggtttaaaggtgttgcaggatatttgatcacactatgaaccctgagattttgtttctaggtgtggtgggctcaaccgttagcacacccctttattccctgtggctggagtacagacacaccgttagcacacccctttattccctgtggctggagtacagacacacccttagcacacccctttattccctgtgcctggagtacagacacacccttagcacacccctttattccctgtggctggagtacagacacactcttagcacacccctttattccctgtggctggagtacagacacacccttagcacacccctttattccctgtggctggagtacagacacaccgttagcacacccctttattccctgtgcctggagtacagacacaccgttagcacacccctttattccctgtgcctggagtacagacacacccttagcacacccctttattccctgtgcctggagtacagacacacccttagcacacccctttattccctgtggctggagtacagacacactcttagcacacccctttattccctgtggctggagtacagacacacccttagcacacccctttattccctgtggctggagtacagacacacccttagcacacacctttattccctgtggctggagtacagacacacccttagcacacacctttgtctcaaaatgaggttaaagaaggatccaggtatgaaagtgaggtctaattgagtgccagacaaaaagtaatgtgtcagagatagatttgacaggctaggataggctgaactctaaggagaagagagagtgaagggaaggtacctgagggggcagtacacacacacacacacacacacacacacacacacagacagacagacagacacacacacacagacacacacagagacacacagacacagacacacacacacagacagacacagacagacagacagacacacagacagacagacagacagacatacacacagacacacagacagacagacacacacacacagacacacacacacacacacacacacacacacacacacacagagttgggggtggggggagagacagacagagacagagacagaagccagattaaatcagtcagcttggagaagagtttgagccagaacaagagtccagagtttgaccagagtccagaaagaacaagaaagtgtgagcttattcagcagtaagtctcagaggctgaaaacattctaggtctagataaaattgtacggaggctagaagcttccaggactgggcctaggttagcagacggaggcagttagcctcagagacaattatttctaggaggaaaaaaaaaagttgctttttatataggtggtagtgagctgctgttgggatctggaaaccaacgttgaatcctttgcaagtggaatatatgagcttttaactaccggaccctctctcaggcccttctcaggctgtttgttctggacttacccactgtaagcccacactgccctagggtttgtgttgattctcctgtcatagtgtcctgggttctggagttacaggttcaagctaccacacacagctcttctgttttttaacttccctaaggtttgagtgtgattattaatttttatatcttttgggggctaataggcaggaaacaaagagtgaatgtctctgagacagaccaccatgcccagcagaattgggggtcactaaggggcatgtttggaggcagaggcctatttattaacccctctcaagttaagtctcgtctgagctatctatagggttgggtcatactatagtttggctcttgagtgtccctaaagacccaagtgttagaggcttgacaacatcgaggggtagtggacactttaagtggtggagtctagtgagaggtaactcattaagggcatgctctgaaggggactgtaagaccctggcctgtttccttttctcatccttgggtgagtgagatgtttccctaacatgttactttgtgtgccccaggccaaagcaacatgccaagcagtcatggactgaaaccttggaaactgggccaaagcaagcttttcctctttatacagtaattatctcaggtacttagtaacgtaaagctgatgctaggggatttttggtttttttttccccctctcttctctgagttaaacttattaggtgccctctggatcccactaggcagagaagtttctggcctgtccatgttttgttgttgttttggttactttaaaaaaaattttttttttttaaatgaatgaggctttttcccacctgttgtttttatccccattggaaaccgacttctctggctcctgccttgtcctaatagatgctgcagacacagtgctcctttttgggacctttcttgttagactaagctgcctagaattttcttggggtgagaggatgttgcttatcattgtgggttagatattggtagcttttctttgtcttctttaagacagggtcttcctgtagtctaggccgctcctcgacttgttgtgaaactaagacatgacctttgaacgtatgaactgtctgctttccaggcaggaggctaggttcacaggtgtgtagcgccacaccttatttatatggtgttgggaatcaagccagggcctctgggtaagcgctctaccaactgagccatagccacagcccccaagggcatgcatgcatatatatatatatatatatatatatatatatatatatatatgtatgtatgtatgtatgtatgtatgtatatactttttttttttagtttgttgtgtgacctctgcaccaaccatctttgtttcttgttttcctacttcattcctgtggcttacttcagaccttacacaaaatttcctgttccctcccactttggatatccacaaattgatacagctatacatctacatctacaagcttattttttatatgctcattagaggaaagaagaacccaaatatatcaataagccctttattcaaattaacaaagcagtttggccactgagggtcctcttgagctattttctgtgtaaatatcttcccaggtgtccccgaaagtatcccagcctactcaacctctttccaagctattttcctaccggaaggtgtgaactaaggtatacttgaagagctagctcttctgtaggaactttctgacaggtcagactctgggacttagcaatggcaggcttcagttcagccagccacgttctgctatgctctccctacccttcagatgagctacccaccccaaagctttgcatgagggagtcccaggtccatgaagaaagagcttattaggtctggaatgtgaagagccaagtggaaatgccttgtttcttcacgtgtagcaagctgcacatgaacctgaactcactttgtagtagcaagctttggctcagagaagtttttcttccctccttggttgtcattacaaagtaacactctcccacccctaagaaactttgtgtatacgaagagttgagtgtttcaggacttgccccagtccccagctagatgtctaggcttcccttaccctacctgacttctttcagctgaaggaaggataagctggagaacttgaccttcacatttatggtataagagcccgtatttatttgttcattcatcatcatttgaattttatctcagcgtttcctccctttcacccaatagctagatctcataccctgtttttttttcttctctttctctctgtgtgtgtctgtctgtgatgtctgtctgtctgtttgtctgtctgtgtttgtgtgtgtgtgtatgtttgtctgtgtctgtccgtgtctgtgtatgtgtctgtgtgtgtatgtctctgtgtgtctgtatgcgtgtatgtatatgcctgtatctgtgtgtgtgtctgtgtatctgtgtctgtgtgtatatatgtgtgtgtatatatgtgtgcctctatctctgtgtgtgtctgtgtatctgtgtgtgtgtatatatgtgtgtgtatatatgtgtgtctgtatctgtctgtgtatgtgtgtctatgtgtctgtgtctgtatgcgtgtgtgtgtgtgtgttcctgtgagtagacgcacacacatatgtgtatccttgtcaaggtcactgtcagctctcttcctcatttgctcttcactttattttgtatttatttttaatcatatgtatccatatgtgcctgtgtgtgactatgtacacatgagtgcagtgcccacagaggctggaggagggcattgggttccctagaggtgggattgcaggcagttgtaagccacctgacttggttccaggatctgaacttgggtcctctgatagcttttgggtcctctgtgtgcttcctagctgctgagttgtctctctatccttctttccatctcattatttgagacagatctctctgtagtaaacttccagcaacacttgggctagcctgtcaaatttggaaaaacctcactaatcttgtaagtttactcttatcacaagcaggataaggagcctgtagtcagcggtgcctttggtatttaattcccaggggagatggcatgagcttggctgatctgttgcagagttgctaaggtaaacctaggcagtgcagcgcattcataggctggtggggaatatggctgtgtggtgggaacttgtaactttgacccatttgtcagagaggctcatgctgagtgtcccaatgtcatgaaatgtgtggtatcttgaacctatcacaagtagctcacttttcatactaagtcatagggaaggtcggagaacagacctgggttttctgtctgtatgtggtagtaacacttaagacacaatattagacccactattatatactatatattactatatactgtacacacacatataatatacagtgtacaatatattatatagtatacagtatatagtagtattagtatataatagtgtatggaatatagaagtatattgggtatagtagtataagctagtatatagtatatagtagtatataacatatagtatactatagtatattcttgcgtgctgccctgactcgccagcaagaaagacgctgcaacaggattcttctgcaacacgtttattgggagagcttgattgcagaggcgaagagaccccaagcccagaactggtgctgcttatataggcctaggagaggcgtatctcacacccagattggttgtgcttgagttatgcttatcacctcatttgcatgcctacatctgattggttaacttctctctcatctgattggttaattttggttaattctcaaaacctcatcttggcaaaagaactttactgcctatgtatgtgtggtggccagcggaagccagtgccaccctgcaatggcacatgtggcttcccacagtatatagtatttgttagtggttattagtttagtggttttagttactggttattaatgtttattagtatatatagtacactatagtatatagtattgtttgttggtgggttttcattaagttcatgccattcacataatgatctgactataggtaactttaagtagttattatttcctgaaccgtgagtcattatagataacttttagtggctgttatttcttctacaatgagtcatcgtatataacttattatccagggtacttgagagcaaagagactgttattaaccactgccctggggtgtcagttaagttggagctattctatgatgattagtgttgttagtttgacagacaccagaatcccccaggagatagacctctaggtattcctgtgtgggattattttgatggtgtcaactgctgtaggaagaattgtccactgtgggcggcaccattccttggctggatgctggatggagtatgtaagtggagaaagagagctgagctgcagcttgcatgcgtcgatctttgcttcctaattgtggatgtgatgatctgttccaagctcctgctgcttgggcttccccttgagctgtgagccagaataaactctcactcgagctgcttttgttagaatgcttttcttttctgaatatcatagcaacaggaaaagagctaaaactcagactaaaaattggtctgagacacggaggagccgttgctgcgataaatcgttgctgtgattttcaggcctttggaaatggtttgaggaaataatgttggaagaatttaaaacttggggcaaaaaaaaagcctgtgagtgctgttagcagaatttatggtgggattatgggtccattattgtgggatcttggaagacaagaattctgggagaagtgaagtcagctggggtgtggttcatgaggtttcagaggagaacaaggactcttatcaggaagtgggatgggcctgcttgtgtgttattttggctctagaattttggctacattcacacatgttctgtgtggttgagtgtgaagatagtgaattaatttgtttagacaaggaagtgccaagacaagctagtatccaggctggttccgagaaagaagatcagagatcagcatcactgaagagaaacctcaactgcactgggtcagaaggttcaaaagtcctgccaacactgggtccagcttgtgaaaacataaatttgtttgaacagaaacatcttaactgagtgtgtggccagggctggggagggcttcctggctccctgaaagtacatctctgggagagtcattcctatggtaagcgcatggaagctggtacagctgtgttcagcgagggcagacatcatacagtctgctcaagggaaatgatctttgctcctttttccctgatgggacccaggggtcaaggtagcctgggtttccttatctgtatgtggggttaagagtcaagtatccatgggcatgccagagacctgcttaaggttacctaccttaaggaaagtgtcttttgatgtgaattgtgctgttgctgctgcggtctccaggggtactctgctaaactagtgcattaattgaataatgactctaattgagactaccatggtaaaggctcaggtcttgggagaaatttacttagaggacattagtggttttattggcacagtgttcttgttgacattccttttctctcttctacttggttaattgctcactcatctagtgtttattcagagcatgctaggtgctgggacgctaggtcctggtgtcggtgtgcaaagtgagacaggggatatcctcactgccatagagccactttcggagatggcgaggggcaggtaacagtggagcagctaagactgggatcttctatcagatagaagtgggcactaagagtaaatggagccggtgtggtgtggtgggggctgaggcaggagaaaagggatatttggcagggagagtcagaaaacccctgagaaagcagggtggtcttggaaggccgataaagcagggcaaggaggggtggcattggcagaatggcagacaggactgagctcaccctgcagtgagagggcatcagcaccaaggaaagccaggaaactggatgcagagaaggggtgctcagaggaaggtgctgttgcaaggggtgctgctgatggtggcaggtgacaggtgaaggcagatgagttgtgctcatagtccagaggctccggatctcaaccctcagggcccagctcagcttctaagttctcgggatccgggaatatctaatatcactgcatgctgatggccaccttcgctcctgctgtaaccatgtctacggcattcatcccctggtcctgtccccctagctggcatgttgggacctctctgctctttctccctgtgctcttaggggccctgacctgatgctcattacttccctattgttttcttctggcaccgctggtaagcgcagttctcctagacaggagatcaagagccttcaagggaaagcttactgcttgttgagtggtaactcccccctcctgccttctgtgtgtgtgtgtgtgtgtacacgcatgtgcacacatgtgctcctttgtgcacctggaggtcagcagacaaccttaaggactcaccttcagactcatttcaggcaggatcttttgttttgttgttgtttactgtttgataagccgggctagcaagcctgtgagcttctggggatttgcctgtttcaatcttacaccgcatcccagtgtgctgcctttatttttgtatctgagctcagctcctcatccttgtatggcatgtgctttgtccgctgagccatctccctagccccatgttgtatgctttttaaattaagccctctgtgtgtgtataattgtaaactgtgcatagtgtgcacataggcaggtgagttcatccaggtgccagcagaagccagaggccagggacctctgatcctatggagctggggatgagaatagctgtgagctgcctgacctgggtgctgtgaacttgcatcctctggaagacttgctgtgaactcaggatccttgtgtatcagtctcccgagggcactggggatacaggcatgcacacgccctagcttagatgtcctctgactacttggaagactgtgtgcagtgtcttttggtgattattaaggtgagtcctatattcattgtatatgacccatctgctcttagcatcttttgttcttgttgcgccgaggtttgaactatgaaccttgcacgtgctgaacagttgtgctctgtcaccgattctcagctacatcgctagctctagaaacttctaaagcttctccttacttatgttctttgttctttgtcttttctgtactagctagaaacagcataatgggtagaagtgacagaatagacagacttgctttgttcctaagaggtccggtgtgattaatttcagtgcagatcttttaaaagttataggcatttttttttttatcatttgaggaaccgcctctcatagatgtaggaagttcccagtttattgatagtgtattaaaaaaaaaacaatgaatgcttggttgtgtcatgtggtttaattgacctctgacatccaatcaaacatgtattcattgttatctcatcctagattttatgtgtatgatgataactatgaaactcacttttggttttactggtatttctgtatggattaagttgggaagagctaataccctgaaatatctgaatatttgtgtctttgtttcagaataatcatgaagtttttccatatatacattgttaggtttgtatctgtgtgtgtgtgtgtgtgtgtgtgtgtgtgtgtgcatgcacatgtgtgcgtgtgctctctaagataataccattttttaaaaattctggttgttcattgctgcaatacaggaaaccaattgccccagccatacccctcccacacatgtctgtatagctcatttatatagttacctctacccagcagctttgttcaaattatattttagtcccagaagatcttgtggctgtttcttccttcgacatctgtgtagcctttctttgtcttgtcttgttgccctcgtgaggcctctagtgcagcattaaaccattccgtttttagtgtgagtgtaggctcaaccgtagggcttttttgtaagtgtgggttttctctctctctctctctctctctctctctctctctctctctctctctctccttccttccttccttccttccttccttccttccttccttccggctttttagagacagggtttctctgtgtagccctggctgtcctggaactcactctgtaggccaggctggcctggaactcagaaatccatctgtctctgcctcccaagtactgggattaagggtgtgcgccaccactacctggctttgtgtgtgtgtgttttctttttcttaagttaaggaaatagccctgttgtagaactctattgctttgtagaaacgtattcatgtatttcttccctccgtcccactttccctgcccatcccccccacccttcccatcatttctcctccgggcacagttggtcctaactcattaggaaactctgttcagtttctttgctctgtttttccactggctcctcgggttggatcgtctattctctgatccgcatccgtggcttttctgtccatctgtctgaagtctgtggttgaccctctctggtgagtttccactttaggtactgtggcaactcgggtctccattttgtcccacctttctttattgtccctctcctttgagtccgcttcgtccactgctcccattctttacatgtaattttatttaggtttttgtttgtttgtttgtttgtttccaagatagggtttctctgtcaccctggctgtcctggaactcactctggagaccaggttggcctcgaactcagagattcacctgcctctgtgctgggattaaaggtatgcaccactaccacctggcatagttttattttgttttaaagcatattgacagtagaagtcttgaagtctgtctgttaaactcaaaattttgtagcccccgcaagaccatttctattggttgcttcttatacctcaaccagcttaggtcacaattaaattatttttcatgtcttcttttggggtgtgtgcatgtgctgtgctgtgctgtgctgtgtctgtggaagtcagagaacacttttcttttcactttcgagtctcaggaatcgaactcagatagtcaggcttggctgcaagtgctttgccagctgagctttcctgcgggcccaggtcatactatttttttttcctctattagtctaatgaatgttgtatacattgtatacaatgtatagagtactccatacattgatgcaaacaagagtcttacttaatacccttgaaggtgctagtgatcttgttagctcagttgtttagtacttggattgggactggactaaatctcaaagtctgtgttgcccgctgtatctgagagcctttgtagttgggttttagtttttgcctttcttgttaaacttatgccgtcttggaggggttattgttggtattctgtctaaactccatccccacagttccctggcagcagccaggtatgctctgccccacagttacctggcaacagccaggtaggcttggcccactataagaggggctgcttggcccttcctctttctcttactctcttatctctcttactccttgcctcccctttccccatccccacccccgtccccatgnnnnnnnnnnnnnnnnnnnnnnnnnnnnnnnnnnnnnnnnnnnnnnnnnnnnnnnnnnnnnnnnnnnnnnnnnnnnnnnntcacatcagttatactcacactggtgttcacatagtgtggggttcagctcaatccagtactgtaagacttctcagttgtggggccaagtggacacctgccttctgggctgcacacacacacacacacacacacacacacacacacacacacacacacgcaccctgcccccgtctgtcccagcatggattccctctggctgttgtgctaactcttctctgtgtgtgtgcaggttctattggccaggtgtgtgtgtgcatagcttagactggctccggttgctgctgtgcatgctcatagcctctggtcaacttggcatttgtaaagagcatttgaaaccttgcagagctgtcttctggggactcctgttgagtgtttggctggtctgccagcccattgcccactccaaatgcagcaagagcctggggctagtctttgttctgcctgtcaattgctaagtgcactggcaacactgggcatcagatgaaccctttgggggatcagggaagttagtttccaaggcctgcctccccaccccttgctgaccttctgacatggcagaactggggagggataagggtagcttcagcaagaaggtgcgggaggctttgtgctgttctttagactccaaatccaggcttctttttttttttttaaatgagtgaacacttgccagtctgaaccgtctctggtttacttccagtgtaactgaaatggccgtttttgactcttaaccagccttgtagttgctttcatggagagaggatttgtgagtctccacttgcctttttgccagaagccaggcacccctgtctcatcaggtgctgtgaagagcagcttttgtaaggggctctgaaaacccagcccatgagatcactgctgtggccacgctgcctgtgtatgtgaaaagggtagttaggcattataagtgagaacctggtttcaaaacaagtcctaagaggggccagagtgtggacctgggctctgccaagttggccagcagcctgtcttgtttatgtattaacgttgacagttgggccccttggcctgggaatgctattattttcccttcagcttagctggctggcagccatttcctaaaacagtctcctaatcgaatttttccaggttggaaagctgttcaggcatgtgctgtgctccaggttgtctggaatctatgctgcgtgtattcttaactctgaaaggaaattattcatgggtgacatattagaggagactaaattgagaacattgggttattacagaacattagctaactggctttttggtgctacttcagaaagactgccaagtagatcttggagataggagcagttgtccagctgtagacccagtggacggtgactgtctggataaaggcatctcatctccgacagcacagagacaggaggaggactggctgcttagtgggatgcaaatgcctgggggttttaaaggccagcgagaggaatctgcggcagcgcagcatttgcaacctttggctttcatttttctgtactagtgggtctcaaaatgtaatctagaagaaaacaagacctctagcctgttcgggaggctcacgagtatgagacgattccatagtagtaagcgaggggcctgctccagtgttgtaaaggagcaggcgtagttgtgagagtcgagttgttttctgctaagccagacatgcatgagattggataaagcatgttactctttttcttgtttgctttgttctgtgttattgagaaagggcatcactgcgtagctcagactccactcagactcataacccttctgtgttagccttccaggtgtggggcaggcgtcaccatgcccagctttgctggtgttttcaaagtgtcctcctgacttgtatagcatgtatttttgatagatcctaacattaattgctaatatgaatattggtataattcatataaaagctctttaaggctcactgattattttgagaacaaaagtctgagcactataggatggggtggtggggtagccttagctacataaccatgagaccttgggttctgagcccccccccccccagtacctatgcaaaaagctgcctttttccttttggtaatcctggtggtagtggagacaggaggctcacggtgggggtggggggagttgaccagctagtctagtcacaatgctgagctttgcctataagatgaagggcaatagaggaaggcacccagcatattgatctccagcctccacacaaactcgcttagcacacaacaaaaacatgtgagaactatctacacaaagacccttgtattaataataataataataataataataataataataataaatggtgtgtgtgtatggaggtcaggacaacttagaggagttggttctttccttccatcatgtaggtcttaggaattgaactcaggtcctcaggcttggtagcaagccaccttgcctgccctgtatcatctttaaaatgaccatcatactaggcacataacttacttttattgtttactgtaggataattgtctcctgtgtcataagtttacttggtatgcagtattctattaataccatcatagtttagctatgtaatatttgatacattctccataaatgattgaccagtttcttttgttagcactggggattgaacctagggcctcatgcatgctaagctagcactgaacccctgagctatgtgtcttgaccttgatcactttctcacagtttaaaaagaatcgaagagaatctaagctgatctgcctttgttgttgacgtttggggctaagtggagaagtactagcagagttcctagtgtacagaaaagagctggcatagttgacccctgggacttgtcatcagaaaggccacctgcatggctagccctacgctggcatctgcaaactggtgtgaaactcttaagaggctgcttgtacctgagttaattctatgagcctcccaccccacaacagccttgggtattaaatctctgatgggcttgcaaccctttgtttatgctgtcggacctcctactagagggcctaggtgtgccctgtacaattctactgcagttcagttcttgcaggctgcacctgtttcctctagcctctttctggatttgctgagacaaccccctgctgcgtggctgtgaagctcttcagacctttgttctctgtctagctactttgtatctaaggcactataacataatgagacctagctctttcccctacttaactgtgaggttttgtcagcaggtgttccaaccatcttccaagtaggcttccaagatccaccaggaggctcagaggtagaccaagtttcaggaaacgaaggaagaaggatgggttgggtgcaatgctgctgccaaagttccttccctaaggtcctaaggtcctccttctaaggtaccgttctcagaggtcacctaagggaaccagtgaatgcataggcttccttacagaacagtgggtcaggggttatggacaggagtggaagtgacattaaagcagccacattggaaagtctgcttgtagtgtagttataccacactctccttatgcctccttactctcccagaccctgtgaaattagggcagaattatgtactactgcaaggggtgactggatagtctcatgacccttccttgctgtcccctccattgtgagggatgatcatcaggcccagctgggatgattttggtggtggtggtggtggnnnnnnnnnnnnnnnnnnnnnnnnnnnnnnnnnnnnnnnnnnnnnnnnnnnnnnnnnnnnnnnnnnnnnnnnnnnnnnnnnnnnnnnnnnnnnnnnnnnnnnnnnnnnnnnnnnnnnnnnnnnnnnnnnnnnnnnnnnnnnnnnnnnnnnnnnnnnnnnnnnnnnnnnnnnnnnnnnnnnnnnnnnnnnnnnnnnnnnnnnnnnnnnnnnnnnnntacaaatttgatcatgatgcagcaagggatggtctcagataacactggaggtctttcagagagatcggcaggagccttttaagggtttgtagctgcatctttgtagaggagaaagttggcagggcatcaaggtcagccagtggattccagagtacatggggactgaagggttggagtgagggaggcaaatggacgaggggtgctaggtgaatggaaaaaaaaaataaaaggagaatgcgattactcctgagtatggtggaggagaaggctcattgtatatacgagggagaagacagccagaggcatctggaagagtccagggtggacatgaccagcagaccgagctatgccatgtgaaggggcaggggaggggaggaagaggagaagacaaagaggccaagagatagaaagggccagagtagccaaaatggctggattatatagggaagagccactgggggaagggcaaaccagctctgtccctggtggcagaagattagagaaggggatggggtgtgccagttacaatacaagggtagagactgtgagggatgcagggagaagctgaggccagagtctgctcagatatggtaataagtaccttagcatttgtcctgggtttgagacctcacactaagcactgctataccactgtagtgccagcctcggatatacgagacccaaggagtttctgagagctgtacccaggctccttattcccaggtagggatgggtgggtgggaatctgggaacctgacatggcctttgattctcagcagggagacagacctgtgtaggcagggaggtaggcactactccagatggcctctgtggacactcctgaccagaagaagttatccttccatgtggtctccgctgaccccctcattggggagatctactgctggagtagggtaaaagccttcaacgctgagttgtatgaagtatatcctgcatgttcatgtgaccaggaccttgtgtcacagtggaactttagatttggctgtaattgatgggataggaagaatgggactcggattctgcttgaggtgtgtgtggctagagtagaatagtactcatctgagcttcctgtgtggcatgtagccttatacatagcccttgactgtagtgagcccgacatctccctccccagtgcccctgcccctcctcctccctctcccctacccccctccgttcatggatgttgcaccagcagaggccagaagagggtatcaggtcctttgggccttgaagttcagcttcttgtttcttcaaagccagcttagggtagagatggagggggtctttatagagaggatatttgctagcaagacagtcttaaatagtccatcatcccagaggtgagacccatctatctgctttatcatgtattctgttcatgagaacaaagctttttccttctcacactcaagaatggagttctaggtgattgttagccatctgacacgggtgctgagaaccgaactctggtcctctataagagcagcaagtgttcctaactgccgagcatctctccagccctgtggactttttttggttgctttttttgtgcacctgttggtaccttttctagtccccatatagaacagatgaggtaaagagacattcagagacatcaatctgttgttgcctgggttccaaggacttcacccttttgtgccttctgcttgctagagaattattgtttataacacttggcctttaatggtacatagcaagaacagaaagtgtgtcttttatagatttcttgatctcataaaaatccttcaactggaaattaacattctaaaactgtctttatggacaacttcatagtaaacgtcaatagttgttttttagtagcatatataaatttatatgctttacaaattgccacagttcttgtggctaacaatggcattcactgtataatctcagtgtctgtagaccaggatactctccagggtgtgtgggggggggggagggggtgtctcagaaatctgaactgaaggtgccatctgcctgcaccaccatcttgagacttgcctggggaagagtttgtgtccagaatctttgaggttgttggctgaattcattcttcatggttgtaggcatgaagccaagtctcctgttagctcttggctggaggtagctctgagttcttgctcacatgggccttgaagttcagcttcttgtttcttcaaagccagcttagggtggagatggagggggtctttatagagaggacatttgctagcaagacagtcttaaatagtccatcatcccagaggtgagacccatctatctgctttatcatgtattctgttcatgagaacaaagctttatccttctcacactcaaggtgaatggctggggctgagctgggcaccccaggatcaccaagtcatcttagagcctgttgcattatagagtctggtgaactcaaacagtaattctcagactgaattttatcctttaaaaatattttgtttcttatttattctttgtgaatttcacagtatgtaccccaatcccaaatcatttgccgttccctcgtacctaccctctgtaaaagtaacttttattctcctgttgaaattattgtctgggaggcttactgcctctgtctgctaacctaggcctggtcctagaagcttctagcctccatacaatctaggcctagaatgttttcagcctctgtggcttgctgctgaataagctgccctttctagtcctttctgagctctggctggctgattcaactcaacttgtctggctcaaactcctttgcaagctgactgattcagtctggcttctctctcagcctctgactttttgctctgcttggcctcaaactaattctggcaatctgttctaatcttttggcgtcttctcattttctggctcattctaatttcacctgtgtctagcttgttctctcttaaacctatctctgtaaaactctcatgctgaaaccacctgcatcttcctttgccttttcacaaaagttgggcatatcctattctgtcaaatctttctctgattcgtcactttgttagccactcaatcagatatcacttccaaacatgactgcttccttctataaactaactttaccttcattgtttgggattaaaggtgtgtactaagtacatgtctctattccagccggaaggctgagccacaccacaactagaaacaggcattttcagtaaatagatgggaattacagataattgtaggctgttaggtgggtgctgggaagatctctgtgctctcaaccactgagccatctcttcagctccacactgtctgtctctgtctctctctctttgtaaagaagctaagtctactaaaataagtaccctcctaagttatacaactctccccccttctaatttcactatgataatggaatttaggtctttaaatgaaattacgaaaaagatactgcctcttctcctaggaagatgagcaaatctgttcggattaagaatgtacttctaaggaaattagtcttgtagcgccatacaatgcactcggtttcctttttcgtcaaacctgtacccaaatgcagttttgaaataaccccgttaacgatgtgctaagaggtgctggagagagagagagagagagagagagagagacagagagggagggagggagggagggagggagagagagagagagagagcgagcgtgagagagagcagttgtgttcccgagcttttctggtcattacacacgctaataaggatcttgttctgaggtatagagaaatcggaaatgaattaatcgcattccttgttttatgtttagaaagtggagagagagagctcagcggttaagagcactgactgctccccaataggtcctgagttcaattcccagcaaccacatggtggctcacaaccatctgtaatgggatctgatgctctcttctggtgtgtctgaagacacctaaggtgtactcatatacataaataaataaatctaaaaagaaaggaagaaagaaagaaagaagaaaagaaagtctgatcacatgcacttacgagccctacttttccctgtgagcttgagcgggccttttcagagttcctcttgatgtgatgggtcctctgggtgtcccccggggtaactcagcagaacacttagacgacacctttgacatagctgtgtaccacatagtctccaagcacctcttgcgccatcttgtgctttgtggcccgatatgtttagttagtttctgcctgtgtgttcctgtgggcaacaggaaggaggtaaagaaggagtttagggaagagctaacgccataaacgccgggcttcttgggtctaagttctaggacaatgttggcctcttctgagtggatggatggtctgtggccttccagcttccacatgacagggaaaacctcagcagatctcaggcctcccctgtcgcctagagaactagcatttctggagagaagagtctgcgattctggatgtaacagcccttccagctgtctcacatggaggttaatgttgaggaagtggagacagctggtatttttatgagcgtttgcctgtctgttcttggtagagattgtttgtaactggacttttagggcaaaagtcaggactccctttcctctaacagcctgcctgcttggccggtaggcccttccaggatatgccagtaaaaattgaagggcagaaaggagaaacaaaacaaaacatcagcggccacactgggaagagaaacagataaagggtctagtgaccccaaggtcctcatcagggtttccgcatgggatgtgggtttaaatagaggaggactgggcagggagctggaacatgcacaattagaacagttcttgtggtcccccaaggtcgtctgaagtcgttagtactgttattgcttaaattggaccaatctggtttttctaagtttattctcctccagagtgtgagcttgctgtttgcataaagacccttatcgaggttggtctgttgtgcgaagcatgccatttctccaactcagagtggggtgcccgtgtgggacaaccttcagtgttgaagggaaaggcatcattggtctttagacagaggtgggatcaaattggaatctgatcagagtggggggtggggtgcgggaggtcaggttttcgtctttctcctagttgtgttgtgggcctgtgaggagtctttagacaaagcagctctggagggctgttaaatatacatatttactcttttcatttgagattctcttacagtgtgctttagctccccaaactgcctttggaaccttgggtctctattctcacctcctcttcctcctcttctttcttctctccctcctcctcccgtcttcctttctcccctccccctcccctcttcctctgctccctccccttccctcagcctgttttagaactttgtcggtgggaagttgcctccagtttcttccagaggcctgtctttaagtttttagtcagctgtgtaagaaccaccatgtgcgaattcctttctaataaagcgaaatataattatctctcagagttaattcagagtgagtgggttcctgaaaattaatgtttctgagttgttcatctctctgtgtgtctgtgtgtctgtgcagagtgccaggtaggacatagagagtcgggactttttggtctcatccccgaggctggtctcagtacctgggggctctcccagcatgcctcagaacctcctcccagcacgcccccctcactccagcctccactcccaggggctaggctttcacttccctcccccagcctgatccctatagaacccagccattttggctactttacccaggctggctcttagcccaggctgccccctcttgttccctggctcctctcttgctctccctccctctcactcctctcacagttcagtttagtctggagccatagtcagcctggaatctcccttgtatctacaataaaactctctgtactttgggagcggccatgtcctcctctattttattttattttatttgtcattcagggacaaagcaagtaactaacattctttccaagcagaattttagttccataaatcttaacttcttaaagacaaaaccaaaacaaacatatgggtatcatttttgttaactttaacattcacaaagttcactagtaagcctctttatcctgttaaatagaaggttctgtttcttaaaaaaaaattaaatttcttttctatttttggcttacacactgctgtccatttatatgatgcatcaggctttctttcctagagtgggtctaaaacttactttaaattattaaaccccagaaaattgtcatttccacaaaaggatcaagcatcaacaatatcatgctttggattttttacactttagatcccaccgataagggaaacaaaactgtaagcagaaccaggtgcccacttaggaagagggcagcatgagacacccttagcttcctgccgtggtctgtgacacagtgcaaatggttgaaaacaagacagatacagggctttcactagatgctgaaaacggggattgtagaaacatttggaggagtttttgtgtttattaaaagtttgaactaagtttctaggacatataagtaggaaaaattctaaggatgttctaagaacttctagaaagttcttggctctctgcatcagcatcaaatataatgtgggagactccttggtatggaagggtggattcagacgcaaagcggggcctgccgacctgaagcctttcctcaccatagactttggactgagagctgcgttcagacagtgatttagaatgctgattttctaaaaggcatgagcaccgcctccccaacccttgtatggtttcctgacaatggtcctgataccatcttagtgtggtctctgtaatctccttcaggatccattcggggctatgctcctgttctagcgtttagcctccctgtcgtttaatcttgggcgtctcctggatcttcatcttgctgaccttacacgtcgtttgaggttcatgctctttgcttcgtgcattgtctcggttttgtggagtcttctgtttcctccagattagactgagattatgtggtcttggcaggagcaccgtgtaatgagccttgttctcggtggatctcgggaggtgctggtagcagtcctgttattgccaatgtgaacttaagagatgtctgccaagtttctccactctccaattagcactttttcctgtgtaaaatgagtagttggtggggagattctttgagatgatgtaaatacctcatttcttaccagagttgcatctggtagttagagtttccatgtttgattcttacctgactcagttactaccctctgctgctggtcatccctttgactgttagtaaccggcgttctcctgtaaggccctctgccctcatctgagaggttataatagtctattactggtatgagctccttgattctagttttattcaatgggttataatctgttaccatcaatagtttagttttgttacttaaattaccccaggtagctagtgagagtttcttatgtagttttgtatcttttttttgtcaatgtcctaaaaccagtaagtattattgtgtgtatgcgtgggcactgtggaggccagtttgcctgtggaagccagaggacaactttgtgaagttgattctttccttccaccgttacttgggttctgggacttaaacttggatccatctccatgcttgggcatcaagtgcctttatccactgagctacaccactagcttttttggtgtgatttaatattaccaccttgaagttatttttctccaatgagttctagttcctttgagtgctaactggtattcaaaaaccagtgtctaggcactgcctgggccttgggggagtggtgttactctgcttgcttatgtggagagtggtcagcttgctgagctggccagttatgtggctgctcctgcttgtctacagtctctagactcagggaccccacatctgtaccctgaggataggatctgatatcagaccacactctccaggttgttttccagatactttaaaagtgctattgttccagatacattttagaccgcacatacgccttccttccccagttgtcattttgataagtgttgacctgcggtgttatttaggttagagggaaattgtttcacaagcctggctcttcccattcagggataagaggtgatttctgtcgttcccctaaccctccaactaacatcagtagttgttgttcataaatcttgcctcctgtgataatcattccacattattgttcatggttctgcttttgagctgaggtcttgctctggtgtcagactgaattcctggcctccagtgtgcctcctgctccggtcttctgagaagccaggaactcggctcccatcaccctgtttagatttttctcgttttgtgtttataaatggtgtcttggcgtttgttttcttaggagtttacacagagaggtgcctacgcaagaaatgcagagtacggataaactgcgtcaccttcactcacgtcagtaaacaggacacagtgtgaactttcttacaagactttcctggacacagtgctgtcttatttgtgtcctcctgcatcaggctcgagaaggggatacagcagctcatgtggctttgcctcttggtgttggaagcgggacgggaggagggggctggacttgtgccagctcattaccctctcccagacgtcctgagagtttgctgtgtctacctgaaggaggaacagtggacagtgccttccctggtcttagccccagctttacagagtgtgtcttcctcttctttcagacagggcttctctgtgtggtgcggtatagtgtttacattcttatggttactaagagcagaattagttgggggcgttgttgtccaacaaacaagaacccattttgactttcatttctagtgcagtgagtattttcttgcaaggtattgactaaatgtatctatctgttcctgaagttctgttagtttttttttttttacaagcatacatctttaagttttgaaagtgcttgtatacagataatttttatattgaattaagttttttttttagaattttatgcacgatactgtatctttttcacacccccacccctttcttctaatacctcctatgtcatccttaactccctccaaaattcacgacctcctcttctttcactctcgccgttacatgtcttatgtacatgtttatatgcatgaccatgcagccggctgagtccatttgctgttgctcacatggaagggttccggggtctctgtgaccaccatggtcagtggcataaccatctgagggaggaaagaaggcagtttagttcaacctgattcaaggtggtggtgttacaaactttgagtgtcttacctcaggtagcttttttaaaggcgtatttatcacacataatttggaaaaagtttcctggggtatggtggtttgaatatgtttagcccacagagtggcactatttgaagttatgatcttgttggatgaagtgtgttgctgtgggtgtgggctttaagatcctatctgcctggaagccaggtagaagaactcttagctcttcctgcaccatgcctacctggatgctgccatgctcccaccttgctgataatggactatctttctgaacctacttgccagccccaattaaatgttgtccttataagagttggcttggtcatggggtctgtccacagcagtaaacctctgactaagacctggtggtaatgaacccattctcatgtgcataacaaagcctgaggccatgacaaccttgaactctttgtaaagttcacatggcatcttccataaaggtaggttctgtagattaatagggagcaaattcaagataaagcagggtgggggggtgtaaagttcacatggcatcttccataaaggtaggttctgtagattaatagggagcaaattcaagataaagcagggtggggggtgtaaagttcacatggcaccttccataaaggtaggttctgtagattaatagggagcacattcaagataaagcagggtgggagggagactgtcatactacagattgactgagacaaactcaagataagagtctagaggaggatctaatatgggctggccacacagaaaagattaccaggctattgtgcaagtctgctcccagcttctgggtggaaaacaggttgtccgcatctccctccctttgaagagacgacccgtgtttctaacattcctgatttcccctagtgcttatgtgtgagcacaaggacctctgtgcacttgtaattccgtccctgtacttagggctgactgtctggggttggataacctgtcatggatttcatccctggagagaactgatccggcctcgctccttagccattggctgcgtatagttatttatctaggggtgtaggatcttgtaaaattaaccccgtgcacattggtacttcaactggtagtctctcattatgttggcttcatttcgacagccatataattgagatttcgcgggtacaagcctccttgtcacatttagaagacattagcagcaggttctcttctccactggctctcaccatcgttttgaccgctgtcatttgttctttgtattttgagcatatttgactataatagtttacttctgttaccacaagaaacttctttgatgaggggtgaagagggacagttagaaattataattggtttgggaaaacggcagtactgccttcccctccaggaggcatgcctagcctcctaccgtaaggtggaacagtgtattattttattttaaatacatatactaaaagacaaaggatactaatcgtttcttttttcatttttcctctagaaaaactaattgcttatcaacgagaattccttgctctaaaagagcgtcttcgagtggccgagcataggatatctcagcgctcctcggagctaaacaccattgtccagcagttccgcagagctggagcagagactaatggaagtaagacagctctgagtacaatctcaggtactttaaaaggtgtacgtgttcacagatttgtatggaacaggacctgcgaggtttgtgaatagtttagcagccagcacatgttgcccttttcaggaagaaagatcttaacatttgccattctggtggattataaatgcacttttattcattgctggatatgattttgatatgcactgttacatttcagtcgcatacatttttatcagtcgtagcgaagagcctgtatcttttcaaagcggtcacatgggattcaattttaattttggggtcagcgagatggctcagtgggtcacatcagcttgatgccaagcctaacaaccctagttcaattcccaggtcccacacggtgtacaggctgaatcccttcccacattgtcctctgacctacaaacatatacacacatgcacacgaataaatgttgtaaaataaataaattttaacttttatttcagcatgcttatgatataaccaatgcttgatcttagatggctcctggggaatctgtaagctgcttgaacagtccttgttcttgcatctgagtgatactagggaagaagcctgggttacagtgcatacctggaaagtatctgagtattccctccttggggattctggtcactggtgtcctgcctctcctgatcgagttgttccctgtttttataccagtgtcctgggctccggggctccttctacatcggtgctttagactcagtttcatggtctctaaacagagccaggcagggatgcctttcatcttggtatcaacactggccctcagtgttaaagttttgtgtttctccctctcctactgaggatgctggtgtattttgtcactatgtagcatttacaattacaggccgatgcagctgaaaggaaatcgcccagggatttctgtgaactcttttttttgtttgtttgtttcattttagtctttttaaaacaaatgtttactccttgaaattatactattgagcatttttaccttgtcattttgtttgtttggtttttaagccaatgatttgctctgtagctctggctgccctggaacttgctatgtggaccagacagggctggaactcacagagatccacctcccttgggcattagagggctgggataaaaggtgcacaccacagtgtctgacgtcattattcttcaaaatactatttgcattaaaattttattttaatggtctaagattttactctatggcacaggctgttcaagaagtaacttatgtagcccaggctggcctcagacttgtgagcctcccgattcagccttgcaagtgcttaggattagccgtgtgtactccccacaccaactgaaatacttttctagctaatgtgctaatcatagaccacagcaaatgaagcatttccttctataattagcaaatgaatgttttcctgggtcacttttgcccttccaaatcacagctctgtgagagacatttttgcgaagcgtttggttacatttctggcagcccttgtgatcttcattagattatgttttgatggcaggcgatttccaaacacaccatttctggaacaagacagaaagcaattaggtatttgtggaacgagtgaaagctaaaatcatggagaggaaacgactgagtcacaggacagactgtgttagggcctttgatcctgctgactatctaggacaggcatcacaccgtgactgacagcatccttcaaagggctgctgcttgctggagtggaatagggtattgtaacttactgattcttctcacgtggaattcaagtttaattttatctatgatgtgatgtatttttgtgggtttgatatggatgtttttgtctgcattatgtctgtgtaccacatctgagaggcgcccagggaagctagaggagggtgttagagctcctggcacatgtgagccaggacctctgaaagagcagccggtactgtcaccactgagcctgtctctccgtccctcatgtcatatctttcatggcattgtggccacaagtccataatgctgactgccttgtttagaaggtgaaatctcagttgaatgaaaattgacagcactattgtctaattaacagaaatttttactctgtactctgttcagtggctcatccactcctctggatgaaacggaaaccacttttagattgacacgtactgagcgttcccaacttctaaatattttcagtgactattttagggaaatctatcttctatataaaagtttgatgaaatgctagtgcataaagaaaatgaaagttaggaaggacaggcacatgcctggcatggaagaacatggcttcatggaagatttgagaccacgtgggctgtatatatcaacaacctgtctttaggaaagaaaagagaagaagacaggaaagtgaaattgagctgtggccagtgtgcttgctgcaacttcctttctagactgctgcgtagttagtgcctgcctggctgtttctcctgtgttctcagttaattttcaaaagagaatcggcagcaacttccggaaggtaaggggttcctgccacttaaattgtctttctgtgtttcagataataccataaagcttctaaaagagttgacaagcaaaaaatcacttcgagtgccaagtatttattatcatttgcctcatctattgcaaaatgaaagaagccttcagcccgccgtacagattggcagtggaagaacgggaggtgtgttcactgtgcgcctgctattggaactgtggtttggaggggttgattgaccactaggaagatgtctagcaggacaaaggagtaaaattaaatatacgtgcatatttaatatattaacataattactatattagattcaataattaaaaagaaaataaatattgatattatcatattaattcatctcattagcatatcaatattaacatacttaatatatttgtatttaagttattatagtaacaatattaaaatatataactattggtggtattaaattattaaattgtggttgttaaattataatatataatttattgatatatttaatatctgcacagcatcttggggcttagtgcaatctgcttattgaaatgatatggacatcttttccatatatctaaacaggatcagtacacatgtagttcaggcagataaaccttgaacctttgtcagctttctgttttaaaaatggggaggtagagagatgacccctcccccatgtctgagtctggcattaatggctcttcacaatcctgccttaggggtttgtcttcagtctgctccgccttcccctggacatgtagaggcagaacattgctctcaggagcatcccatgtgggaacacctgctattgctatgcttttcctgcctaagcagtcctggaattctcctccgaggaccttttagctacttaatatttctagtgtttcatttttacgagactttaaaatttttgacttaattgaacttggactttttaggtggactttttcttcatagatttaaaatgtagagatgaaaatattacaattggggaaacaataattctagagatactaaaattcttctgcctttgttgttgtctggggattttttaaaaaatgaggtctcactatgtaggccaagcttcccttcccttccccccactgggatttcaggtgtgtgccttgccagattgaatttcatttttgtgttaaattttttttggatttaactttatgtgttgaaccccatcccatgggatagcaggactgccaccctcagaactcgtagagagcattggctgtcctggacctggggttagatgtggttgtgagccaccatatgggcgctgggaatagaacccaggtcctctgcaagagcagcaggtgctctttggggctgagctgtttctccagcccgtgggttccttacctggcttttcctttgtgtagttctcctgtttgtacccagggcctcgtgcatgctagaccagctctcctccacagagttggatccacaactctggataccttaagcacctttctctttatctctggtcatttgagctgttatgacgttattagttactatgttaccatgttactatgttaccatgtttcgatgttaacgatattactaagcctctgcatccatctcccttggttcttctatctttatgtcttataaacaacttaaaacaacgtatgatcttcctatagaagttgtgtgtcttatgctagcccattcagattaacttttgtttttaaattattaattcaagaaatatttgttgaggagaggcatccgtcctttgggggctagatatagaaactctcatgtgtataggacactgttagctactttctttagaacttcaattgctaattatttttaaaaggtaacattgatatctccctttaacagccagtctgggtaaggttccatagtcaatttaggctgcactttcattaatgagagtaacaaatgaaaaaaagactgtgtttttaaaagtcttttaacatctgagaggcagagacagaggcagaggcaggcagatgttcatgagttccagaccaggcagggctccacagtgagattatgtcccctcaactcagccccccaagtcatttggaatgttgaagatctctagcaagttcnnnnnnnnnnnnnnnnnnnnnnnnnnnnnnnnnnnnnnnnnnnnnnnnnnnnnnnnnnnnnnnnnnnnnnnnnnnnnnnnnnnnnnnnnnnnnnnnnnnnnnnnnnnnnnnnnnnnnnnnnacagggtttctctgtatagtcctggctgtcctggaactcactctgtagaccaggctggccttgaactcagaaattcgcctgcctctgcctcctaagtgctgggattaaaggcgtgcaccacctcgcccggccctctagcaagttctttttttttaagatttattaattctatctatatgagtacactgtacctgccctcagacataccagaggagggcatcagatccccttatagatggttgtgagccaccatgtggttgctgggacttgaactcaggacctctagaagagcagtcagtgctcttaaccactgagccacgtctccagccccgcaagttcttatctagtaagctcttctggtttgatggctgacactctgtcttccttttaaacgaattttttttttatctcactcattttatccattataaacactccaagatcttgaccatctagttttttaaaagtccacagtctataaagtgagttctgtttttaaaacataggaaaagcagtcatcttggagtatgggggaacatccttatttaacttaaaaaaccaaacctctctttcctaaacccttagacaatccttagtggttcgagagctaagaacccttaaaatgtccttaaaagaagccattgacctctgcttagaaaaacatatatagaaaagttattttgcacatgatttctgggattcgtgtttttcggaagctcagaacctgtgtaataaatagggattttgcgtcaagaacgtccattgtctagatccaagcagagctgctgcttgccagaggttctgttcttcaatagtcagtctgcttaatcccagagcagctgcaaagccattctcaggctcagggggaggggcaatgctccaggtgttggctggtccgagagaccggctgggattctgaagttctctcatacagcccctcggtcctcccacacattagtggctggggtagccgggcacagccaacacggacgacaaagcagtggcatcgttaagtatggcatggccagcaatatggaggccagtaacttggtgatctagaaaactgagctggtggagcaaataaatggtctgatttattttggagggacgagcaagggaattgcacccataggacagtacccaactgttagaagagaccagttagaagtgtttgcttttcatgttagtagttatggttgaaactcacatatgctatctaagtcgggtctggagacataggcactcccaagtactcaggagactgaggcgggaaactcgaggtcacagcctctctgggcaacagactgggttcaagaccaacctgagcaacttagaagagtcttgtttcaaagcagaagtgaggagagggctgagtggctcaatggcagggcacttagcctgggattcacctctagctcttttaggtatccacttgaggcattaggtgggtttgtgggggttgggtgattttgagcacatagggaccgatgggggctgggctcgaggaaatggccatgaagactttcaagattccagacggagtaactgaacagacggcagactgtttgctgagacccaggagagtaaaacgtgttcagcagcactgtttaagatttatctgtattgttttttaactatggaactcatgtgtctgggtaggggatgcctgcgtgtgagtgtggtgcccagggaggtcagaagtgtccgatcccccggagttacaggccgttgtgagccacctgatgtggttcctgcaaaccaaactcaggtcctctgtagaacctatcctcagtattaagccgtctctgccacttgcagcattggttttcaagagaagagaatgtgttaaacacggacaagttaagttttatggaagcgttgagctgctgacaaagggacatgtcaagcagggaggaagatctgggactcacaggggaagtccgagttagggttgattctgtgaatgatgacgagtaagtggctgaagaaatgtgtctgagtgagatcatccagggctcagtcgcaacttccccagcagcgaatgccctgtgaaagaggaagtaaagctggaggaaaacaagaaaggctaagctaacagtgaatgccaaaagcagggtgtggggtaactctaaaggaaggtagtctgagtagccaaagagtgggaccgtggcttttctggaaccaggctggccttgagctctgcctgcctctgcctcccaagtgctaggattaaaggtgtgcgtcatcacacctggtttaagattattttcaacacttgctgtggtgtatatagagtgcctagaatcttaatgctttaaggttttaaggtaaaaattttaaaaagactttgaaatgaaatcagttcggtgacactatatatggaatccccaaaattactgagccaggttaaattgtgtggcgaaatgaaagtaatggggttagggttacagtgctgacctctctcagtggcacatgaagaccctaatagtacatattaaccacagtaaatatggacaccataaagcttccttgatagagttgattgcaggagggctgcagtccagaggctgttgtgagtggtccagggtgagttgtctgatatccagcacagtcttataaccctttgtggatgatctgggcggttgccctttgtagcagctggtagaggtttaaagacgtatgccttttgcatttcctacacgggtcagtttcatttttccaaactcagcttagctgggttcatttttccagtgcccttctacagtgtgtctcagagaagaaatcacgcataaacagatgtgaaatttgtatcacatccatggttccctactgcatcagctgtgcaggagtaagtttgcattcctaacaagcagaatggtagaaaaatcctttagtttacagaggtctctctgccaggggaggacccagcaccctcaaatttttccaccattcatactcagcacagggacccaaaccaggaagttcacactgctgcgctactgctaatggatcgcaggtgtcactgagatgtcactgtgttcctttgactgttctgactcaggagcccaagcttcagttataccattaagctcccttggcctggtctgtctggagcagttctctgtcttgacactgtaaagagcgttggctggttattttgtggcttgtccccagattcatatttgtccaatgtttcttcatggttcccttgagcttctgatattaaagatgtccattcataagatgtctcggggcttctgagctaggcttgtggagtaatgagttgtagcagctggtttggcatagtcttttattagtaccatgtttgcacacacccctggccttgacacatgggaagggaattatggtgttatagatattattcccttttatttcttctctctaaaattgaatccctcaattacccctataaagttgtctgtattcgtgattataaagtcttttctgttattataaaatctcttcacataattactgtatttttttttcagtttcaatagttatgggaattcctactgtgaagagagaagttaaatcttacctcgtagaaacccttcactcccttattgataatctgtatcctgaagagaagctggactgtgttatagtcgtcttcataggagaggtaattccttgttatttctttcatcatatgtgatctgagggttcagatgctaaccaagtatttgcatgtgtttctagaagcattgaaaccagtggttctcaacctgtgggttgtggcccctttgggggtcgcatttctgctatcctgctatcctgtatatcagatatttacattacgattcataacagtagcaaaattacggttatggagtagcaatgcggggcttaccacaacctgaagaagtgtattaaagggtcgcacactaggaaggttgagaaccgatgctctagagactcagctgattctcctcttgggttttagaatggcgaagagctgggtgtgggcatggaacttagggcagaacccttctgtggtaccagtgagatcaggggcggggtggggggaggggtcaggccttaaccttctgccttacgtagaagtgcttcaggttacactgcttgctatatcaggcccttgagccccatggcttcagagttcttcatttcctttcaagtgaatatggcctcagtgacaaacacatgcgtaccactgaattcagtcatggaacgtataatggaacttgctgctcatacaaatacaaacattagtttttagaaagttaattcttcctatggcttataaacacatataccagagggttgttttgtatgtgttgttgaatcctgaaccttttttcacaccaagggggcggggactttaaatgattaaaggtaccagtgtcattttttttttctttctggcttccaaatattctgcacttttttttgttgttgttgttttcgagatattctgcagtcttgtttcagagtcatttttgttttcaatctatgatccatgggtaagtttttgagttcctgcagcgatcagcagtaacattaaatgttcatgcaaatgaagggctgtgtagctggactgccgtacaactgactggacactattttctaaatgaagctccgtgtccagacacattaaaatattcctgtgtggaaacatggggttgacggtgaggccagctgtggtagttggggttgggtgggaggagagatcctttcacgcacaggaggaaggttgagctgctgttgccctggtctcgaggatgcctgagagggagagtggctgccggctccccagtcttgctgtcctacctgggccggcgccaacctgctcctcactggtcggccacctccacttcctgccctttcttcaacacacatatgcacacgcacacgcacacgcacacgcacacacacacacacacacacatgaatacaagcagcggtggtggcggtgatggccgagggagcagcagcagcagcaggaactccacacccaactgctggtcgaggcccagtgtgagaacctcagcgtggcttttagccacgcaatgcaacatcaacgctatgtcctttgtcccccacgtttttcctgtggaggggggggggtcgggggaggtcaggcccagtcgctactgtccccagctggtgcagctggtggtgaccacagagcaggcagcagcacgggaggccctttcggaacctgtggcgccctctcgagaacagtcattgtgtgaaggttctaattctactgttagcatggaactttcagaacctgttgtaggaaatggagagactgaaatgtccccagaagaatcatggaagcacaaagaagaaataagtgaagcgaagccagggggttggttcctcaggaaatggaaggccaccagaggaaagcacccaagacacgatggaggaggaagaagaaataccaaacctaagtcagtggtggcaccaacagcagcccctacggaagaacatgtaaactcatcgtgcatgttgatgcaggcacggcaaccattggaggacaaataatctatctgaccggaatggtcgacaaaaggacacttgagaaatatgaacgagaagctaaagaaaaagacagaaaaacttggtacttgtcttgggccttagatgcaaatcaggaagaataagacaagggcaaaatagtagaggtgggtcgtgcctaatttgaaacggaaaagaagcattttataattctacatgcttctggccttaagagttttgtcccaaatatgattggttggcgcctctcaaactgaagtggctgtgctggtaatctcagccaggaaaggagagtttgaaactggatttgaacaaggaggacagacaagagaacatgcaatgttggcaaagacagcaggtgtcagacacttaattgtgcttattaataagatgcatgatccaacgataaactggagcaataagagatatgaagaatgtaaagagaaactagtaccatttttgaaacaagttggcttcaatcccaaaaaagacattcactttatgccctgctcaggactgatgggagcaattcttaaagagcaatcagatttctgtccttggtacattggcttaccatttattccatacctggatcatttgccaaacttcaatagatcagttgatggaccaatcatactgccagttgtcgataagtacaaggatatcgggactgtggttctgggaaagctggaatctggacctatttgaaaaggccagcagcttgtgatgacgccagataagcacagtgtggaagttcttggagtactttctgatgatgtagaaacggggctctgtagctccaggtgaaaactcacaaccagactgaaaggaaccaggagtcattctttgtgatcttaataatctttgttattttggatacacatttgatgcccagagagtgattatagagcacagatccatcatctacccagggtatatatagtgcagtgctgcatagtcatacctgtatggaggaagtggcagtaacagccttaatctgcttggtagacaaaaaaaacaggagagaaaaaagtaagactcaacctgttttgtaaaacaagatcaagtacgcattgctcatttaaggacagcaggaaccatctgcctggagacctttaaggacttcccctagagatgagagtaagaccactgcagttggaaacgttctgaaactggttccagagaaagactaagcatttccttgatgaccttgcacaattttcctgtgaggaaaattgactgcaaaagcctacttcacaccgccatctcttacttcctgcccattgacaaacctctccccatactttgcaaagacaattcactgtaaaagtccacattatgtcagctttctcatattgagagctctgccatgccactgttgaattttcccaagattttgcccccctttcaaacttcacttccttgggcagatttggcaatagctttgtaagtgatgtggacataattgcttacaacaatgaaaaccttcaggatttttttttttaatttttcattttcctcttaggcatagttagtattgttcccccagggagatcattcttagtgtgtgagtatgtgtgcacatgttaaaaagaccatgttaataaaatactcaatttagccccccctcctcgccaccccaaaatagtcagatgtgaccagcatgcactgtagaaattgagctacttcctcttccagcagtctgtggaagagcttgtttcttcttcctgggtaatattagtctgtactggttaggtactattgttagcttgacccaacctagagtcacatgagatgatgaaacttcaaggaattggctagatcatactggtttgtggccatatctgggacagactgtcttgactgatgttgatgtggggtggcctagcccactgtgggtggcaccatccctatgcaggtggccctgggttgtataagaaagctggagcatgagccaaagagcaaggcagcaagcaggcctgacctccctcaatgatggactgtgacctggaagcataagccagttaaaccctcccttgagctgcttttgggaagagtggttttttggttttggttttggtttttttcgagacagggtttttctgttgtagccctggctgtcctggaactcactctgtagaccaggctggcctcgaactcagattcagatcacctgcttcaccctctgagtgctgggattaaaggtgtgggccaccatcacctgactgtcagattttttttttgtttgtttgtttaatcacagcaatagaaaagaaaattagagcattttgttttctatttgatgggtaaaaagtaacactttggcctttaccaaaatagctcagtttggaaactgttaggctgaaagtaattatttgctcttattgaatttggatttcttgactatatggaaatgttgctttgtgtggtttctgaccatttgcatttataattgttttttaaaaactttgcttattttttaatgctttgatttgtaagttttcatatatgaggagcagactcctctttgaaatagtttgtccagtgtgttatttgtattatctttattatgattctttttccttttaagttacctttcttcacattttaattaaccatacctgccaatcctatgcgtctaccctgaggacgggcgcctctcccatggaaaacagttaagcgatggctatgaatattgacgtacactcttggttctccactgtgcatctaaaaccaaatttcagcatagatgtttgcaagttcagaaatatatttaagcagataaacatttacataatactcctcaatgtgcatcaataaaataagaactatctgttgggatataatcgaaccattagtagctcgcaggtgtcctaagcctcgggatcatgggtgatcccactttctgccagaaacatttttatacaattagaacttacaatgagaatactaattttaatgggaaaaggcttaagtctaaaagaatcatctttatccacttaataatccagagacgggtggacataggtgtttgagtctccttggccactcagtgagctgctcactgaggtgacatctctgtgcatcgtcagaggacctgagttcaggggtacgttctgcctcttgacgaggttgctttccttgtccaggtcctccactcccttcaacctgtgtggtaatgatgcttctcgccggttagtgctcagcattccttctgggaagcactgtgagcattcatggtgaaagctggggactgagcaggccaggctgtgtcagcagtgccctctctgaaaagcctgctctaggatggcagtgtttctccatatttctccatagaatctcaatgcagaaagtctgtcctgaacagaagaatcgcagtgtgccactggattcagccactaggcagtttaaagtcattgttgagactggttgagtctccatgggtcagttagaagtgtttccctaggtgtttgccaagcaccagtgacaggtccatcctctgtggccgtgagcatgattggcgcacaggatgactagagatctccagactcctcctcagcccctgtctacctgataacatccttgcctacttgataacaccataggaatgtctgttttctacttgatattgccatatgtgtctagtgagcactgtagtggttggaataagaatgacccccataggggctggtgagatggctcagtgggtaagagcacccgactgctcttccaaaggtcaggagttcaaatcccagcaaccacatggtggctcacaaccatccgatcacgagatctgactccctcttctggagtgtctgaagacagctacagtgtacttacatataataaataaataaataaaacttaaaaaaaagatgtaggagaggcaggatgtttaaaaaaaaaaaaaaaaaaaaaagaatgacccccatagactcatatgcttgaatggttcgtcaccatgcagtggcaatattttaaaaggctagaaggattaagaggtgtggctttgttggaggaagtgtgtcactgggggtggactttaaggtttcaaaatcccatgctgaacccagagtctctccctttacctatggatcaggacgtagttctaagctactgttccaagtctgcctgcttgcctctatattcccactatgatgataatggattgaacctctaaaactgtaagctagcgcccagttaagtgctttctcttgtattaattggccttggtcattatggctcctcactgtaaaaaaacagtgactaagacaggcaactcttaatttgtgcagaacttagtgagtctagtcttaagctggtgctcttgctggtctccttatgttgctgggaattctctgcgttgtgctcatcctgagcccggtgtctcgtacagacctgtgtgttctctggtttatgtgtgctactccaaagcctgcctcttcctttctactcgcttctccctccgccccagctgctcaccttctgtgaggctacctctggtctcctagttaaattattgatagtgctaacaggcaaatatggaaaaaaaatttttttaggcaaaacagggatttctacgaaggcatgaatatctccagtttaaacatatgaggagagagtacggatgaaaagattctgggcatgcttttgtatgcctgtaaactcatatcttaggaggctgagacaggaggattgctgcaagttcagagccagccaaggctatgaaagactgttttttgaagtattggtctgtgaagagaatgtgtaggccaccgtgggtagtctctgcttcactaatgtcactttttcttctctctatttttatttgtatattccttggttttcattttaaaattcaaagtgttcacttttattttttaaattaatttcgggttttaaggttcctctctcatcccaatgtccctaaacccttccttgcattctttcaaactcatggcctcatctttcataaattgctgctatctagaggttatatataggtgtgtgttaaacaggttgcgtgtacccgagatacgtaaatacaacctgcttgatatgtatagtgtcactcaggtgtgtctttagatctgaccattcggtattggataacagatatgtgtgctttcctggggaagacccttttctcaggaccccggccttccgcagtggcctgcagctctttgtgcaaggttgaggcctgtgggccttcccccttccgtatctgttggtgctgtccttactccgctcctgcttgggcagccatgctgatgagactttatgagtgtggcttctgatgttcttaggagacacggcctcggagtgaactccatttctctacctcttgggtctttccacccttctcctgaagtaatccctgagcctttggtgcaggggttgtattgtggatgggatgggctccacagttctgcatattgatgggttgtggttttccgtaatggtctctgtcctttgcaaagagaagtttctgggatgaggggcaagggctaccccagagaaagatcaaagtatttttatgtatatggatgctttgcctgcatctgtgtctgggtgtctgtactctgctgtgagtagaggtgagaagagggagtttgattccataggaatagagttaacggacagtgatctgccatgtgggtgctgggaattgagcccaggtcctttgaaagagcagccagagctcttaaccactgagtcatctctccattttttttctttgaaaagaccaaaagatgtttctgtttgggagagtaatcattagctatgatttagtcctctgcttctctcagttcagaactttagaaggggccgagacagaccagctggttgctctggagggtactttgtgtaacctaagtggttggtctggtttcaggttttgtttttttgtttttttttaaagatttatttattattatatgtaagtacactgtagctgtcttcagacacaccagaagagggagtcagatcttgttatacggatggttgtgagccaccatgtggttgctgggatttgaactctggacctttggaagagcagtcgggtgctcttacccactgagccatctcaccagccccttttttgtttttttaacttagagtttaatcatatagtattttgagttaccttctgacctccacatgcacaccttggcatgtcccctctctccaagtaaagaagtgcttattaaaaaatcaactataagggagcagtgatcagataggcattctggtgactgaattgtcttagatgtgactgtcttgtctttgttcctgcttgtggtgcctgacttcactgtgactttatttctgtgtcttcccagcctggttcctcaacccaaccccagctgcatgcatccaccccagccgcatgcatccgatgccccagctgcatgtgtccaccccagctgcgtgggtccaccccagccagctttcagtaaatcttttgctgctgttattgttgttggctattgtcttagttagggttttactgctgtgaacagacaccacgaccaaggtaactcttttaaggacatttcattgggactggcttacaggttcagaggttcagcccattatcatcatggccagaagcatggcagcatccttgcagacatggggctggaggagctgagagttccacatcttgttctgaaagcagctaggagaagactggcttccaggcagctaggacaagggtctgaaaacacaggctcacagtgacacacctactccaacaaggccacacctactccaaaaaggccacacctcctaatagtgccactccctgggccaagccatatacaaaccatcacagctttgcttgtagtttctgctggttgcagctaagaacctgataggtctgtattttgtttaaaaaacaaaaccaaaccaacttgaattttatagacggccaccaaacagagcaggaagttgatgtggttgtgcggcagtgttggcagttagatgctcttctagtggattagagagagtgagtggttctttgatgcaatgttgggcacaattcagcctgcgtgactgacaagcagggatgttgttgaaaactatgattgccaaagctttggaagactgatttggaccgagaggtgaattaactatctttgttaatgttttaaattcttctcctacagttttgttttataaatgacagtattacatcattaggaatataggtccaaagctcatcttaatgcccagtatccagctaaagttttagttaattaaatcaatgaatgtagttaatgttttgagatagcgtctcactactagccctagctggcctagaactcactaaaccaggctggctcaaacttgcttgtctctgccttcccactactgagattttagaggcgtatgctaccatacccggcttcagccagtatttttgaattcactggtgcatttattagtggtttgggggcagggttgagtgagttcagcctcactggatggcaacatcgtttcatgtcctctattttgacttgttggtctagtatttgtggcacttgattctcttccttcctgaatcacttcaaaattcgcttagctctgagcttagagtgtgcctggtccctccagtccatagtcgtctcagtctcctcctcttacttttcccactcactctggggattggattcaaggcctcaggcttgctaggatgagtggtataaccaggtgtactggctggttttgtgtgtcaacttgacacagactggagttatcacagagaaaggagcttcagttggggaaatgtctccacgagatccagctgtgggacattttctcaattagtgatcaaggctggagggctggtagtcctgggttctataagaaagcaaactgagcaagccaggggaggcaagccaataagcaacatccctccatcgcctctgcatcagctcctgcttcctgccctgtgtgagttccagtcctgcatcctttggtgatgaacagcaatgtggatgtgtaagctgaataaaccctttcctccccaacttgcatcttggtcatgatgtttgtgcaggaatagaaaccctgattaaaacaccagacttttacagaaaaccctttagtttgaaagagggaggccttgagcttgtgatcctgaaccgcctcacagacagttgggcctgcaggtgtgcattagtacatgcccttccccactcctgatcccactttgcaacattgtattgagccttttatggatctttctagtttcttaggtagtatttagagagtttcctattagggactcactaaaattggtgggtttgctcttttctgtttgcccggcctctgtcccagctgcccttacttgttaggttatcttgcctagtgcattccaccgcattaataaacaggcttccgtgtctgttatcagattaatctgcttttggggctgcgtttggcttcagggtgagatggctgtgtggtgctgtgtgacgctgcccctgctctgttaggtttgtcccgctttctacaccggtttggtgtattcccttcccttcttctcttcatatcctgttttggcttcatgctgcagttatcagtgttcggcaaacactgttgtcctttggatgttcttcctcctgtcttgattgagaaaaactcagctaagcttctcctacaactgtcccatagactgtcagggttagtttttgtcaacttgaaacaaacttatgtacttggaagtaggaaccggagttggtaggtttgcgtccatccagttgacctgtggacatgtatgtgggtgcatttttcttgattatttagtgatgtaagagagccctgcccactgtgatcctcctgaaaatggtcatacttttaacttttacattatgactatgccccattgagttagcttctgtcgaggtataaggtaatgtgaaagttccgaccatcacccattcattaacccagttgctcgtgttgagagaacactgtgaacaccgtgacctctctgacatatttattgaaaattcagtgactgttaggtgtgtgtgtttcctgttgtatttcattatctggatttggagctaaacctcatgccagcacttcaccgcctcctgtaggttggtgggaagtactgacgccgccgcacagtctggtcctacagttttggtctgctcaggattgcttcagacgttgaagccctttgtgtttccaaacaccttcagaatcattgcagtgacgtctctatggcaacatcttcagttgagtgtggttttctttgttcttttccttaaggcaatggtcaagtcattgactgcaagtttcttttccttcgtcctctccgtcccctcacctccctctgtcctctctcttctctcagtgagtttgttgatagactctactcagaaaccttttttcttattactttgtattctacttgtatttttatgagtcactgagggtatgggcttttaggctactggctgacaggggataaagctgtgttctaggcacctgggcgataattatattactacttctactactactattttacaaaaataaacttgccaactttccttcagccacagagctcttcttgcttgtcacctctggtcatgagacaaagccatgccctcgagagtctgggaatttcagttgttaatatttcagagtgaagcgggtggttcttgtatctgcgtctcattgataacggttgtgtgatttccaggaaggaacttggggacgcctgctgactgtcttaaccactccaaagctttctaaggctcagtctttcctgttagattctcactttgtgtgctttgggtgaggttagtcgcctgtgcagttttaaacctttcctcccctgaagtacatgaggcatattgccagcctcagccacggctctcactcactggaattatgttttctcagactctttctcttgttgaatgagtgtttattgaagtaccactgtgaagcaggtgctggggacaatgacagataaattccccgatctgaaatttgtacaagagtatttctttctgtcacgatggctctctgttttcggggggagattaactcctaatttgatgtacagattgctgagcagtccgtgcagcactaccgttggctctccgatatctatcctggctgtgaatgtctgtcctggctccattccctgagttctgtttgcattttttcacctctgagacctcagaagtcttggggctcagggtagctggcaggaggaggagacacagaccctgtgactctgtcttgtctctgtggcattcacagccacagttctttcagttttgcttttctgctgctttgttcctaaaaagatgcacgcagagatgatgggtggggttttttttttctttagcaatgtaagcaattcaaagctataagctccctctaagaaccatgttaactatatctcaagttcttttttttttttaagcttaaagagaaggagggtggatgtgaatgactatgaatgggagtgtgcaccacatgtgtggtacccgcaggggccagaagtggcagatcgccccagagctggagttataggtgatggttgtgagctgcctggtatagttgccaggaaccaaacacaggtcccctgcaagagcagtcactgctcttaactgctgagccatctccccagcccctgcaccccatacatgccccctggttttctcattcagatcagaatactttctaagttcctatgtaattttttcccttgacccatgggttacgtagaaatgtgtttttacattcttacctatttgagaatttctcacaatccccactgttaaccaatctccacttcaaaccctctgtagtcagagaacaccatttacgtggtggtgtccctttcagccttctcagtactcgtttgttggcttctgtgcttcatgtgcgcccagaggaaatggatcctgcctgtatgcttgcatgacatattttcatagaggtgtttagtaggttgagttggtaaaattactagagtttagggttaaagttttgtcttcagagtcccagtgggctagcctcggctacacatccagatgatcattgatgggctagcctcaaccacacctccagattattgttgatgagaacagagaaaggactttgcttcagtcaacacggccatgtgagacagaacaattgaagggcttcaggacccaaagtctgtctccagggcctgatagaacttggagatttggtagaaacgagaaacagaaggggctctggagtttgcttgacagactgtcaggaaatctggttcaggccaatgctctgagatctgtgtgtctcagttctgaatctgcaaagcattccttccatccctgtcatcatttgagggggcagtctggtttctgggtatgattgctcctgccatggggttcagcctcagcctctgaaatagttgcctccaattgaggggtgatttgccctgtgattagggggaagttttagtccaatcataaagatactcgttgatcagttctgtgtcttctgatgtcgaatgtagctgctaagaggaggagtcaggaggaaaagtagttaaagcagcaggatagagccagaaaggggccagaatggggccagaaaggggccagaaaggggtcagaaaggggccacaatggggcaggtggggagggaggctggagccggagcttctacagtgtggaaggcgctctgccctgtatctgtactaatctagtcggttgtctggattttaaacggtgcgtgaccatacttgggcatcagtagtatcttggcctgttgcttttcagcagctaaacccttaagatatttatatacatgttagttataaatcatatagatgatgactgaaaatgtatttatttcatatcccatggagttcagtcatgatccaacaagaaaggaggtgggtacgttagggagtaaaatacaacctgtccatagaagactcgcatgacaggtgcttgggagctccttggaagatgagggtcagggaaaggaagaaagggaaacgatgcgtggccaccatggagtaggtttattggcacagaggtcatagggcaaggacatgtgaccacagcattcctgagatgttcaggaggaagctggtgagtggctggagctcagtagggggcggtcgagaagaataggatgaaggaacatgggactttaggtcaccacacagctctacttttgctccaagtcgagggggctggcaggtaatttttttttgtaataaccaatggtaaatattttcagttttgtgagtcattcggtctatgtcagaactattaaaatctccgtgttcagcctgcaactatctgtggatcgtatacagtgagggttatgatcatgttctaaggaagtataggacagtgggccggggtcaggcttgctgaatatctcgctccaacatggacagctccttgaaagttccaagcagagaagccacttgacatatcatgatagctttttttaagttatgtgtatgtatatatgtgtgcacatattcgaaccatgtgtatacctggtacactcaggccagaagggaacagaggatctcccgttacaggagtgacagattaaggttttaaaaagttatattctttctctctctctctgtctctctctgtctctctctctcctcttttgtgagtgtatgagttgtgtccgcttgcatgtaatgtttgagtgcagtgtttatgttgtgtgtgagcgtgttgtatgtatcagcagctgtgtgtgtgcgtgtgtgtgtgtgtgtgtgtgtgtgtgtgtgtatgtgtgtgtgtgtatgttctgtgtcacacagaggtcagagcacagccaaatactttgttccttgctggggtgcctttacccactgagtcatcctgggagctcaatactctttttttttttttttttttttttgatgaggccttattatgtgggcctgttggccttgagctaacagagatccacctacctctgcctccctgctgggattagaggcttgccatacccagtctcctcatgggcaccagtactctttaactgtagacctcatttgaattccttgctgttactgctatggtcactctgtttcggcatcccaggttgcatccagtcatcctgaatccacagtttcttctcaccgtggcagctccttaggaatctgtacagtcttatgagtcctggtcacctgtgcgatagcatctccgcttgaatgtctcacaattgcaccttagtcacagaccttgctgaggtgtcaaggcctgccatttgaaaggcacccactggcggctttattaaggatagggactgttgtcatgatccaggcaagttctggactaggctatcccactaggttcctgaagaggtgagtttatgaagtgatttgaactgaaagagtgctggggcctgtgtgggaatgtctgctgtcatctgcagatgagaggagacagaaaagctaggacagatcattcaaatgaagaagaagtagtcgccttttttttttttttttaatttttttagccttttaacttcctctttctgactcactatattacagcacacgaccgttttagaaactagtaaagctcacagaaatactgtggtatgtgtttgcctttgcttgaagtttaaaaagtgaagtatttatgtgggcagtagtactctttgtctcagagcagaaaacaaggttttttggtttggtttgnnnnnnnnnnnnnnnnnnnnnnnnnnnnnnnnnnnnnnnnnnnnnnnnnnnnnnnnnnnnnnnnnnnnnnnnnnnnnnnnnnnnnnnnnnnnnnnnnnnnnnnnnnnnnnnnnnnnnnnnnnnnnnnnnnnnnnnnnnnnnnnnnnnnnnnnnnnnnnnnnnnnnnnnnnnnnnnnnnnnnnnnnnnnnnnnnnnnnnnnnnnnnnnnnnnnnnnnnnnnnnnnnnnnnnnnnnnnnnnnnnnnnnnnnnnnnnnnnnnnnnnnnnnnnnnnnnnnnnnnnnnnnnnnnnnnnnnnnnnnnnnnnnnnnnnnnnnnnnnnnnnnnnnnnnnnnnnnnnnnnnnnnnnnnnnnnnnnnnnnnnnnnnnnnnnnnnnnnnnnnnnnnnnnnnnnnnnnnnnnnnnnnnnnnnnnnnnnnnnnnnnnnnnnnnnnnnnnnnnnnnnnnnnnnnnnnnnnnnnnnnnnnnnnnnnnnnnnnnnnnnnnnnnnnnnnnnnnnnnnnnnnnnnnnnnnnnnnnnnnnnnnnnnnnnnnnnnnnnnnnnnnnnnnnnnnnnnnnnnnnnnnnnnnnnnnnnnnnnnnnnnnnnnnnnnnnnnnnnnnnnnnnnnagagagagagagagagaatattaacccactcagtcaatctttttcatgggagagccgagtctgtttccatccacagcactcactgatctgtaaggattccttctgccatcattctcgtggttttctggctcagctggcactgtgttctatattactgcctgcctttgtggttttgtgcagttgagcactctgagcactttctgattgtgtttcctgcctcttctgaagagttttgctttgcagtctctgtgaggctcccatagaacaacctgacagcccgacgttggcggtgcgcacacagctctacgcctttgccccgccacacacgcctctgattggagtctttccaccattacctggtgtttcctggatgctttgtggtcactatggtcaataaactttgtactgagggctgattgctttaaaaatgccagcacagtcctagagattgcttcatgtgccatttaccaccaagtttgctctttgatatcttatgtgccttaaaaaatgtgtatgggggctggagagatgccccagcagttaagagcactgactgctcttccaaaggtcctgagttcaattcccagcagccacatggtggctcacaatcatctgtaatggaatccaatgttctcttctattgtgtctgaagacagctacagtgtacttgtcatatacataaaataaataaataaaatctttaaataaaatgtgtatgggcatttgcctgctgctatgtctgtctactacttgcatgcctactgtccgaggaggccaaaagatggtgtcaggtgccctaggactagtgacaggtggttatgaggcaccgtgtggttgctgggaatcaaagccagggcttctggaagggctggcagcactctgaaccactgagcccatctctccagcccgtaatgataggaggactttcatttcagctcaaagaactttctctagctagtgctctaaagtgatggacttgggtcccacccccgtttgtttatatagagtttagacaattgtactgtgcacagggtatgggtgggcatgcttgagccattgcacacatggcgaccagaggacagcttctggggatgggttctcccatgagtccgttccccttttgccctgggaattgaactcaaacgtggcagcacattgccttaccaatgagctaccttgccagtcctgtttctccannnnnnnnnnnnnnnnnnnnnnnnnnnnnnnnnnnnnnnnnnnnnnnnnnnnnnnnnnnnnnnnnnnnnnnnnnnnnnnnnnnnnnnnnnnnnnnnnnnnnnnnnnnnnnnnnnnnnnnnnnnnnnnnnnnnnnnnnnnnnnnnnnnnnnnnnnnnnnnnnnnnnnnnnnnnnnnnnnnnnnnnnnnnnnnnnnnnnnnnnnnnnnnnnnnnnnnnnnnnnnnnnnnnnnnnnnnnnnnnnnnnnnnnnnnnnnnnnnnnnnnnnnnnnnnnnnnnnnnnnnnnnnnnnnnnnnnnnnnnnnnnnnnnnnnnnnnnnnnnnnnnnnnnnnnnnnnnnnnnnnnnnnnnnnnnnnnnnnnnnnnnnnnttttgagttttgatagttggggttggatttcactggtggctgcttctgcccagtacatggatgttggcataagcactgagatgcttagtttcctgagacagggtcttactgagttacttaggcaggccttgaacttaggcagcctccagagtaactaaaatcatagacctgaatcaccatgcatgggcagatttgtttctgcttattcttgtgaattaacagccatgtttgatagatctttctgtagaattcactattggaactgtcacaacttttgccaggggggtggcagtggaaaagcccgcccctgattcctctgtccctggagtttttgtggcttggaaatagctctctcttctggccattctaggtgttgcttagcagggatgaacactatttggactggcatgagagatctggtaacagtgtggacaaagttgctagagtctctgcttgagtgccttgcaagttggtcctgtggcaacttctggcccaagcactcataatcgaactaattgtaatctgcagttggagaagggtgtaagccgagatcccagtttaggcagagctgctgttcagaatgagtgggcagagagcccgtgctcctcaaaaatgtgtgcttgaagatggcttccagggtgtggctgtggtgtggtttggtatacactgtctaagctcatacagctgtggcccagaactactgtgtagagtgtggggctgggactcttgtccctgggcaaggtctttgtaaggctttttgtctgccaggagctgctgctttggctgctgggggcaagcatatctgctctgagatagggaggtgagcgtctctctgttggggtagggctactggaatgggcatgaagatcagctgtttagggactcaggctaagctgaatttcctcagtgctttgtgagcaggctgccatgccagctgttagatcaggtgctgcagacggcagttacacagaggtactgccaccatgacagcatttgccactgtgactccacttcctttctctgagtccacctgtcttggctgctatagttattacagccagtgtccccaagatgagactagaatgggcctcctggaacatttctcaagatgctagggcatctagattcttctagagaatggaaccttgggacctcctctccacatggccttgggctaaaggaggggccacatttcagtaattctccaaatgttgggatctctgagattgccagttgaaattttcctggtggagaaaggagcttgctgcttctggctcctgctgatgttctgccctcttaggacccacccttgcgtgtgtgtgtgtgtgtgtatgtgtgtgaatgtgtgtatgtatgtataggtatgtgtgtgtgtatatatatatgtatatgtgtgtatatgcgtgtatgtgtgtgtatgtatgtatatgtatgtgtgtatgtatgtgtgtatgtgtgtttatgtgtgtatatgtgtatgtatatgtgtgtatatgtgtatgtgtgtatatgtgtgtatgtgtgtatatgtgtgtatgtgtgtatatgtgtgtgtatatgtgtatgtatgtatgtgtgtatatgtgtgtgtgtgcgcagcttttgtgtgcccaccctgaggagagctgaaacgcccttgaccttgctcattgctggatgctcagcatgagatgctgtttccctgatgttttataccttgctttctgtgcgatccatgttatattcagccgggtgctgccatgccaagtgttagaactgttccgcagcccgacatggaaaacccactcctctgtttccctcagcctgagccagctgtcataaatttacaagatatttcttataaatgcagtttgtacactatatatggtcctttgcatagtggtttctcttacataatgtgtcttcaggattcatccacatttcaacacatagaagaaatatcttgttttcagttgtttgattgcttgatatctttccttcttttttttttttttctcccccagcaaggttttgctatgtggtcttatctggcttgaacctttgtagactaaaatggcctccagcttacagagatccacctgcctctgcctcccaagtcctaggtttaaaggatgtgtataagccagaggtcaaagtcgggtgtctcctctgtcacactccaccttagctttagatgatgatggtggtggtgatgatgatgatgatggtggtggtggtgatgatttactcagtgttatgcctgcatgtatgtctgcatgtcagaagaaggcaccagacctacctcattatagatggttgtgagccactatgttgttgctaggaattgaactcaggacctctggaagagtagccagtgctctcaagctctgagccagagccctccaccgtagcttttaaagacaggtaggttctgccttggatcctggagctcactagcctggttatttcgtgaggccggggttcgtcctgccttctcacccccagcttagggatttggggaaagtgctgctgtacctgttcttccaccccatttcggggatctaatctttgctccttgtgcttactgactgagccctctccagcccttctttgccttttatgcctatttaattctcttctgtccaagcatcccattcctgggacatgcatatcccagttttcaattcacagttgagtggttactcttctttcatatggtttccatttgctgtttaaaatgtcttaggcaaacttagtgagcagctctgagtgcccatccctatgacgccagccacagagggaggggccggagtcccactgaagaggcctggctaatggagtccagtgctttcagactgctcacgggttcagctttcttcagaggagtcccaccccaccccacaatctccagtagataccagaacggttcagctctccatcccaaaggacaccagccacagttatttaaacacattttctgtagatatgttaataggtaagggtggtgggaagcgttctgtgtggttgcattttgtattgcccataaaccagcttaaagctcacataacgtaacagacctgtgttcacaggaaatcggtggctttcggcttcagatcaacctgccaggagcagagggttgcctttctgtattcctttgcttgagctagccatatcaccatggctcttcaagtatttgtcaacctgagtttcaggatgtttctgagtacactgtggtctatgtaagccatgcttggttacagtctccagaatcatactctcagatactcttcagtcaagcatgtgggtgattatttaagaaagagtcactgactgttggcctgagccaacaggggagaggattaataaaagctggaatccagtcaacagaaatcaaagttaaattaggcaaaaactattagtttttaatgagatttttttccttgttaagctatttctttttacctgccagcattagatgcttgacagtctttataacatagctcaaattttatatatcactgttttctcttaatagttgacaatatttgagttgtcactgagtttcaaatggatagagagttgtgctggctagttttatgtcaacttgacacaagctagagtcactggagaggagggaccctccaataagaccagactgtaggtaagtctatggggcattttcttagtgactgatgcatgaggtctcaacccattgtgggtggggccacccctgggcaggggatcctcggttctatacgggagcaggctgagcaagccatgaggagcaagccagtaggcagcatccatctgtggcctctgcatcagctcctgctcacaggttcctgctctgtttgactttctgccctgacttccctcagtgattgactgtgacctggaagtgtaaactaaattaacccttgccttcttggtttgcttttggttgtggtgtttcatcacagcaatagtaaccctaagacaagaatatcagatttttcaggtgtttgtgtatttgtttttgatggtgctgcaaatcaaacccagggcttggttcatgtaaggcaaaggctctaccattgagctacacccctagcctagatttttaattgcttataattgaagcataccctttattttaaactgtggttatcctctcctgatttgagttttcagtatcaatataataatacaggatgactctactttttattatataggtttattcaatatagtctctaaggtgtcttccccctcgccccccacccttaatagaagagaaaaaaaaagctgagaagcaacacaggtgtagctgcagaggtgaatcttgagtctcagttttggtttcatggttctgcttaccgcccacaggctgcttccctgctgtgcacacacacacttaaaggctcagatgcttcgggagaacaagaagtgcttcatgttccctttttttatatttttttattacgtatttttctcatttacatttccaatgctatcccaaaagtcccccataccctccctcccacttccctacccaaccattcccatttttttttttttttttggccctggcgttcccttgtactggggcatataaagtttgcgtgtccaatgggcctccctttccagtgatggccgactaggccatcttttgatacatatgcagctagagacaagagctccggggtactgcttagttcatattgttgttctacctatagggttgcagttccctttagttcattgggtgctttctctagttcctccattgggggccctgtggtccattcaatagctgactgtgagcatccacttctgtgtttgctaggccctggcatagtcccacaagagacagctatatctgggtcctttcagcaaaatcttgctagtgtatgcaatggtgtcagcgtttggaagctgattatcgggtggatccctggatatggcagtctctagatggtccatcctttcgtcacagctccaaactttgtctctgtaactccttccatgggtgttttgttcccaattctaagaaggggcacagtgtccacactttggtcttcattcttcttgagtttcatgcgtttagcaaattgtatcttatatcttgggtatcctaagttttgggctaatatccacttatcagtgagtacatattgtgtgagttcctttgtgattgtggttcatgttcacttttaatcaactagtaaatcaagttgattagatccagtggttgaacataataaagcgtacatgtttgcttactgtaatagtacctcaggacatttagaggtggtgtttcatagagcaagtgtctaaaacattaaaatggtatttccagtgtgtgattcattatttggcccactttgagtttggcattaaaagtgaagtaagaggctggagaaactgctcagcagttaagaatactggtgactcttcctgaggatccgagttcagctcctagcattcattcactccaaggcttacaaacatctgttactccaattccaggggaactgatgccctcttctggcctccaagagtagcatggacgtgtactatacataccacacacacatgcacacatacatacatacatgcatacacacatacacagcacacacacatacatagcccccaccccccacacacacagaggcagggtaacacacatacaaatctgttgtaaagtgaaataaaaaccatacttttctctctctcccagacagatcttgattatgttaacagcgttgttgccaacctggagaaagagtaagttttctgaagtgaggaagtgaaactgttctcaaagctcttatctttggctttctgttaaaaaggtctttgctttctaattcatttctctgctcattagtatcattgccatttatgttctcattacatagctgtgcatgcatccacatgtctggtgaggaagttggttcattccactgtagcaaggctttgaatagcctctgtaaggagcatgtctttagtctttaaagtgaggagagagttacagttgggcagaactgtttgagtcttccacggatgctcgcctagcaaacttgatgtcaggacagatgttaaaatgagccataccctaagcatgcctttctgtcctgtcaagattggagcccagggcactgtgagcaggggacaggtgcaaggctcagggagttttaggcattgctgtgttatatgctgttcacttgctggtgttaaagttagacctgatgggtttcttccgtgaatttcatctggttttacccctacttgacaagaaataacttagggaactggaaagatggtcccgtggttaaaggtgcttgcagatgttgcagactacccgagttcaggtcctttgttcaattcatcgtccctgacgcccctggtaccacctcagggagatctgtcgcctctgcccaccaagacctcccttctcctcccctccccgtgtgataaacataattaaaaataatagggctgacgagatggcccagtgggtaagagcactgactgctcttccgaaggtcctgagttcaaatcccagcaaccacatggtggctcacaaacacctgtgcaactgaagacagctacagtgtacttataataaataataaataaatctttttaaaaaaataataaagatacttagaagagactttagaagctgtagttacttgctagctacacacttaaaataatttctccttgtcagccaaaacatgaaagctggagatttaaaaagacgctgcacatacttcagggtccagttatcatgtgtttataatatccttaagtgctctactcttgtcaggctgtagaggcaggctggcagaggctccttaaggcagcgtgataatgacttgttcctcttcccatgagcctccagggcagtagattctacaggcttccttcatgtgcggggagagcaaggccagaaagagcaatcacaggcactagcagcaaggccagcattccaccagctccgagggaaggtttgcaagaatgtaaaagaaaccacatttagttagtgaaaacggactcaagagcctcagaaagggtttctcagcccaggctccactgatcaggtgaggcgattcttggttgtgggctcttggcataataggacgtatgtcaggacccttggcatctgctcattagatgtcaggtgaattgtcactagttgtgacaaccaaaatatctccaggccccactgaatattcccaggagggataaagttgccccgagcttagaacctggattggaatgacatagagcctgcagcctacaactaaagcttccgaagactaaagcgcttcatggctttacatttgaaaacctcaggttcattcattagtgtatgcacacacatgccgtgatgtgcatgtggaggtcatagaaacatttactagtctctagtcctactgtgtggtttacgggcattgaactcaagtctgtccaccaggcttgagggcagtcacctttagtgactgaaccatcttaccagcccagaaaaacggaagagctttgatttttcataaataatatattttggataagcatagagattcatttgcttcccccctccctgagttccctgctttctgtgggaccttgatttgcttaaatttgaaaattgattgcttgtaagatggcactgcctgtagtttacctagggtttctgctacggttacatcagtaaattaagcattaaggcaagtgacatcccacagagctgacataatacagctaacctttctcttggtagattttctagagaaattagttctggcctgctggaaataatctctcctcctgaaagctattaccccgacttgacaaacctgaaggagacgttcggagactccaaggaaagagtgaggtgagcgacagagatgcacacttagatgtcaggctgccatggtgcctgtcggtttcagggtggtttaaaagcattaacacatagtattcgtttctgtttgcattccttctgcattatcactctctagcagcattcaattcatagccatagaccctggcctcacgttcctaaggcagacttttcgaagctctagttcagggagatgttacgatattcctgaagaaaaggcttgtggatgaaacagtctggaagatgctgtactgtagctcagtagagcaatagccaagcatgcatggaaccatgggttccaccctcagtaccatagcaagtgtgctcaccgctggatgtgttagcaacttctatgctgtgctgtctctagaaggggatgtgtgtgcaatgttgaccaaagttccttcagtggagagcctctgtgcacggggtaactggagggttagtcgtcgtcgtcttcttctttgttttttttttttttttttttttttgaaccatttctttgaagtttattttaatggaacagctatttacttttgcatccactgttttgcaaccctctcctgtctacatgttaacagccttagagatgctaactagtcattagagatggagtttttctggtgacatagggccaaaggacatttaactcaagctcattaagcactgtttgaataagtgtatttggtggcactcttaaatcctccccgttttatgtatgtgaaaaaataaaacaataatcaacctaaaatatgtgagggggtttcaaggagtctttcttttggtggacatctacaacaagaaactgttggggaatatggaaagtaaaggctattgctaacgtctgagaataaggtgataggacatgagctgcattctaaagagaaattcccctgggatagacaaagttgtgcatcaacgtggccacaaactcattgactacagcctgaaatggtagccaaatcacagtggtcactgatcataatttgggagtttcaggtaagttgtcatttatgatatatcttcaaagtggcaattaaaaaatgatacagccttatattgtctttaatatgtctaatatctactaagaaaagtcagtatgtcagtggctatcttaggcccaataaaattcagtcctgataaagggcaataaaataaacccagttatcattaagaaaaacaaacaaacaaacaaaaaaaaaccttgggctggagagatggctcagccgttaaaggctaagctcacaaccaaaaatataagggttagtcttcttaagatgcatggtgatagagactgcactggaggaagccgctcttggaccgtctctcacgtgtgggagtttatctttgtgtgttgcaatagacacgagggtcagacatctgatctgagtttgctggttttgagtctgagtcctaacgcattctccggtgctgttcatttcagatggagaaccaagcaaaacctggattactgttttctgatgatgtatgctcaggagaagggcatctactacattcaggtgagagtcaggggcttctcagggtgttttgggttttgtttcttttgctcagcttttatatttggtgattttaatttttttttaaagtaaaatacatttattaaaacagaaaaagaaatttacttataaaacatttgaaatgggaaagtcaggcatacatcactcaaaatagattttgtattttgtatatcgtttgatgtttgggttcagaggtctatgttaaaaacgttcacgtggatacggaagacaggacggtagattagagagcatctctcctggtctggacgtctcttgtatttgtgtgtatatgtcgtgtatgtgtgtgggcttacttgtacatgtgtgagcttacttgtaagggccagaggtcaatgttggtgtcttcctcagctaatctctatcttattttttgaggtcgagtctcttacagaacctggaacttaccagttcagctagcatggagcatggctgactagcaagtctgagagttccccctgccagccatgactgcctttttgacatggctgatggagcttaaacacacgtagctgtgcttacacagtggtctggcctcaaacttggggttgtcccgcttctggggttataagcacatggtgcttgttttcttcgatttctatcagtaaggttttatagttcgcctgggataagcattttagccttttagccttttttttttttttcttttttctttttagcagtctcctgaatgagattaaaatgattttttgttttggggttttgttttttgttccttgggggaggggcattttttctttttttgtttgtttgtttgtttgttttttcgagacagagtttctctgtgtagccctggctgtcctggaactcattctgtagatcaggctggcctcgaacttagaaattcgcctgcctctgcctcctgagtgctggaattaaaggcatgcgccaccactgcccagtttacattttgctttttcaagacagggtttctctgtgtagccctggctgtcctgaaattcagtctgtagaccaggctggcctcggaactcagagatctgcctgcctctgcctctctgcctctgccttgccagtgctgggattaaaggtgcgtgccaccacaggctgccagtttgagattaaaatgaaatttgagttggggcattggttattgttactgggtagaagtgattttttttgtaatgttgctcaaatcatttattatttataatgtattttttatggcattatataaggcatctcagtattaggagacaagaggatctgtaatttgaggccagcctgggctatgacaaggtccaggggagcctgggctgcgcagggaagccctgcctcagtagggagcacacttacactgtgtgtgtgtgtgtgtgtgtgtgtgtgtgtgtgtgtgtgtgtatgtgtgtgtgtaagaagcaacacagttagatagcaaattcattgtccttggatgcttttaactcttggatgtctggctccaactggggtttccagttctgctgacagtgagaagcccttcctgactgtgagccgagggatgcttttgattttcacctcaggggaattcttcctgtgttgttttcttgggagactgagaacaatcagttaaatctttaatgttactcagaatttttcagtgaagttctctggtcctggacttgctactctgcttgcaaggaagtcacagagggtttatgttggtatcatcatcctcgacagtgtcttatgtagcccaggctggccctgagcttagcagatagccaaggatgatccagaacccacatcctgaatgttggcattgtgggcattgactgccacacagctttatgtggtgctggggataaaacccagagtttcatgcttgtcagacaagcattctaccaaccaagcaacatcccagaccttcaagaagttttttgtttgttcgttttgcttttctttttttctgaagactgtagctgtcttacgacacacaccagaagagggcatcagatcccattacagatggttttgagccaccatgtggttgctgggaattgaactcaggacctctggaagagcagttactgctctaagccactgagccatctctccagtccctatttgcttgattgttatagccacgtggaaacttatttttctgttcttcagtgtgggtgagttgcatctttctaggaatgtattttttcttctatggctagttcagatcactgtcacataacctgtggtcgcctctcataatgtttaatgcttttactctgtgacatgagttttaatgttctctcctgtttaattttgagtcctctcttctcctgtgtgactcataagttttgctcgcatatttacagaaacatattttgtactactgattttttttaaatactcatgtgtttcaattttctttgtatgatttttgtagttacttggaacatagtagggttacagtctgactgcttaccctcaattcaagccatggaagttacctttgctttatctgctccccctaccttgttattgatgcaaatcatctctttataaacttttttttaagattaatttattgttatatgtaagtacactgtagctgtcttcagacacaccagaagagggcgtcagatctcattacagatggttgtaagccactgtgtggttgctgggatttgaactcaggaccttcggaagagtagtcagtgctcttaatcactgagccatctctccagccccactttagaaacttttttatgtgtctcatatcctctaggctgaccttgaactcctgacctcgcaagtgctgggatcccatgctaggagagccctgtgtcagctgagccccgtacctctgtgtcccctgcctcttttcatattgcacatccatgggtgtaagtgtgtgattgctttgtgtgctttgggttatggtgtcacccaaacgtctgtctggttggtatatattgttgttctccctatggggttgcaaaccccttcagcatcttcagtccttcccctaactcctctattggggaccccacgctcagtctgatggttggctgcgagctagtggtaacaggtcgggggtgtcacgcctacccttccctttatccgggtcttttgtctgggaggagctgagacatgcttcacagttgctgcttctggaatcctctcttctctggactcgtgggtagaaccccagtgcgattggctgatttccactctggtgtgtgcacctccattctttgaggatgtgtgtgggaatcctgtgtctctctgatggagtgttcctcagtgctcatctgtggcactgcagttgctgtcaccaagtcttggcctttactcctggcctctggtgagtgcctgccttgttcctatccatgtttgaacaggacagaaacaacagcactgtcaggacgcagaccagagagtcagaggccagagagtcaggctccagagacttggaactaatgtctctggtgagggggggagccgggatgcccaggggagggctctggctgttgtatgctctggctttaaagccatgtttctggggataaaggagggtcttgagtttgcttttttgctgtcttgctgatggcttaaatctctaacaggaaagcacatacacacacacacacacagcctcaaaaccagtcctcttatcacagcataatacggaaagctttaaggtggttttccgtcatttcttggagtaacatgatcctgtgctatcatcctttgttggtcatttagattgtgtctaagtgttcagctctccaaagattaatgatgtttttctgaaaatgatccatttccccaaagcttgttcctcaggaaactgggttgctgtctattctgatcttcataattgggcagcaggagactcctctcagtgagtccgtcgccgtctagctacagaggattaggacagaaaccacactcgcttcaaaagccttcagattgagggcttggaatgtttgcaagggaaagggatggcttagggagagccaaggaaaacagggccaaagacagggaatcaaaggaatttctctcacacctcagagatgttccctagggctgtgcctccatggttgcaaacctggggctttcgaatccacagcttctaaagggtgcttgtgggcaggaggtggtccaggggagagtactggccagtcctcatgccaccctgtattcatttcccagtgctggaaaaatacaaggtacttaaaagaagagcagagccaggccaattgcattatcaaggatttatgcttaaagaaaataccaaccagcctggggttatgcccgtgggctgggctggtttacagtggcctggccaaaccatttcttgaagggctgcgttacccagcatcagctcatgctctcatggtaggtgacccagggctccgacgcctctcacaggaatttccctcattcactatgatgtttaaccttcagatttccactcaagggtcacgtttttgtggacatttcctgtctcagtgttcccaaagtgctttgcatatcccaataatgatgcaggcaagcgtagggaatagtttagcgatctcggactctgcttggtttgagcatacgctcctctccaaatactgcctgaggcacttatctgcacatatttgcacacaagctctttccctaacactgtaccccagaacctgtgagcaacctaggaccccaacctgctgtatgcacaccccacagccacagtgaagtaagttccttctcctcttcaacagattctatccattcatactcctaacagagaggttggtctgagctgaactgttttggggtgcatgtacagtaaggcaaaactgtgtcctttttggagggggttcgggacagggtttctctgtatagccctggctgtagagaccaggctggcctcgaacttagaaatccacctgcctttgcctcctgagtgctgggattaaaggcgtgcaccaccactgcacatgtgccggcatgaaactgtgtccttaaaggaaactcttacggagagtcccctattcacatctgagacctgtgcataatgcggcatgcacataattaaagtcagacacatcatgggacagggcgtgcacagtagagaaatgactaaggaccttaatctgttgatcaaaacagaactacccttgctactcccttcggcaaccaaacttctccttttcatgtatcccataaaggcagccccaggcaataactggagcccttgaatatcttcactcatgtggccctctgccattcttgacagagaatttctgatcagcggtatcacttagctttgagtaaaatccctttgatactttgtatatatatttaaaaaaaggcacgaggatgggggaacgggggcggggggggggtgctctattgcaagtgacttggagtgtgctgattgcccgcaggaacagtcactgacaggtgctgctggtcccatcctgccctccttactatatcccaccccacgtggtggctcctaactcctgtaattccagttctagggggccagtgccccttctcacgcccatggactcctgcacacgtgacacacttaaactcatgcagagacacatacatatgcataacaattaaaaatatatatgtaaggggcttctaggggtgtggctcactagtagagcccttaccttgcttgagctgggccctgggttctatccccagtgtgtgtgtatgtgagagagagacagggagacagagagagacagacacagagacacagagagatggagagacaaagagagagaggcagagagagatggggggagagacacaggcagacagacagacagacataacatagaaacagacagagacagagagacagaaacaggcatctgcatcaatatagaaggtgtcaaatgggcacttgcccagctttcatgttcctctcatcttgtcaggtggagggaaggtgagggaagacgctggctttcctttgacctcatcacgctagggagttgatccactagagtgagtgtatattttattttgacagcatctggttttatatttttattggttttagccatagttttcatgatttctgtgagtatgtgtgtgtgtctttgtccataataatgatcatttatccttttccttccccttttgacttttaaagatgatggttcaattttcttttctagcttgaagacgatattattgtcaaacaaaactattttaataccataaagaattttgcacttcaactttcttcggaagaatggatgattctagagttttcccagcttggcttcattggtaagaagagcatttgatgatttatctatttttataaaatagctaagtctcagaatcttaaaccaatcgcttcccctccctctccatcaaaagttgccttttcccagggaaactgagtagttttgagaaaactaaacttaggtaaatttccttatgcagatgatgatggtgacctcagtagactctgacttccaaggtgtagcttgttgttttgtaacaaaatttcagttgttcgatgtgaccagtgaagactcaggagccagatacctgctcggagagagcacccagctgagcttcctcctcagctgacatcccaccaggaatctccatgctcccctctccttcctgtgtgagcctctacctgttgcctcagctccggcttactctgaatggttttttccaatattcacttcctgtcaactggatgcttgccctatggctgactttatttaatcttgtttacagtattcaagcagaaggctcttggattaaaggtgtgtgctaagactgagccacactacaacggaaaacaagttttccagtagatagggcaatctcagggttcgcagtgttttcaaacatcttgcaacagccggtcctctagagagccgcaccatggctgccgtggagctgggagcatgtctgcttcttctctgacacctccagttcccttatgctaacagcactgggttcatcacggaagggcagcactgatggcagctcactgatggcagcgatgacttcatgttcatttgtttctttcatgaattatttggggtgcttatttttaaagcctttgaggggacagtgcccctacattcaatgaaaaagaaaaaaaaaaacatgcttgaagttgaattgaaagaaattttcggggcttaaaaatagcttctcaagccaggtgtgatggtgcatgtgtgaaatgctgtgtgtgatgcccgcatttgagaggccggggcaggggatctcacacctgagaccaggatgggctgtcatgagatgctgacttacaaatgcaagcgctggggtgcagcctagtggtaggtctcttatctagcctgtatgagagagacctcaggttcagtccccccccccccacacacacacccatgctataggctctgtctctgaccctgtttatcctttaactgaaaacatgttttaagattcagaaaaaaaatattgtgaaagtttcagtaacaacaaaattagtaagccttcctcctcctcctcctcctcctgtatctggtcctcctcctctttttgtgtttatcaatttagatctccatctttcccacttttccccctacccttccccttccccttctccatctccttccccctccctttctttgaatgaatttagggtcttacccatgctagacaagtgagatcactgaactgtattctcagccctacatacattttttaaaaaaaaatgtaaatctctcaaatttctatttataggagtagtcttactaagataaggggaaaaaaaaacctgacttgatttttgaaccctttaaacaattttgtgttagcctttgtagcagcgaagagtgggagttggctacttccgtctaaactcccgtgacgagtcaagagactgtccggctaaagcgactctgttctgatgatgcgagtgaaacctcagtaacatcagcacacagaggtcacttccgttgtgacagctctcgactgggatgtcttttcaggaaaaatgttccaggcgccggacctggcgctggtcgtggagttcatcctcatgttctataaggagaagcccattgactggctgctggaccacattctctgggtgaaggtctgcaaccccgaaaaagatgctgtaagttgactcttcatggggtccagggggctcttttcttttgagacagggtctcaccgtgtagccccaggatagcctagaactgaagattctcctgcctcagcagccacctaagtgctgggattacaggcttgtgccttggtacctggcctgggagtttcttttctgttttgtttatgaaagtaactttgtgatccatccaatagctgactgtgagcatccacttctgtgtttgctaggccccggcctagtctcacaagagacagctgtatcagggtccttgcagcaaacgtatgcaatggtgtcatcgtttggaggctaattatgggatggatccctggatatggtagtcactagatggtccatccttttgtctcagctccaaactttgtctctgtaattccttccatgggtgattgtttccaattctaagaaggggcaaagtgtccatactttggtcttcgttcttcttcagtttcgtgtgttttgcaaattgtatcttatatctcgctatactaagtttctgggctaatatccacttatcagtgagtacatatcatttgagttcttttgtgattgtgttacctcactcaggatgatgccctccaggtccaactatttgcctaggaatttcataaattcattctttttaatagctgagtagtactccattgtgtaaatgtaccacattttttgtatccattcctctgttgaggggcatctgggttctttccagcttctagctattataaataaggctgctatgaacatagtggagcatgtgtccttcttaccggttgggacatcttctggatatatgcccaggagaggtattgcgggatcctctggtagtactatgtccaattttttgaggaaccgccagactgatttccagggccccaatggaggagctagagaaagtatccaaggagctaaagagatctgcaaccctgtaggtgcaacattatgaactaaccagtaccccggagctcttgactctagctgcatatgtagcaaaagatggcctattcggcgttcactggaaagagaggcccattggacacgcaaactttatatgccccagtacaggggaacgccagggccaaaaaatgggaatgggtgggtagggaagtgggggggagggtgtggggggacttttgggatagcattggaaatgtaattgaggaaaatatgtaataaaaaatattaaaaaaaaagaaagtaactttgtgtgaagcagatctcactaaggtgttaaataaattaatcaaagcctcagcatggaaatggtttccnnnnnnnnnnnnnnnnnnnnnncctcctcctcctcctcctcctcctcctcctcctcccttccctccttccctccatgtctctgtctctgtctttctctgtctctgtctctctctctcttgatggctcagtggtagagttccttagacagcacacatgaaagcccttggttcattctccagtcatgacaatgtgtgcacacatatatgatgatgcatttttaaaggtgtttgttttgtcttgtttttttttgttgttgttgttgttggttttcgagacagggtttggtttctctctgtagccctggctgttccagaacttgctttgtacatcatcacactggcctcaaactcactgagatctgcctgccccccgcctccagagtgctgggtgtttaaaggcaggcaccaccaaacctatcatgtattttaaaaaaaaatggtagaagaccccttaaagcagagcccctttctaagtggtggctccctggtgcatagtcgagaagaaacactggtggggtcttgaagcgatgttgccctgttatcaaagcctgtagatagctgtcggacctggcctgtggaggatgtactgttttcttccagtgctgtttgtggtctttgtctgactcctttggcctagtgtcagaccccagcacacctgaaagtagtagtgatgtcaatatgccaactgacaggactctcggtgtctgctttgcaccttatctttgaatagtaaaatcagatttttttttttttaatgtctagaaacactgcgacagacagaaggcaaacctacgaatccgcttccgaccctccctcttccagcacgtgggcctacactcgtctctgtcggggaagattcagaaactcacggttggtgatctaatgtagttttgcctagctgcacaggttgctgtttagtgtgcagatgagctatgtgtgacatcacggcccatgtgtgtcctcctaggataaagattacatgaagccattgcttctcaaggtccacgtgaacccgcctgcagaggtctccacctccctgaaggtgtaccaagggcacaccctggagaagacctacatgggggaagacttcttttgggccatcacccccacggctggagactacatcttgtttaaatttgacaaaccggtcaacgtggagaggtcagtgactgggggatacatttttcctcaaatccagacctgcttgtagtatggttcctcaaaccatgtgctctgtgcacagtagattgaggagagaggaggtggcaagccgtttggttatgagttaatttcacaccgctgagtaccagaaatgcgtgtctgttcgggcatgccatctattctgatgttctggatacattttgtcaagtactgcattgtatgtgtgggggccagagagcatgtgggaatgggttctctccctctaccttgtgagtgctgaggactgaacctcgcccttcattcaggcttgataccaagtggtctaactgctgagccatcctactggccttctatttggtagattctattatttctggacctgaacttaatcagtaacttttgttactctcatttcggtgtcttcctgaaacctcacaatttccacgtctctttcttaggctctctccgcacacagggagagcaggttattagaccagcagctggttaaactggatgacggtcctcgtcagcgtttctgctggtgcaggccatctttagcatcccatgggcgtttgcagcccttttaggttttgtgggactcatatccattttataaaatttgagactgttttcttttttaaataatttgatatccatggtcccttcagctctcctctgtttactaaaaccttactgtgcagacttactgtgctggagtgcacgcctaggcgcgtacgtaggcatgcctgctgactgtaggctgtacttggcatctggctacctcgcggacacagaccccatctgtggagttgtaattttggtgtgacttgctctttttattttgtgtctgcacatggaggccagagacgggcctcaggcttcttcttgctcaagcccccctcctttttttttccttaaaggcaggatatcttgctttttcctaaaactcactggtgtgactaggctgggttttttacacgggttccggggaattgaactcaggtccctatgcttggataacaaagattttcaccaactgagccatcttagaaatcccaattttgaattttgccagatgcacttgcttggtcagttgatgtgattctgtggttttttttagctgattagtatgatggctaatactgagttttgactatcagactggtcacgcagctctagaccccactctgcattaatggtgtataattatttgtttgtttgttgaggcagggtcttactatataactgtatagttatggctagcctggaactcacagtgtagaccaggctggcctccaactcacagaagtctgtctcctccgaagggttaggattaaaggcatgtgccactacgcctagctactgcgaggcatgctttgtgtgttctagctggggactgaacccacggctttgcacatgctggccgtgtgctttaccactgctccaaactcataaccctgaaggtaggctttgaacatggcatagcccatgactgtcctcctggaaattctgactcaaggcactgctccgtgatgaagaggaagctggtacaaacagtcagcctgtggtcagttctgtgtctgctgagtgttaagcagcaagcatgatggcttctgatggggatgatgcgaagcccggggctgcatccttcagtctcagtttctgcagcgctttcgagtcagctgggtggtggcaggttcgggtatgatcagcctgtgccttcagaaaccttccaagagctcactctggggtgaggctgtgctcttgggtcttttacactcaggtctgacttgtgctgttcattctttggtgtgtatttccagttatttgttccacagcggcaatcaagagcacccaggagacatcctgctgaacacgaccgtggatgttctccctcttaaggtacggcagcgactgctgcgcttggggggggggggggtctagttacatttctgttgctgggataaaatgccctgacacaaagcaatttaagagaaagaggctgggctggagagatggctcagcagttaagagcaccaactgttcttccagaggtcctgagttcaattcccagcaaccacgtggtggctcacagccatctgtaatgagatctgatgctctcttctggtgtgtctgaaaacagcgacagtgtactcacattaaataaataaataaataaataaataaataaataaataaattgagagagagagagagagagagagagagagagagagagagagagagagaagaggagaggagaggagaggagaagagaggctattttatcacacaattccaggctctagtcatcagtgtggggaagccaaggcaggaactttgaatatcaagttacatctacccgcactcaagagcagagagaaacgaacacatgcatgcttgtgctcagcttactttcttcaccctcacacatggcttgggaaccatttaagggcatagggaatggctctgcctccggtgggctgggttttcctcattaagaaaacttcctacagatatgctcacaggccaacccaaaatagcccctcactgaggctttcttcccaggtgatctctagttgtaccaattaaagccagttgtcacaatggatacttagaggttgttcttattagatgaacaaaaactctcgtgtggtataggactttaatggtgggtggcagtattaagtttataatgttgaatacctgatgttgttttatttgtagtcttcattctgctttctactggaaaataatatggctgtttgtattaggaaaaagtttcatattttagcacagtgtctacagtgtcttttgaatcccatgatgccaaatgcacattgagtgcctgatgaacggggcacagttaattcactgctctgtaaggaacacttagatcttctgaacatcttttatattctttcagcatggctgaaataacttctaccaacagattttcagagttcttcactgagatgtcatttttcttcatggctatgccacaaacgcaactctcacaaagttagatttgatttaaacagggttaaccactcatacaattgttgcctttgtttgattttagagcgacagtttggaaatcagcaaagaaaccaaagacaaacgattagaagatggctatttcagaataggtaatgtctacttaataacacagcccttattgcctggactgagccccaaagttgttacaaatctttgtcaaacattaagttgacaattacagcagcatgcccagctgtcctgttcccttggccagactgggtttctgatcgtgacagggttttgcatacagggggagggctgggaggggttcctgtctggttggcttcctctgtcacctgtgccatggctatatctcagtgatgtggagttttccattgccgcctctttctgtccacctctttctggatggtcttcacggacttctgaccctcgggggggggggggtgtatgctgtctttgttggggtgctggctgcctgacattggcacctgaagaaccttggaggatcttaggggtggtaaatggaatcggggttcagctaaatgtgtaatggggaaaactagagaaagaataacctgtcgggggctagacttgaatttaactgagtttctaagccaaaaagcatggctgaaagtaagcagcaaacctgcaggcaattattgcgccccctgctgggtgtatttgggggtagaccaagtgccatggtcatagaaaagaaacagtagatttacttcggtgaattaaagttatgagaagacagaagaaagaaccttcagtagagaaacagagatcttgggaaaggactgttggccagtgtgtggaaggagagccacgggacctctgaagtccattcccgtgcccatagtctgggattttaattgtgaccaaatgcagtaggttcacctcttggtgagtacaaccctgagacagaagagaatggagatagatctaagatctgcagcaagcaaggtggcagtcgtgagattttgtttgttttgttttgaataaaggaagtgtgttggggattctatttagtcagcgtttatcctggtacggattaggccttcctgagcgtgtgcgatttcggatactccgcgcatgctcagtttagggttatggagcctctgctcaaaaggttaacgtgatgggcacgaatgctcatctttggcatgctcagcttgcctcttaagttttagctgaatgtccctgaaggtgctaccctgaatgtagctagcagccacgctagcatttgtctctcttttctcctccgatcattacctattgggctgaactctgtgggagaaaaagggaggaaggaaagaaaaattaaaaacaaaggaatttttttgaagaaagacccataatcgatgctgcactttggtagtaggtgttatgggcacaaaaaaattactatggatagataattggctgagaaagagtcacagccaaaacctactgtgaaacttgggactcttttaagctaatatcacatctaacctcattctttaggaaagtaaagaacaaatagtataatagaacacagttcacatgtacagagagggagagaggacacctcatccaagccagacatatagtggcagcagagacttgaagatgcttcagtgcagataaagaattgatgtgtttcagaatccattttaactacaggacaggctctttgctctaactggcagggagtcattacaatgtaataaggcagaaagtgaaaatcaaaaaataaatatgtaaataatttccaactgagagtattcgccacagcaatcatgtgtctgtggctatagacatggctcagcgggtgagggcacttgccacgcagacctgcagacttgtgctcaatcctctgaacccatatggtggaaggggagaaccaactgctgaaatctgtgctatctacacacaggctgtggtatgcacacccatacatgtacacacaggctgtggtatgcacacccacacatgtacacacaggctgtggtatgcataccccacacatgtacacaccagttgtggtatgcacactccataccaacaacacaatgtgattttaaaaaagtgtgtgtgtgtggattggtactggcgtttggtggtacctgggttgggtgaggggatgtctcaaggatacagtggggaaacagcaatcactagcatgtcagcagtgacagatatttgcaggaaaactaactttggacctctcatttaagtggaatgttgttcaagaataaggagttgttttccagagcacatgtgtgaacatatattgactttcatctataaaaattaggcagaaattactttcattagcattcttgcttgtccttatggcctacaaagaatgtccttaactgaaaagttgactaaccgctgggttggagaaactttgccccagaaagatttcctccctgcctcgaattttcacctagcttaaaagtattataacccatggcaccaaagtgctggttcttagtggacttttggatgttctctcctcagaactgttgagaaaatgctttgggcactaaggaaacaggaagcttacgtgtttacagtatactgccttagttcttcccaaaggctgggctattaacttgatcatacctcaaactgagctatgttgctttttgcagtgaaaaatgctttttctcacatgctatcagtctgnnnnnnnnnnnnnnnnnnnncctccctccctccctccctcccttttgttcttttctttctttcctttttttgtttttgtttttgtttttgttttagacagggtttctcagtgtagccctggctgtcctggaactcactctgtagaccaggctgacctcaaactcagaaatccgcctgcctctgcctcccaagtgctgggattaaaggtgtgagccaccactgcccagtttgttcttttcttttttaatttacttttttggtactttttcttacatcatttctgtttatctttacagcaagaaaagatgaatataggacattgatgtctgtagaaggtcacatttcttcctgtagcagaccttttctgcttgccttctttatttaaattactatgtattccttgtagagaaataatgactctcttgattttaatcacacacacatgcaccagagtgaatatgtgtgacgatcagaggagaatttgcaaaagtgagttccagcaattgaacttaccgggctcagtgacaagtgcctgcatcctgagtcacctccctggcccaaatagcgggtttcgttttgatacatttagatgtgtctctcatctaccttgattataccaaccctccattactgcatctctgccttcctactggctccattgctcttcccaaatagagccctttcaatatttttgttttattttaaatctagatcctgtatatgaaagaagaatgtaaattttgtctttgggcatttatgttgtatgcatagattcctttggttctgtacccaagcgtgttaataatatttcttctcttatatagcgatatctgcttatacagttgcaccaacttatgttctcaccagtatatagtctcccttctgagagcagcctgcccagccttgatcattgccttggtgaggggcaagatagaccctctcagtgttgtgtaacattttcttttaaagatttgtttcattttgtatgtatctgagtgtttgctttcatgtatgtatctgcactgtgtgtgtgcctggtgcctgtggaagtccgaagagggcatcaaatcccctggggctggaataatggatggttgtgacctactgtgtgagtgctgggaattgaaccgaggtactctgcaagagcaaaaagatgctctgaaccactgagccatgtcctgagcccattggggtagttctgatttgtgttttcctggtgcctaaggaatatcgagttggatatttttctgtgtatttattggccaattgtacttactctgttcaacttaccttcattaattgggttatttgatttttttttcggggggtgattgtttgttttctgtacatattctggataacaatgacctggcacatgacttagcttctcatttttattggagtagtctatgggaattgtctggaacaggcaacacatcgaaatttttctcaatggagccttggaaagatacacatgggcagagcccctgcccaggctgatccctgatgtctgaaacggggaggctctttatgaccagctgagcttccaggaggcaggctgagcgctcttagaaaatggattttgatcaggtttgagtagagtgccagtttgcggacatctgcaacagttttatactgttgatgtcaccatgctttgagtttacagtgggcagaagtgtgctcctgctttggacaggttgcgtctaaggtctttcagagtacatcagctcatggaactttgaaagctgagtaaaaacagattaaaagacacgcatggatttcctgtctaccaaatactttgactttggtggcacttcatgcatgaccctccaacagttcttacacaacaaaaatattttctgtcttgaaggaaaatttgagtatggtgttgcagagggaattgtggatcctggtctaaaccctatttcagcctttcgactttccgttattcagaactcagctgtttgggccattcttaatgaggtaagagtacattcagccagcaaagccgcctagctgcttcgttttttgattttgcaaatgaagacttcttggaattgtgaattaactgctttatcatatcttatatttttttgtatttcagattcatattaaaaaagtcaccagttgatctgcttagaaaccaacacgtcctttcttatgactcttgattaaagataattagcgcgtcctcttctgtttggacttgaacactacctctcttgaagccactgtagatgagatgattgttgcctccacgcggacagggactcttcccatggataactgcattcatttgaagctaagctgtcctccaatttgaacttgacacaaacgttttacaatcctgacagcctgttaacatgactgagactattttggtattatactaatacacaagagttgtacatattgttacattccttaaaatttgagaaaactgatgttaaatacattttgtgaagggggtacttttgaacttcacttattttactattatagaccctcttttatagacgatcagggatattacatatatatatatacatatatatatatatatatatataaatatataaatacacatgaagatgttatgaagttaatttattagaagcacttaagaagtacatatttttgtgcagtaaagttttgaatcaacacctttttttgaagaagcggttccccggctttttttaagttctttctatatttttatttggagatgccgacattatagatcaacgccattttttccagtgcactgccattccagattggttctagatgggtttcttaactcgaagtacttttataatcacagcaattctgaacaaaatattttcagaggcatttgtcattcctaaaaatcaagattttaaaagaccaatgttctctcgagggttatattactgtactgtgtatggtgtgtagccacagaaaaccagtgtgactgtcattgtccaggtgggaagcccctgccgtgtctccacagactccttttccggttcatagttcctttcatgtgggtgatgagactcccttcccttttgctctgtctttaatcagtagttagacaaactgtctcttttctccctggttggtccttttctagatctgtggtaggttttggagttcagatactgttttctgagtaatgctgttgggtgtgtcctattgggtatgggactcggagaaagacgaccgtagcacttctgtttccatagcatgatttgctccgctgtgtcatgaacgtggaggtaaatgctgtgtccacagagtgtttgtgcatcctcactttgcagtcccaagtagcgctagttggcagaagtgctttactcttatgattaggaaggccgagcaacagttgccagtcttctctggctctccagaaactgcgtgtacagcaggtgtggtggaggcctagggctgtgggaggtcccggctggtagcctccgtcgggggctttcttagttgcccagtgtatgggacacacagaactgagtggaagccattttgtatgttctgcctgggaaaatgtagataaacactactgtgcatgtcaaagcccagctgaagcttttcttggtgttaagtttcccctctcatttccttcagctttttaataattagtactgcatttggcacttttcctatgccctgtgcccacaaataaatcccactatcttcccacactcaagtgtgcagcagcaggataacagactgtgaaaccatgcagatgggcacaggggccccgttaggtctctgctttctcagtggttgtgagttcagaaggccaagccttgaaactccactggaccgtgtgaatgtctcctgcgtgggtctttgagcatatccacttacaaggctctactcatcagtcttgcctctaaggactcttttagccaagtcctttccttcattcaaggaattccccctttccccatgagctagttcctggtgcctggaacacgcctgagccttggcaggctcggttggcatctggattaactagccaggttgctcacatctctctcctagcgatgtctgcctactatcctgccgtgcacgggcacacacacactccgtgtctagtcttcattgtgtgtggtgtgtgttctccaatacactccaggctctggaggccagctctcctgtcttccatcacatcaggcgctctcctgctccctcagtgccagttgcttcctcctcttgtgcccagttcagcactagactattggaaacagatgtttccaatagattttgtgggagccctggaggttgatgaggatgaagacgggggaggtgaagacagagtgcttagaactgtaaagtgttcatccacattatcccttggaggccaccaaccgactttcacccacatagtgaataggaaaagtgtcaaatgcagtactaattatatctgtgaaataggtcatagttggtatcggtgggtatttcacatagcccagactctagagcagtgctggcctctacagaagccacaaaacacatctgttgaaatgaaaagttgagttggcagcctttggagtgctcagtggccacatggccagcagccaccatattggatcctaggaatatgggacatcgacatcacggtgggaggttctgctggatgtgtaaacatgagcattctagaaaggagtagtaatgtatcctgctgctgtggttaaaaatagacctatggattcatcgtagtgcaggtgaaggtgtgtgttttggtgggacagtcaagattacccggctacatgttagtgtcatccttcttcccagcatgcattgcttcgggatcctcaagaggtacgtttgaaaagcatgagaagtgaatgcggatggatggtttcgcttgtaggttagacgtgtgttatgtccatcagagtgtgtttgaacaaaggttcttgaaatcattggttcttgaaatcattggtaaaaagattaggtgtgcttatctcaaaagctatcaggaaagttgggagactagacttctttttaagtctttcataattacgagaactacagttctcaacagtgctgtccctcaaggaaaagttggcttatgtgcaaagtgttgttgttggcaaaggttgttctagttaataagtgtgtatctgtcacatgcaggattctaagaacgacccctcatgaccttgtataatatcctccccttctgagtgtatcgagaactgtgaccacatctgtgggtgattggcccaatcttgagagccatgtcaggctggcagaagtgagagacatcagcagcagaactctaaacagcatcgctggtctaagtggaaggggctcccctaaatgactgcaggtcacctgccttaaggagccagaggctctgttacccaccaagtgggacctgcagaccttttgccataggacaatttgacccagacacttacccaggcttggacatggaaatccttgagcagccagcctggtaaacaccttcactttagctttgtaagtgggaacctacctagacttctggtgtgcagcagtggataataaacgggcagtgctgtatgtggctagatttgtggcatttttaaaaagcaacagaatctgtcagtcctgagaagtctccatatatgattgcctgcggtagactagtttttaagacaaggtctcaccttgcaccccaggccgattctcccggttctgcctctcaagtgctgatgtgtatcaccatgcccggctgactgatggtttttgacataagaataaactcattcccagcaagccctattcctgggtctctgctaggatgtttggtgccaggacccgtgtctcctctacaagtcagacttgtattagtttttgttctgtaaaactaccagggtgaggctgtaggcatctttttctcctagatgctcctaaattatactgacttaaaggcctgccagaagtacaggaaagaatgatgaacggtattttagaccagactgatggagaagaaaaattcccacctttgtgttgacttgctggtgtgtctaacctgacagtgcagcgtgaggctgtcatctacagagtccatgctcaagaaccacatggtgaagttacaaaaacaaggacactgttaaaagctctgagtaagtttacaatcttgtattgtgccattcattgctgtcccgggccacaggctgaacacacctgcaagagcttcggctgtgacaggtgtaattttttacaaaaatcattcagctgagtagctcacggctcaaaccctgtatgttcccaccaaggttttgtgtttacgtggttcctaaaatacctgcacttccaagctattaactgctaatgaggtttctgatcttggttcactcagccatgcttcttattaaccatgctgccacagccttgaaggaaaggaacccagaggttaaacactgtcctcatcctcacgtggtaagggatcaggcctcagttcaagacttctagaaaagggcattccgagctatgtagcaactcttacagcttgtaaaacttcaaactttgatagttgaggacttaaatgatattaacatatatgctacgctaattaatatgctaaatttaatgcatgtgaacatacaatgctacaaagatgaccacagccttttacaaagagaaaaagaataaaacaaacaaagacacctcaaggatttgctgcccgtgcccctgtactctatcactagctaaatggacctgtttctgaaatgctccctttccagtttctgcattacctaaaactgcaagtgcgagagcagacaggcagcaggtgacctgaatgtgtgtagtgtgaaccctggtccttagcagggctcctgctgctctgaacacaggcttgtggggacagctaaatacctgtgatactaaggaggccgcttcctgccgctgagttagcaactggtcccagaatagcaagagtggggtcctttagcttgcatagcattctgttctttattggaactgctccagctggtaagcgtacctgaagggcatgctcgtgagccttacaaagagctgctgggacagtactggctgagtccactaagccactgttttccgcagtggagtcaagggcagctcagttagagcacttcctccacaagtctgtctttgagttggggagacggtcttggagcagcccaaggaacccctttgctaggttgcaccaggttcttttctctgcacatatttggctcacaatgtcttcatgggttgaacaataactgcagttatatttgaggtacttgttgaatttttaaaggcagattatttattttcaagtttgctgctataattgaaacctaataatgtcctgttgactgtgcctttcataattgtctctgtgctacaactgtccatgtgtatttcaaataaagaagtttgaaaagctatgttgaatcaagattccttctaataaaaatggcttaaaccaatgagtggatagaatttttttagcactattaccacacctggtattaatctgtttttcagatagtttctggttcctcttgaatcttttaaaaaggcaagaatgccacccaggtaagacagtggctgtcatctctacaggcattcacaggcagttctcaagtcagagtccctctggggactgtgctcctgtgtgagccataccgcttgctgaagttttcggaggggtctgcgtaaatgggctttaaaaatgggacagactgttcattttgccaacaagatggtctgtgtgatccaacacttactgtacccttgatattttatatacagcttcaagtgaaaataaacagtcacagctttagtttaaaaatatttattagaaatgtacatttaattagttttaaggaatgttctacacaagtgttaatatcaccttgaatttgtaaaactttacatcttattgaagctatttacagatttacaagaactcatcccttcccaacaccagacagtttctctaggatgctcacttcactctgtacttgtagaaggaacacaatgtgtgggtaaagttccatcccagtgccagcgacagcccgtacagcaccatgagaggtgcgaatggatagagcaggatcactgtatttttcaaaaatggcagtgctggaaaagaaacatggccatggctgacagatgtacacactggaagaaggcccttttcaacacactggaccacaggagcagcacacgtgtgtaggtccatgatgatgcttgcagatctatagctacatctcactaggcaacctgagctgaggggtgaacactcctatctagacaaaggttccaggactcgtcttcctatatcagcatgataatggatgcctcattatgcgatcactatgttttcctacacacagactgatagcatgtgagaaaaagcatttttcactgcaaaaagcaacatagctcagtttgaggtatgatcaagttaatagcccagcctttgggaagaactaaggcagtatactgtaaacacgtaagcttcctgtttccttagtgcccaaagcattttctcaacagttctgaggaagaacatccaaaagtccactaagaaccagcactttggtgccatgggttataatacttttaagctaggtgaaaattcactacaagaattctaatactccaaaccaggcaagtggaaggctaagcgatccctgggaaactgatcatggggggaaggaagtcagaactgttcacagtaaagtcccagtcatccaaagggtgaacaggagctgagagttctctggatggctctgggagatcggaagatctctagacattttagcaataggggtttgggggcgctgaacacaggaccttgaacataacaggcaggttttctattaagatagagtcctggtttgagatcatctcttaaatgaacagcctaagactatcttcattcatattaggaaatataacctagacgatttagtcgtaaatttggcctgggatcagcagaccctgggcctgatctgggatcattccctaagaaatgtttgtaactacttcagtgcccataaacatcggtccatgccttttcctctctaccctatggttaataatatggggcctgaatccatctaacacaacaaggcagcttctacctgtaacttggcaataatgagttagcatggctccaaatgtcacacaccacctgttccactctactattggacagggggcaagctaaaaggtaagaacacttgtgtaattaaaagagcatatgagtgaaccataacacctcaggcaatggctgtcaatgtctccttctttctctgttctcaaaccaccaaaacttaccactgtatcccaggaaggtcacatagatataatagccaacagcaatcaaccataaggtatttccaactaaatatccaataaatgtatctgtgagaataacatctgccaggaaaagaaagcataccgtgagtgtcagcacactgtaagaatctgaccatatgagaaacaagcacttacggttgatgaagaagagctggataaaatgcagaatgacgaggagcggatagaaggcgttcagatgcacatcaaaggcatagccccactccacgtcatagtccctgctctggcgtttcaccaggtacttgttggagacgaacctgaagagcaaagtgaaaacgtcttgcgcagtgcactcgttctctcagtccccaactgtctgctgcaacacattacccaagccctggagatggagcaatggaacagcctccagtgggagaagctggacacagcatatgataggacagtgagaacggagatggagacccgaggtgcaattttaaatcataatgtctacataaaggcccaaagcactgatggcgcctggcacagctggagacctgtgtgtgctcgtaagcagcagttaagaggcagggagtgaggtctaaggctgcctggggctactttgttacttcatgatgaaaaagccactgtcagatgcaagaaatgcctcactgaaatgttctgatggggtctccttggtggcagattccacagaggaggagatgacaggagcctgtgtcgcctgtcaccagaggtgagcagcagtggaggtgatgaggtgcaaccctagttgaaggtgaggattaagacatctgccaggaggccagaaagtcagagacagcagtcttgccctgaacacataggaagataagagttgctatcagcagaggacaggctggtggcaccaagagtggctctgagaatgaaggagaagacgactggggttagctaggacagatgcgctttctcatggattatgttgtacacaaagcccacagttcaagggtccaaggtaatgtgcaggcattaaagcctaaatgacatcaccaaaacatgacatctaaaccagccactcaacaaaaaccccactgtgtcaactgccattaccactaaaaagtgaaagaaatagaagaacgggaaaggggctgctagtggtagacccagacaaaagtgtgtgtgtgtgtgcgcgcgcgcacctgtgtgcatgcttccattgctgcactacaacccgacctaccagaaaactatagtgtccagatcttcaataaaaagaacaattctataaacatgtgtggaaactaatgtcatttatatcactggattttagatgatttttattatatttatttatgggggaatgtgcccaagtatgaagtctgaagacaactttgtggagtcaattctacatgtgaattctgggggttaaagtgggcaagtgctttacctgctgagcctgtgtcactaatacactgaatacagaaaccagggtccatgtctctgattccagcatgtgggtggtggacatttttggggctacatggtaagttctaagctagcctggactatagtttagattctattttaaatggcacagaaacaagacaaacagactaaatcaagaaagcatggcagagtataatagacactctatacttagttatcaaagagcctaaatagtgcttcattgaacaaactggaactcactatttctgccaagaatgtgtgccactcaattaacaaaatcaacaaaacaagccaggaacacaaagacggacccacatgtggcatatacagaaggaaaaaccaaaccctgacatcagagcaacaggaaatggaatcatggtcaccaatggaggttggactgtggctaccaacagaagcaaggcattctaatgatcacagcagtcagtgctagctagctagaactgccaaggttcccaacaccaacaagctataaatgtttgatatagaaactcgaattaccttgatttgatcattactcattgtacacataaatgaccacagggaacttcataaattataacatttaaaagcaagtgataaaggaactgtagggagcctgcagttcactccctacaagtctgctgtgtaaccactgccctcctgctcacaagtctgtgtaaccactgccctcctgctcacaagtctgtgtaaccactgccctcctgctcacaagtctgtataaccactgccctcctgctcacaagtctgtgtaaccactgccctcctgctcacaagtctgtgtaaccactgccctcctgctcacaagtctgtgtaaccactgccctcctgctcacaagtctgtgtaaccactgccctcctgctcacaagtctgtgtaaccactgccctcctgctcacaagtctgtgtaaccactgccctcctgctcacaagtctgtgtaaccactgccctcctgctcacaagtctgtgtaaccactgctctcctgctcacaagtctgtgtaaccactgctctcctgctcacaagtctgtgtaaccactgccctcctgctcacaagtctgtccgtgtaaccactgctctcctgctcacaagtctgtccgtgtaaccactgctctcctgctcacaagtctgtccgtgtaaccactgctctcctgctcacaagtctgtccgtgtaaccactgctctcctgctcacaagtctgtccgtgtaaccactgctctcctgctcacaagtctgtccgtgtaaccactgctctcctgctcacaagtctgtccgtgtaaccactactctcctgctatacctctgcacattccttgaaccaacaggacagacactggttcccaaagaactgactggctgctttcccacctccacgttggacactcctcaggccagactgctgcttccagtcctctccctccctctgctcacctctgcagcaagcatcccaccaacctgactcggtatggccaatgaggaatgcttcagcagcacttccaaccgtctcctaagcccaaacttcctggccatcacatcctgttaccacaggaagctctgaaccttctc

SEQ ID NO: 400 - DNA, 3433 bp, Mus musculus
atgaggctccgaaatggaactgtggccactgcgctggtatttgtcacgtccttccttaccctatcctggtataccacgtggcaaaatgggaaagaaaaactaattgcttatcaacgagaattccttgctctaaaagagcgtcttcgagtggccgagcataggatatctcagcgctcctcggagctaaacaccattgtccagcagttccgcagagctggagcagagactaatggaagtaagacagctctgagtacaatctcagataataccataaagcttctaaaagagttgacaagcaaaaaatcacttcgagtgccaagtatttattatcatttgcctcatctattgcaaaatgaaagaagccttcagcccgccgtacagattggcagtggaagaacgggagtttcaatagttatgggaattcctactgtgaagagagaagttaaatcttacctcgtagaaacccttcactcccttattgataatctgtatcctgaagagaagctggactgtgttatagtcgtcttcataggagagctggtgcagctggtggtgaccacagagcaggcagcagcacgggaggccctttcggaacctgtggcgccctctcgagaacagtcattgtgtgaaggttctaattctactgttagcatggaactttcagaacctgttgtaggaaatggagagactgaaatgtccccagaagaatcatggaagcacaaagaagaaataagtgaagcgaagccagggggttggttcctcaggaaatggaaggccaccagaggaaagcacccaagacacgatggaggaggaagaagaaataccaaacctaacagcccctacggaagaacatgtaaactcatcgtgcatgttgatgcaggcacggcaaccattggaggacaaataatctatctgaccggaatggtcgacaaaaggacacttgagaaatatgaacgagaagctaaagaaaaagacagaaaaacttggtacttgtcttgggccttagatgcaaatcaggaagaataagacaagggcaaaatagtagaggtgggtcgtgcctaatttgaaacggaaaagaagcattttataattctacatgcttctggccttaagagttttgtcccaaatatgattggttggcgcctctcaaactgaagtggctgtgctggtaatctcagccaggaaaggagagtttgaaactggatttgaacaaggaggacagacaagagaacatgcaatgttggcaaagacagcaggtgtcagacacttaattgtgcttattaataagatgcatgatccaacgataaactggagcaataagagatatgaagaatgtaaagagaaactagtaccatttttgaaacaagttggcttcaatcccaaaaaagacattcactttatgccctgctcaggactgatgggagcaattcttaaagagcaatcagatttctgtccttggtacattggcttaccatttattccatacctggatcatttgccaaacttcaatagatcagttgatggaccaatcatactgccagttgtcgataagtacaaggatatcgggactgtggttctgggaaagctggaatctggacctatttgaaaaggccagcagcttgtgatgacgccagataagcacagtgtggaagttcttggagtactttctgatgatgtagaaacggggctctgtagctccaggtgaaaactcacaaccagactgaaaggaaccaggagtcattctttgtgatcttaataatctttgttattttggatacacatttgatgcccagagagtgattatagagcacagatccatcatctacccagggtatatatagtgcagtgctgcatagtcatacctgtatggaggaagtggcagtaacagccttaatctgcttggtagacaaaaaaaacaggagagaaaaaagtaagactcaacctgttttgtaaaacaagatcaagtacgcattgctcatttaaggacagcaggaaccatctgcctggagacctttaaggacttcccctagagatgagagtaagaccactgcagttggaaacgttctgaaactggttccagagaaagactaagcatttccttgatgaccttgcacaattttcctgtgaggaaaattgactgcaaaagcctacttcacaccgccatctcttacttcctgcccattgacaaacctctccccatactttgcaaagacaattcactgtaaaagtccacattatgtcagctttctcatattgagagctctgccatgccactgttgaattttcccaagattttgcccccctttcaaacttcacttccttgggcagatttggcaatagctttgtaagtgatgtggacataattgcttacaacaatgaaaaccttcaggatttttttttttaatttttcattttcctcttaggcatagttagtattgttcccccagggagatcattcttagtgtgtgagtatgtgtgcacatgttaaaaagaccatgttaataaaatactcaatttagccccccctcctcgccaccccaaaatagtcagatgtgaccagcatgcactgtagaaattgagctacttcctcttccagcagtctgtggaagagcttgtttcttcttcctgggtaatattagtctgtactggttaggtactattgttagcttgacccaacctagagtcacatgagatgatgaaacttcaaggaattggctagatcatactggtttgtggccatatctgggacagactgtcttgactgatgttgatgtggggtggcctagcccactgtgggtggcaccatccctatgcaggtggccctgggttgtataagaaagctggagcatgagccaaagagcaaggcagcaagcaggcctgacctccctcaatgatggactgtgacctggaagcataagccagttaaaccctcccttgagctgcttttgggaagagtggttttttggttttggttttggtttttttcgagacagggtttttctgttgtagccctggctgtcctggaactcactctgtagaccaggctggcctcgaactcagattcagatcacctgcttcaccctctgagtgctgggattaaaggtgtgggccaccatcacctgactgtcagattttttttttgtttgtttgtttaatcacagcaatagaaaagaaaattagagcattttgttttctatttgatgggtaaaaagtaacactttggcctttaccaaaatagctcagtttggaaactgttaggctgaaagtaattatttgctcttattgaatttggatttcttgactatatggaaatgttgctttgtgtggtttctgaccatttgcatttataattgttttttaaaaactttgcttattttttaatgctttgatttgtaagttttcatatatgaggagcagactcctctttgaaata

SEQ ID NO: 401 - protein, 341 aa, Mus musculus
MRLRNGTVATALVFVTSFLTLSWYTTWQNGKEKLIAYQREFLALKERLRVAEHRISQRSSELNTIVQQFRRAGAETNGSKTALSTISDNTIKLLKELTSKKSLRVPSIYYHLPHLLQNERSLQPAVQIGSGRTGVSIVMGIPTVKREVKSYLVETLHSLIDNLYPEEKLDCVIVVFIGELVQLVVTTEQAAAREALSEPVAPSREQSLCEGSNSTVSMELSEPVVGNGETEMSPEESWKHKEEISEAKPGGWFLRKWKATRGKHPRHDGGGRRNTKPNSPYGRTCKLIVHVDAGTATIGGQIIYLTGMVDKRTLEKYEREAKEKDRKTWYLSWALDANQEE

SEQ ID NO: 402 - DNA, 2167 bp, Mus musculus
cccagaagaatcatggaagcacaaagaagaaataagtgaagcgaagccagggggttggttcctcaggaaatggaaggccaccagaggaaagcacccaagacacgatggaggaggaagaagaaataccaaacctaagtcagtggtggcaccaacagcagcccctacggaagaacatgtaaactcatcgtgcatgttgatgcaggcacggcaaccattggaggacaaataatctatctgaccggaatggtcgacaaaaggacacttgagaaatatgaacgagaagctaaagaaaaagacagaaaaacttggtacttgtcttgggccttagatgcaaatcaggaagaataagacaagggcaaaatagtagaggtgggtcgtgcctaatttgaaacggaaaagaagcattttataattctacatgcttctggccttaagagttttgtcccaaatatgattggttggcgcctctcaaactgaagtggctgtgctggtaatctcagccaggaaaggagagtttgaaactggatttgaacaaggaggacagacaagagaacatgcaatgttggcaaagacagcaggtgtcagacacttaattgtgcttattaataagatgcatgatccaacgataaactggagcaataagagatatgaagaatgtaaagagaaactagtaccatttttgaaacaagttggcttcaatcccaaaaaagacattcactttatgccctgctcaggactgatgggagcaattcttaaagagcaatcagatttctgtccttggtacattggcttaccatttattccatacctggatcatttgccaaacttcaatagatcagttgatggaccaatcatactgccagttgtcgataagtacaaggatatcgggactgtggttctgggaaagctggaatctggacctatttgaaaaggccagcagcttgtgatgacgccagataagcacagtgtggaagttcttggagtactttctgatgatgtagaaacggggctctgtagctccagattttctagagaaattagttctggcctgctggaaataatctctcctcctgaaagctattaccccgacttgacaaacctgaaggagacgttcggagactccaaggaaagagtgagatggagaaccaagcaaaacctggattactgttttctgatgatgtatgctcaggagaagggcatctactacattcagcttgaagacgatattattgtcaaacaaaactattttaataccataaagaattttgcacttcaactttcttcggaagaatggatgattctagagttttcccagcttggcttcattggaaaaatgttccaggcgccggacctggcgctggtcgtggagttcatcctcatgttctataaggagaagcccattgactggctgctggaccacattctctgggtgaaggtctgcaaccccgaaaaagatgctgataaagattacatgaagccattgcttctcaaggtccacgtgaacccgcctgcagaggtctccacctccctgaaggtgtaccaagggcacaccctggagaagacctacatgggggaagacttcttttgggccatcacccccacggctggagactacatcttgtttaaatttgacaaaccggtcaacgtggagagttatttgttccacagcggcaatcaagagcacccaggagacatcctgctgaacacgaccgtggatgttctccctcttaagagcgacagtttggaaatcagcaaagaaaccaaagacaaacgattagaagatggctatttcagaataggaaaatttgagtatggtgttgcagagggaattgtggatcctggtctaaaccctatttcagcctttcgactttccgttattcagaactcagctgtttgggccattcttaatgagattcatattaaaaaagtcaccagttgatctgcttagaaaccaacacgtcctttcttatgactcttgattaaagataattagcgcgtcctcttctgtttggacttgaacactacctctcttgaagccactgtagatgagatgattgttgcctccacgcggacagggactcttcccatggataactgcattcatttgaagctaagctgtcctccaatttgaacttgacacaaacgttttacaatcctgacagcctgt

SEQ ID NO: 403 - protein, 332 aa, Mus musculus
KGQQLVMTPDKHSVEVLGVLSDDVETGLCSSRFSREISSGLLEIISPPESYYPDLTNLKETFGDSKERVRWRTKQNLDYCFLMMYAQEKGIYYIQLEDDIIVKQNYFNTIKNFALQLSSEEWMIFSQLGFIGKMFQAPDLALVVEFILMFYKEKPIDWLLDHILWVKVCNPEKDADKDYMKPLLLKVHVNPPAEVSTSLKVYQGHTLEKTYMGEDFFWAITPTAGDYILFKFDKPVNVESYLFHSGNQEHPGDILLNTTVDVLPLKSDSLEISKETKDKRLEDGYFRIGKFEYGVAEGIVDPQPISAFRLSVIQNSAVWAILNEIHIKKVTS

SEQ ID NO: 404 - DNA, 160710 bp, Mus musculus
  misc_feature (1)...(160710): n = A,T,C or G
ctgttccagtctcactggcctccctgtgtcctcgtgtatgtgctgtggcccttcctgtctatgttattccttttgtctagaatgattttctccccttacttaagggttagccaaattcatcttatgtatttgagttatagtttcctgtaagcattaactttttaaaaactttatttatttttatttattcacttgacatcccgatcactgtccccttcccagtccccctgccctgtcccttctctgagagagtggagtgtcctccacatcaagtctctgcagggttaggggcttctcccactgaggccagacaagaaagccaagctagggaaacagattccacggacagaaaacagctttagggacagcccctgctccagttgtttgggacccacatgaagaccaggctgccatgtgcgggggtgggcaggggctaagcagcaacctactgtaggtacactgtcacatatcttgctagttttaagctttgcttctttccccgtggcctgtgaaccttcttaggactgaagtcatttctgtgctggcccactgctgtgtagctggctccagtgcatcactgcctggtgtcctgtgagtgagtgaaaggatgagcacagaggggagtccctgcttgccgtccatcactgtcactgtcacaggttttctgtaataaacaccctttaagaagagtaagagagtagtcaggggtggcccacattgtagcactttggagattaaggtaggagaatccctgtgatttcagctagcctggttgctacagcaaagccatctcaaaaaacaagaggaattgtaaagggggtaaaaggagagcagagtaccagagttagcactatgaggggctgcgtgcgtaaccagtcaggtgcttcagggtgtgtgtgtgtctaatgcaggaattgatccctgggcctcgtggttattggacagcattctgccacttatacaaacagaagctgtccaaggagcgcaagtgcttctactggtctcttacccatttcttctcaaacccctgagttcacatgttaaaccctcattttatctttaacagatctgcctccaaggctgttggttctcttcacatagaatcagaactttgtatataaagcgctttctggtcctttctcattgtttttataacattcattctttcagcacgtgcaggctctgccaacagaaaagattactaagaaacctattccggaggagcacctcatcctaaagacgacatttgaggaccttatccagcgctgcctctcctccgctacagaccccgtatggactcttcttcccatggtttacttaactataaatacggcctggggctggagagttgggtcagcactgtcaatattgcagagagcctgggtctcattcccagcgcccacgtggcagctcacagctgtctgtaactccactcccaggacctctgaaggcactgcacacatgtggcacacagacatgcagggaaacgcgtgtatacttaaaactgtaaaatacattttttaaaaatcttctttttaaagtcccttgtggcgctccttcattattgagagagctgtggtcatagttgcccccactgcattggtaaacagaggcctgcagcatcctcagtgtagcgttcagtgtaatgcctgttcttctcctcctgtagcaaaccaagaggaagctggacgacgccagcaagcgcctggagttcctctacgacaagcttagggaacagacagtaagtttttgggaggcagaggtcaattataacaatccattattctttgttgctaatgaagtgactcaccaacactgtcactctgtgtggcggatggcaaacttgtcatgaaaggtacagaatggtcttcccagagcccatttgtgcgagttgtgggagagaacataagaggtgaaattagcccataacaaagatcagaaatgcaacctgggctgtgttgtgcccagggtaactggcctcatgctcattttacatggcccttgtatcagaaaccagagacgaggcaggtgccattttctagagaagaatctgtcatctctctggagtctaaaactcttgatccttttctcccacaacagctggtcagggtgctgttctgtgactgagaagtcacagcaaggaggcactgtggtcctcttgaactgacctgctgcagccgagggtagcagcatgggccagagaccccagctcctgctgagaggatcacctgagctcaggagtgtgaagccagcctcagcaacatagcaagagctaaaaaaagcaaaacaaaatttttaatgccagaaaataaggtagacttataaaagtattatagcccgagatgtggctcaggttagcgcttgtctagcacattggaaaaccctcttccatccccatcatcacaaaagatgggaagaaaaactagttacgagctggtgaattgccttgtgtggccaagcctgttgccttgaactcagaagaggacagaaggttcaggatctcctgtagaaaaggcttcaagtagctggggtcccagctttgtggcgccatgatatacaaccttcctggatgcaaggaaaatgttgaattggaaagagatgtaagcagtccagcttgcaggaggtggtcagtaaggaaagacctgctctacaccattgtaattcataaaggacttgtcacacgaggtgtccccatcaggcttctacatttaagtgtaactttcacttggtctaaaatctttgtttggtttaaaacattccaaaatgctaactagttaggcatttgtaaggagtgtctcaggctccaggtaagcctctgggttgaatgcttgcagagtgtggtggccgtcctaaggtaactcctctcctgccccggcctttctttcagctctccccgaccatcatcaacggtctccacagcatcgccaggagcattgagacgaggaactactcggaagggttgagcgtccacactcacatcgtcagcaccagcaacttcagtgagacctcggccttcatgcccgtcctcaaggttgtcctcagtcaggccagcaagctgggtgtctgaggatggcagcactgtcgctgacattgccacttctccaaagaaagccatgctaagactgggaccagcccctcgttagcatgtctccctgccacctgtcacccaggagctttgacattatttctgctgccatactcccctagaactgctcgaacccccgtgcttttctttttcttcatctccttttgcccgttatgattttcctattctgcaaatactgtctttcctggattacacatagtgtggtttcctgagggattctgactaatgtggtttttaaaacttgggtgtactttttaggaaaattgcatctggctatgtataaaacagacctaaaataaatttctttgatgtcttccctactttctccacatcaatcagattaaagtgtgtaaccccatcttatacagttagtctttatttattttttaccttcttattgccttttcttgatttctaagtgcgtgggtgtgggcatacagctgtgtgtggaagccaaaggtcagacagcctgaaggaccagttctctactccctccatgtgggtcccaggcacagaactcggcttgccgggtttgtcagtaatcacttttgcccactgagccatctcaccagtctatagtttttgtaaaacaggctgctgactgtagtctgtgggggagcacttcttggcatatgtaaggccccggcttctgctcctcttgctatagagcagtggttctcagccttcctaatgccacagccctttaggacagttccacagctgtggtgactcaaccatacaattatttttgttactacttcataactataattttgctacatttgtgaattctaaatatctgatatgtaggatatctgatatgtgaaagggtcagtcgacccccagaggggtaggggatgctgctgtagaggggaagaaaccaacctcgctttagcctggtcctgagtaagtggatgtagacgttgctccatatgtatcagcagatccagatgcagagtggatgcatgcaggaaggcggcgccgtctgcacaccttcggcacacattactgtggtctccgtgtacaaggattttcagtgttctacttagattcaaggttgacttgtcttatttcatagttagagacttgctcccctgttacctgtagtcttgaggctaagtacagaaagaaaacattattataaccaggctcctacatgaaagccttgcatttaccagccaagttttctgtcaggtggcttattatctgcccttaggtaaacagtatgacttgccgacccctttatcacggggtggtacatgggctgttttaggaggtggagatctgtccaggaggctctcacagccttgctggagcaggttgcaaggacctgttttcttcattgagacccctccttccagacacacgaactttaaaaaattaaactcaactttgtagctgagaatagttttgtaacaagaagaaggaaaagcatggtgccagccagtgtcgggccgggtgtcagctcatgtctaggtatggggacagcggtgtttgctgagcctcctgccacttgggtggatactgcttggccttctggatggactctgaactgcagttcaagactgcagttgaaggtgaggctttctccctggcatgagaaatctgccggggtcggggggagagtgctgaaggaaagaagaaatgatgtaaaaagaatagaatgagttccctaaaagtaagactcacaacaggtcacagcatggctgtggcccagtaccgtggagtccaagtgcgtgggtacaaagacctggcttctgctatccaaggagctaggctttcccccacagtgtggagtcttggagacatttcataccagctaatggaggtagactgagctcaacatattatattcctctgaagtataaagaaaacagattatatatagaaagagcagtgtgttatctcaagataaacctggatgttctcctttcgagtgaacttgattttgtaaatggttctactttaatatatgcctctacggctcagggactccagttcaaggctcagcttgcttaaatgatcatccagtgatgatcagtatggtgaaaacacctataatcccagcacgcagagaactgaggcaggaggataagagaaaagttagttgtatgtactgtgtagaaggtacagtcttttaaggaaaaaacctcaggcatatgagcggttgctgtctacttttggaagatacggcttcctcaacacattcatccatcatgtgtggtcagcagttcctgttttgtggtcccagacatgttgatttttcttgctttgtgcttttatttattttaatgcagttctaagcggaggaaaggttctgagggaatgtggtctgtggggcttagtgctggcttctgggttagggtcgtttatattagatctcaactctacctctgccttttgttttatttatgtatataagtgtttcacttgcatgcatgtatgtgcaccacatgcattcctggtgcccacagaagccagaagaaggcatcatctcccctagagctggagttagaagcagctgtgagctgccatgtgggtgatggaaacctcagagctcttaaccactgagacacccttccagctcccatctctacacttctttatgttccttgggtgtgggaagcagacctactccacaatgagatgagatgcgtagctgatggggctgttatccataggatttggggagcagcttctctacaccttgctattgagagcctcagaagtcatttagattcagaaattccctggtgtgctggagggtttctccagcaaagtacaacacgggggagttaggagccagagttctagactggagagaagtctcaggtagtggtcttgcctaagagtacagtacagaagaacaacaaccaaagattgcagtgctgtgccactgatagaacatgctctacctcagtttccctggctgtaaaacaaggggggaggagcaggatgagggctctgagtttgcttagggctctggagcctctgatccatctgcctttgctaccatggctttgcatctgacctacaagccttctgagggaatggaaactgaacttggctgagccgcaggctttggagaaagatgacagaaacagctatttgatttccagtctggaggggaaagaaatgcatcatgcaccttgagtggaaatgagtgggcagcccagaggagcaggcttgtgatctgaggactgcaggcagtgtgtctgtaagcagggagccccctgatctgaggatggcagacacagtgtgtctgtgagtagggagcccccttctcggccacgtgcttatatttccccaatccttctgtgcatcgtttctcatcggaaatgggcaccttgagtgccagctgctgccagccaaagatgccatactgcttaccttccctttggtgctgcaaatctgggtcactcttttgacattctcctgcccccagatggagaacagcctggccttagccttttaagggcctgtggtaattgacccagggggggctgggagtgggggaaggaaggcagttgaaacggaaatggcggcagctggtgctgagaaagtggaggagctcagggttaggttaggggctttgcccctggagactgaagcaaccctccagaaagaaaagggggcggatgttagtgagtcgggaaccagagggcagggaaagtttctgggtggctggtgattctgtccatgctgtcttcagtcacaagaataatttatttctgagagccgggttgtggcagcaggtgggataagaagaaggaagaggttagttaggtttgtaaaccttgttagccatgtgctgaccaacgggaacacttacaaaggtcttaaatgttaactgccttgacccggtctcttaaggacggcttctcggtagcatttagagtctgtggggtacactacctattctgattggtggcctgccctattgtgctgtgagttcccagagcttaaagccacacatgctacttgtagtgaagtgcatggcttctagaagagtctcaacaaatatatattgtaaaattattaattaatttgaactcaaaactggcacagtgagcatgcccatcgaggtaggaggaagctggcacagtgagcatgcccatcaagataggaggatgcttggggcggagtggttcaggtcagccttgaactaaccctctctcttccctcccttcctccccctcccctttcctctttcccttcctttgttcccctctccttcctcccctgtcctttgcttttcgtcttccctccctccctctctctagtggggttagactgggtcttggctgcctagacaaactccttaccgttcatctacgtccccaaccctctgtagtttctactgcagaaactttttgtttaagtttaatttttaaaactggcacacaacgcagcaggtgtatagtgttttcacacatccttgatttccctgttaccgcctggattttgcaccgatgtctctcacagcccctcatttacctggatcccttgtcctctgatcaggctcactaacatgcccccacacttctcagtgaggctgtcctcagactgctgagtggagctgtgtaaccctaacgtgtgccctgaagcccgagagcccgtggcttctagttttagttaagtcagttaggctggtgttgataagaaccatgcccaataaccaatgcagagagaaacagaaggtaaatttatgggttgactgccagcacccgctaattatgctacagaccacagtagctccccaattagatgtttgccaggctagaaacacccctcacttgctactttctataaaaccttgccccataagtgtttggggctcttctccaccaaaactgtcctactggtcagtggagagctaagtccatgctagctcaaataaagaccctgatgtgattgtatcagatcggctcctgactgttttggggggagttcacaaacgtttcatggcacaacactggtttggatgcaaattaatacagctgcaggagaagcagtgtagttggggcctcatcaattcagtcaaagaatccagtaaagctgggcgtggtggcgcatgccattaatcccagcactcgggaggcagaggcaggtggatttctgagttcgaggccagcctggtctacagagtgagttccaggacagccagggctatagagaaaccctgtctcgaaaaaaaaaaaaaaatgaggatgctggtatcctgtgccactgccttgctggttattgaacagtgtgacgtttattctgtcccagacaaatgtcctctcagtctacaatggcagctccaggaagaaagaagcactaggagccaggactccaccagcctcagagctgcccttggctgtaaattagaccttggtttttgtttttctgttttttgagacagggtttctctgtgtagccctggctgtcctggaactcactctgtagaccaggctggcctcgaactcagaaatccacctgcctctgcctcccaagtgttgggattaaaggcgtgtgccaccaccgccccgcccggcctagaccttgttttatctggctgatgggaccagatctgctatcagtgggagcctgctgtgtagtcctttcaggtgctcagccttgggaggtttgttgttgttgttgttgttgttgttgtgtttggttttggttcgttcctctttaggagtcttggactcttctaatcaagtaatcaaaataccagctttaaaacaaaacaaaatgacaccttctcaacctctcaacaagcaacaataaccaaaccaaatcaaaagccatcaggttgaaggtggaacccagagttcctccccccacccctcccactcacctgtccccctgcagtggcagttcctggggcacctgctcaccctctgtgcctccttgcacctccgatcgctcccaccctctgggcagctagaagtctggattggaggggagaaatgggggattttcataggtaagtttttctgggaacactctctgagatctttctaaagcctggctcctcgaggctctactttaaggttctattctgactggcatggggaagaagcctgatggggaattcaccatcaacagaactgcaaactgaagcggtgcctctgctgtgtgtagcctgctagccagccccaaatcatctctgtatctccaaaaggtattcactgacacttactgtatgcgtacgtcatccatggtcacctaattagaacaacacccctgcttacctctccactggtccaaggaattttacatctagaccaaaggacttgagtgactgttggtggatctggtcttaactcttgagtacaaattaaggctagaattaatcccacggagatggcttgtggtttcagaaagggtgatggggttcccaataagggattgcctggaactgtggtttggggaatctagagaaaaatacacatactgtataacaacaggagggctctaagatgccccacaggctacacaccccagggaccttattcctcgcaccacccaggccgcagctgccaattctagctccctcccgagtgagcaggaaggccaaaggcagcctttctctttaagaccctccgcaggtgatcttgataggcctctgttgggttctcttcccagtgtcccctcccttcccacggtccctctccccacccctactatcaatcacccccaaccctgtccctcctctgtgctctcctgccacatcatcctcacagctgagtaaggctcctgcagctgtgcgggtgaaaggccagccacagatgccaaccaccaagatggacaccatcgggccacgctcaagaagagaggatctgagaagagggcagagatgaagttcttgttcagaagcagtagcgccaccactatccaaccatgccagcccaggccaccgacccagccaaggttccttcggcaatgccaaggaggaaatctgtgcgggttttgagggatcgatgggcgcagcaggacatgcgaggggagcagctgagcatcttctggaggaacgtggtccccatgagtctgctgcacttaaggactgtatattctcctgtgctcgtctctaggccacgctgctcactctgctgtggggtaagtctcgccagcgaccactgcgccctggcaaagtacaggggccggatgggctcacgaggacaccactctgttccaaggctgcgagagcgcccggctgcccctcgagtgccaaccctaaagtgtgccgttctccatcctttggcatttctccctaaagcgtttgcaatttctgctggtcctgcactcctcagttggccgatggaaagcagaggcacctggagtcccttgtgcgtcgccacagctgccctatctggcctgcggaggaggggctggaaacggacactagggatttggctttttgagcgaggtatataggtatattgtccacttgtgagaggacctggagttccatcttccgcccttcagtttctacgtctcctggatcacagtccttatggctgagaaaaggagaggagggcagcccgaggtggctgggggtctatcacaggcttgagccttggagtttgcgcaacagatggaaaaaaaaaacaaaaaaaaaactagctccctttctgcttccctgataccccacccccacccccatcctgtgcctgctgcatggtcttttatgcccagttacagccaaagtttcttcttcttctgttgttgttgttgttgttgttgttttgttttgttttgtttctgagacagagtttctctgtatagccttggctgtcctggaactcactctgtagactaggctggcctcaaactcagaaatctgcctgcctctgcttcccaagtgctgggattaaagatgtgcgccacaacttcttgataaaggaagaagcccatggcttggagtgtggcagcagcagagtcctttccagacctttctctcagtcactcagtgtggctctgttccccaattataaatgcacccgtggctgtaccattcttccttaacaccccaccctcggggatgggagctctctgttgagtaccttccggccaggaacttggttggtgactgccctgcaaggtgctctgtgatctgtctagcaggcttttctgacccaaagattggatttggcttgtcagttgcccagagacaaaagatgcagatatggacaggttgggccgggaatctgaagaggtaatcagagataccctaataaaagtccctttaaaaagctccagtttgggatcactaaggagcagggcaacagaaacgcaacctacttttatttccagactcttggcagcaaacccatgcagagagctggtaactcccaggggaaacgctctgtgtggagaggtgctgaaacaggcttgggtctttaagaatccctaaagccttaaggtctcccctgagctcaagataacctgttacctcatccctaccccttgccatgccactccccccttttcaattctttgttaactcttatgattctcttcctttctctgagcctctcagtgacaatactgtatgatgttagcctttgctcagtggggacactcccacaaccggctccagcttcccagctacccaggaccagtaccggatcctggcttcccagctcagcttccagattctaggctatttttctgctgaaccccagagcccattagcctccaggcgctccggcatgactttgaatagctgcagagctctgagagtcgggagaagtgaacacttaaaatatcatcttaagtgcctggggctccgtggggcccacaggctccaagcctatggctgctgggccccaggactctggcatcaggccaggaactacaccatggaaccctctttccaggtttgccaaatgacctctgccttttccagactattctcagtatcaaagatggaatttgtcctgaaagacctttacccaaggacaatgcatccttcagccttagactcctgtagctgctgcagagaaaccgacatatagcagaagcctgatctcccctctgtgggtgaggctgtgagacgccattcttgttcctctctgagtggatttcttgaaccgaaccccccatgggctctgagctctgaaactcatgactctcccttttgctgatctaaaaaaacaaaacaaaaacaaaaagagcagcctgtgatgggcgtcgtagtttcaagactcatgcttgtgactcagtaacattctaagcaatggatcttatatatgaataagtgagccaatcaggtttcagcagagactggcctggatgatagctaggctcattcaggaaccagagggaggggactggggagactgctgactcaacacacacatctccccaagttccggagtcattttccactgtctccctcagaggttcagtcctgctagaaatggtccccacagacagctcattcacttagagacctgagttgccaagggagtaggttgaagtcattcactgcttgccattcttcaccccaagtggggatgtcacagaaaataggaacaaccattcagtatacccttggaggggtaagcatcctaacagggtgcgtaatatcgtggagcggttcatgtggtagcagaggccaggcagtgtattataacctcccccactgtctctccaacattccatggcaagacacgttgttttccctcactgagcctccattccatattctctctttctctctctctctctccctttgaggcaggctttctctatgtagtcctggctgtcctggaacttactctttaagaccagactggccttgaactcacagaaatctgcccgcctctgcctcctgagtgctaggattaatggtgtctgctaccatgcccagctgtctccattttctgagcagatgagatgtcaaatgtacttgctacctggaggtccctaggattatgagtttcgtggacaaccccccccccaaaaaaaaacagacagacaacaaccctcacataaacagctgtggaaaaattgccatctgaccggagcccataaaagtgtcactttgagcctcgtcttaagaggcagaaaggcagtgcattgaatctctcgatatcacagtatcaaagcaaaagtcctggggctacttcccagagagctgaacaaagacaatttgtcttctcaaaatttaatggattccctccaggctcttggctattgacagcaaggaatggcaggaacttttctggcttccccctaaatgtcagagtctcctaaccacaccccatggagacatagtgatttttgttttcactttttagtatgtggatgtatactgtgtgagtgtgcatgtgccatgactggaaaacggaggtgagaggcaactagcaggagtcggttgtctctttccaacatgtgaggtcctggtatggaactcaggttttcaggcttggcagctagtgtctttatgtgctgagtcatctcactcactccagcataatgttttgttcttcagtgcagtaccacacatgcagtgccgtacgtaccatgcatgtagtgcagcaccatacatgcagtgccataccacacatgctgtgcagcaccacgcatgctgttcagtgtcatgcatgtagtacagtgccacacatgcagtgcaatagcaagcatgcagtgtggtaccaagcatgcagtgtggcaccacgtatgcagtgcagtaccatgcatgcagtgtggcaccatgcatgcagtgcagttccatgcagtgcagtgccacgcatgctgtgcagtaccacacatgcagtgcagcagcacacacgcagtgccataccacacatgcagtgcagtaccacacatgctgtgcagtgccacacatgtagtacagtaccacgcatgcagtgcagtaccaagcatgcagtgcggcaccatgtatgtaatgcagtaccacacatgtagtgcagtaccacacatgcagtgcaataccacatatgctgtgcaataccatacatgtagtgcagcaccatgcatgctgtgcagtaccacacatgcagtgcagtgccatgcatgctgtgcagtgccacacatgtagtacagtgtcatgcatgcagtgcggcaccatgcatgcagtgcggcaccaagcacgcagtgcagtaccatgcatgcagtgcagcaccacacatgcagtgcagtaccaagcatgcagtgtggtaccaagcatgcagtgaggctccatgcatgcagtgcagtaccaagcatgcaatggagtaatttgccctcattcctctcaatggcacctgccttttactgtgccccagaatacacatagccactgtgaaggcagatacaggagtccctggtgcccctctgtgctggaagcagtggttgtctagagtggatagctggagtgagcttcagtctgtggcagggaagataaggagtgtggtggacaaaaatggcagaggggagaggtcttcggactggctgatgccacagtccatctctgagaatgccgtaaagatgaacaagctgcacccagaccttggggttcattgtctttgttggcttcttttccactgagtccctcaggttgtggaggagcctcccagagcatcagaagcacccaaagacagagcatctctctcttccctgcaggcttcctcgggtaagcaaggcttagcagacaggcagctctgcatgggatccctgaatctgtatcagctgcacagccttggacaaattcacatctgagagcctgtgtttcccacctgtaaaaatgagtatgttaataccacattctcataaaaactatgaagataaattaagtgagattatatatatatatgttatatatatatatatatatatatatatatatatatatatatatatatatatataaaacgcatcaggcccacagtgctgtgcctggctcttggttggcattaagtaaccacagcggtcatagcagtcccttttatagtgggccaggcttatctggctgttgctaggtaactgtggggggggggtggagtttagacaaaatgctaacagtattgttggacctgatgctggccccttgcctttagtgagaccctgaaaggcttccctgagcatgatcggatgggcacagagctcagctcaacttcctctcttgtttcggcattggaaataaaggctccttctcaaaattccccaaaagggatgggcacaagccctctgtaccccctcctttcctcaaagtcttctctttctctccatcttcctctttccttcttccaagtgatcagcagtaccggaagtggagggtcattatgcttgagtgacaggctacttggctgatgtcatcctagtctagagagcacagacaataacagttgctgtagatacagggcgggatgatttctttggatctctcaggctctcagctttgacttgtttgcctacctcccttctcccaagtcatcacttaagagagacctttaatgatcaatgaaagcgctaaaaacggaaaagcagggaccacgcctcccttgaaggcctgccagtcccaggctgttagagcaacccctgcatttttaatagggacaaggatagaagccagcagattacagcagaaccagaggtgacagtgtgcatttttgctgggtgaatagtcccagaaagtataactatagcttgaggctgacattattaacttaaaagaaaaacctgaggaaggtcgtggtggactactctgtaatgaagaagtgaaagctgcagagagagaaccagggccggaatccccaccttactggttagtgcagctttagattcttctatttataattgaaaacctcagcttctttgtctctggaaaaacaaacaaaccaacaagagtagtaatacatatgccggctacggggcatatgtcaaagtgctcgccaaggacagccactcaatcctatctattttacctccaaagaaatggggacaaggggagaggggactttgtgtaattgtaaatcaaggagagacatggctttaaaatttttaagttcaaatatttgagcacaattgtgacgtaacaattgctcggaaaagccagtgatacattgggcgaaaggtgacagacacaggtgtgttgcctgttttggttttgtttgtttgtttgggtttttttgttttgttttgttttgttttaaaggatctacaaaagaaagtgtgctcgggtggcattttctcctgcatttattccgactttctgtattctctaccttctggtccttctgccctacatttcactgaaatgacaaagtcttgtggttaagagtatgggcttcaagccagggacatgcctgtagcacttgttggcgtggaaacaggaggattgtaagttcaaagccagcctgggctatagagtgatctgcagacctgacaactatatataaatcctgttttgaaaacaaacaaacaaacaaacaaacaaagagtgtggactttgagggcagagggtctgggcctggaagtctgcccagaaaatgtagccagggccaaaaactccttctccctctccttagtgtctccagctataccatgggaccggcacgagaccacaagaaccaggctgcaactggaacgaagtgaagcaatgcagccaaagttgggcctgctgtttgttcgttccacatggaacaccccaccttctggggccactcatgaagtccttccctcacttagctggggtgagggcttcctctggagggtgaggtttgcagccaggtcccccaccccgctgtgggaaaccctctgcgtgtcagaaagcctggttaatggcagagcatttgtctctgacttcatttccctgggcaatcgtttggggacctcactaagcaggccctgtcctcctaaacgctgttatatgtggaggatagtgtgcagctacatgtaaactactaatttgtctgcttttttgtcttccttccttccttccttccttccttccttnnnnnnnnnnnnnnnnnnnnnnnnnnnnnnnnnnnnnnnnnnnnnnnnnnnnnnnnnnnnnnnnnnnnnnnnnctccctccctccttccttccttcctttctttttattgaatagtttctttatttacatttcaaatgttatcccctttcctggtttcccctccgaaaaacaccgtccccccccccccctccggctcaccaacccacccactcccacttcctggctctggcatacccccacaatggggcatagagccttcataggaccaagggcctctcctcccattgatatccaactaagccatccactgctgcatatgcagctggaaccatgagtcccaccatgtgtgctctttgattggtggtttagtcccagggagctctggggatactggctagttcatattgttgttcctcctatgaggctgcaaaccccttcagctccttgggtcctttttctagatcctttcctggggaccctgtgctccgtccaatggatggctgtgagcatccaccatgtctgtatttgtgaggcactggcagagcctctctggagagagctatatcaggctcctgtaagcaagcacttgttggcatccacaacagtgtctgggtttggtggttgtaaatgggatgggtccccaggtgagtcagtctctagatggtcatttcttcagtctctactccacactttgtctctgtaactccttccatgggtgttttgttccccccttctaagatggatagaagtatccacactatggtcttccttcttcttgagtattgtgtggtttattaattgtatcttgggtattccaagctgtctgctttcttttctacccctttgccccagtggccccccatccagatcacagccatagtgttaaaggttttgttttttttttttttgtttgcttgcttgtttgtttgtttgtttgttttttcaggagccagtctatcctaccttgctgcgctggaatctgccagcatggtgcttgtgtttctgtcgctgaagcacaaccagctgtggaaaaagtatttactatttagtaactgggtacggggtacggtgcacatgcctgctaaccccagcacctgggagagtgtcaacaggaggattgctatgagttcagggctgtcttgagctacacagtgaaattctgtctttaaaaacaaaacaaaacccaaatcaatatattacccactctaccagccaggccctgatagtgagactgagggttgctgtctaaagccgcaaaagatctcggtggtggnnnnnnnnnnnnnnnnnnnntggtggtggtggtggtggtggtggtggtggtggtggtggtggagggggcgactcggagtcccatgtgatttcctggactgactgggcttttaaaggtgtctggtgaggatgtggactgttttcatctccctcccttcctggagctagccttaatccaggtaatcttatctccctgagtgccaaggtcacacaggagggctctgtgggcctacagttgcaggcttccctctgaagacctccaagatttaacatatgcccttcagctcccacccccacccccaacctctaggctttaggagccttctggtgttcttgatcagccctagagagttttggaatcatctctccagataactcttccacacaccaaaagcaacactcctagttccaagctctgccaccgctagcaatttagaagctgaacttgatgggattttccaattttcccttttagtggcttcctctcccttaacacctttctacccttctgattcctgtagcttattttagaacatgtcaggctcctacctttctaaccagcaagaggctgttgctgaagtcttttaactgcaccagttgtgatgtttaattcatgggcgtgaaaattaattatattcttgtgaacagagccaggggaaatgaccaagagactctgggcatggcccttggagtttagcgagactgtctgcactgagaacagtgaggtgttctgaagagagagcctcctacaaatccaagaagcccacccctatgcctgccagtggtgaatgaaacccaatgcatagcaacaaattttatcatgaaagtttggccatctctctagcatccttatcttttctttaacacacacgcacacatgaaggcacacacacacacacacacacacacacacacacacacacacgtatatattgtgatggtttgtatatgcttggcccagggagtggcactattaggagtgtggccttgctggagtaggtgtggccttgttggagtaggtgtgtcactgtggatgtgagctttgagaccttcattctagttgcctggagccagtcttctgctagcagccttcagatgaagatgtagagctctcagctcttccagcaccatgcctgcctggacactgccatgctcccaccttgatgataatggactaaacctctgaacctataagccagccctaactaaatgttgtctatgagttgccttggtcatggtatctgttcacagcagtaaaacactaagtaatatatatatgaatttttaatgcacatttaacagttttctgttgttatcacaaggatcagctgcaagtggtttagattacaaggaagatttcttttcaaaaaatttaaaattcttctgcaattatgtctctgtgtgggttcatgcacataaatgcagtgcccttggctgccagaagagggcatctgaccctatggaagtggagctggaagaggttctgagctgcctgacttaggtgctggacttggatccttcccaagaggatcacagagccatctcgctcacctcatataatgaagataccttatttcatagtaagaaatcttgaggtaggcacaggggtagagtatttatctggcataaatcctaagagaagttttatttccagcaaaagaaaaaaaaagtccaagaaaaggtactctgagcaacctcgcagaagagcctttgtctgcagaagggagagcctgtctctcttggagtctcatttagtcatagtaaaaactcttttctgatcctcttggttccccttgtagggttgggttgaacattctttggtaaaccgtgttctggcatagcaatggattagcatgggccgttcaacctaggcaggagtgccttctatctctgtaaggcatcgggtagctttgaaacaattgaaatttacatcttacagttcagggcacctgcagagtgtggtgtctgtggaggtctgcttccgtcctggcctgtaccttttttatcctgtctactcatgagggcagaaggggtgaaggctctctggggcttctcttttgagggtatggatcccattccataaggataccacggggtggtttgatactgatggctatgccttcttcaactaccatatgaggagttgaggatcctgagaggaaattcagaaggacacagatagtcaaaccatacatgctacctcaggctggataagagacaaagaagctgggctctgcagaaaggaggggcacacagctgctgggacacttcttctctctcttgtccttggggtcaccttccgtggccctggttgctttttttttttttaaagatttatttattgattatatgtaagtacactgtagctgtcttcagacactccagaagagggagtcagatctcattacagatggttgtgagccaccatgtggttgctgggatttgaactctggacctttggaagagcagtcgggtgctcttacccactgagccatctcaccagccccctgccttgtttttcataacagcctgctctgtgcatccctgactattgactgggatctctgacctcagcggaaaggaaccgcttctccctccgctgattctagctagcatcaggcatttgatcacagagacacaaagtaaaagaaagtaactaatacaaagatctttctcgacccttggaaatcttgcctttgggcctgtcttccctgagatccttcatcacctggaggggagactgagtatcaacagcttttcttggcttggcagggtgccacatcgaatgcgagctggggggaagctggttctgaagtagggaattgttaaccctgcttggaggtgaattctaaatcccagttaaaaagaaacatggagagcgggtgattcgggatgcgttctttcccacagcatgggacacgttctcctattctgctgctggctttcgtgcctgaccgttttcccctcatagttggtgacacaggatccgccatggccttttacaaacaggctttttgtatttttcttaaggaagggacatttaaatctccggttctcatttcgctccattcagcaatttttgatacaacattttattaactttctgaaaacttcacgcacatatagaatgtattttgatcatatccgtgccctgctattcacccctgtttgtttgtttttaacctaccctgtccaatttgtgttctctgtgtactcaaggtagcaagggcatccactggagtctggtacctttaaagaatcatgagtccccttgccctggatgtcatcaagtgttaatagctccttagctagaggtgggagcatgggagatcttccgtgctccatagtggagcgttgacctgcttgatcgggttcagtagctgctctgagtctatgagtgcagtggtcctgtcctgtccaggcatcactttccctctgccccactccctgaccttccccgacccctgaccctccctgacccctgacactccttaagcaaaacaatgggagccttggctacagagtctggaaagccacttttgcaagtgtagacgtgcagaacaagaccccaaatgtagctattgtgtaattgttcagcccagggcgtatacaaatcacttacttaaggtaggcactaaatggatattgggtggatgcttgctggatctccctgacagcagatacctaatggtgcctctgaaatgtttctgatagaaaagtcctctttccacgagcttgacaagaatagagatgaaagctcagccttgactttatcttcttcctaggacacaaagacttacaatgggctctaatgtatagcccagaacaaaactatatcacttaggctgacttagaatttggagcaatccttctgcctcagcttctcaaatgcaggcattacaggtgtgcacaccttgcccttcctacctggtacctgagaggagcaagtctgatttctccccaactacggttttcaaggcagttgtggaaattccacacacggaatcagacctatgtctcagaagttaatccactcctctaactcacagctttgtaagaggcttttccacatggctagtgtgaaacccacctcttcgaagcctgtgactcctgagagtgtctccagcatgttggttttttcccctggactctctgtatgcaaatggagccttagccatgtgcacaacgcccgccctcgaacaatctcactctgcagtccaggctgacctgcagcttacactgatcctgttacttagccccctgacttctggaagtttctaaaacttgaactttggggatacattcaagccagagcatcaaggacatagacaagcctgagttccttttcatgttgaattttgtcctccatattccgaaaagcagacgcacttctcagccattctgggactttgtgaaatattgaggcatattcagcttttccttgagggaaccatttaggcttctcttgttcagggacatgagtggagagacaggtggtgagtgctgagagcccaggcgatcctgcttcagggaagaagcgacttacagtatggggaagagcagagcagcccctccggcccctgccacattcctgagcatggcctccagggtagccagatgtgtctctaacctaaaggtcagagagattttggactccgcagagtagctcaggtgctaattaacttcccagtttctccctggccaggcacatccctcatgaatactaattgggtttatgaaaaagataaagtattttcaagtgcagaagagaatctctgggcaccgcagtaatggcactcagtatcatgccggtgtgctctgtgctcaggctcaggagccctgagggaacccatgtggactctccttttctattcctgcttggacacaggtgggttgagagactgtgaaaatctaattacaatccatttcccacacatttgtggtcctggtcttagtatgggccattgtcttagtcagggtttgtattcttgcacaaaccatcatgaccaagaaggaagttgcagagtaaagggtttattcagcttacacttccacatcgctgctcattgccaaaggaagtcaggacaggaactcacatagggtaggaacctggaggcaggagctgatgcagaggccacggagggatgctacttactggcttgctcagcttgtttccttatagaactcaggaccaccagcccagggatggcaccacccacaatgggccctcccacccttgatcattaattaagaaaatgccttacagttggatctcatgggtgcatttcctcaagggaggctcctttctctgtgataattccagtttgggtcaagttgacacacaaaacaaccagtacagccatgttgagaggggcggagtaagcagactgccatctttgcccacagaaacattaggtgaagtgggtgaggttcattatgactcagtgtgatgaagccagaacagaaacggggccccagggacagctagaggaggaaaaaggtggtcaaggtcccttgtgtgacagggtgacgtgaagtcactttcagaaaggtgagtgagagtcccgaggtagaaagtgagggaaaatgcttcatccaagcagatgtaaggcacatgctaaccgtgggacgtgcagctgcaggaagggcagtggccgacaatgcccacaagcactgtgtgcttctgtgtaccaggctcatcaccaagcaccttctggattgtgactctctaagtccacctaatgacaacagtttttgggatcttaactttagtttgaatacgactttgaaattaaagatatcttattgccagttcataggggaaacgtcacctggttaacttactggatagcacaatctgatctaaactatgtttcctacttactcttatttcatagcaaagacctgggcacgttcccttgggaagcccaatgctggtgcatttctgcgggattaccttcctacgatccgaacgtttctgaatgtcgaagcacaccaggtgttttataagggactgtggacatctctcaaaggagaaaccggtgccagggaagacagtgcttctggaaattgcagagccaggaaagggcagtcacagtttgcacaggaacttctgtgcctggggccaggtatcctgaggtgacaggctctgacgtcctatagaggagctactggggcctgggatgcatgagtcactctggagtggctgagccctgatgtcttggtgacagtgcaaaggatatgggtaccattttcccctcatggcctgtgtggggatggaggcccaggtaccctctcagctactgtgttccagggaatgaagagcttgtgcctctctgtctccatgagccgcttctctctgattgggcccctgggcagctgaggagactaagtctgtctggccttcatccttatccgttctctttcccatcacagtctcctgcttgtgaacccttcagtctctgaggccagttgcaaagaggatttttttaaaaaccaattctggagttttataggtcacagccaggaccagccttacgttccggctgagagagcagctagtgggaaaagttgtttttaaagacattggctttctaaagcccccagtttatgctcagcagctgtcccaggcatctgagcaggctctgggctggattctgtttcagccattttttttgtttgttttgtttttttgtttttttgtttgtttgttttttcgagacagggtttctctgtatagctctggctgtcctggaactcactttgtagaccagactggcctcgaactcagaaatccgcctgtctctgcctcccgagtgctgggattaaaggcgtgcgccaccacgcctggctgttttagccattttacaagcgctggggaaattgtggacattggcagtgtgtcctgattttcttccgtcaagatctgagcggagccttggacttgaaagcaattaattgtgctgatctagaggaagttgatgtcaagcctcctggctcttcctgagaggacaaaaaagggaatggatattcatgatccattatcccttggaaatctaccatcaatttcaacattatcatgctttatttaacagacaggagcattaagtcagggtagggtgaggggaaatttgggggcttctgagttcagtggatccttatgtgacaggtcttcacagagtccccacgtgaatgaattcctcacattgtgggataatgaaaagacagaaaggtatgctatataaggtttgccagtgctggagagcaaacccagccccccccccctcaggcccctctcctctccctgccccccacatgcaaaatactcactctacctctgagccttgggttttgagatgaggctctctctatacatcaggctttgaatgtgcttataaagcacaggctggtcttggactcacattcctcccacctctgcctcctgagtgctgggactcgggaaggagctactacaccctacttatttctctcgtcttttgctttattcacgattgcatggcagtgtctcggttgtgagtggagcagtgtggggcattctgagaacccctttcctgccttggttctactctgcctattgcagagaccagatgagcagatccccaaggactaggtattatcactaagttaatgatgacagcaaacgtgtttattatcttacagctctgtaggttagcagcttacgcaggtcttactaagctaaatcaaagtgtctcccacactaggcttctttccggagctgctggtcgtgaacgtgtttccttgttcctttcaagccttgtctatgcccccatcttcccatcagcaaggccagcaacagtatgttgaatccttcttgtaggaccacaccccaatctcctcttcagcatctctccacttctaaggatccttgtggctctgctgagaacacttagatagttgaggattctcctttgacctgtaaagtgacagccacagacaccaagacctaagatgtgagcatctttgaggttgttctgcctatcatatccaggcaccaaagaaaggggacctgcctttggtcctctagttattgtaggtactatttggatagacatggtcagctatgtacagcttactttgaagagccctgtccttgtggtggggacattgatgggtcatcaagcttgctggttctatgacctcatctcctccttcctggatgacttggccagttcacaggtggtgtcccacagaccatgagtgccactttcctagaaccattcaaaggacctctgatggtgttgcagtttggacatctacctttggccaggtccccagggtgacctggaggcagtatgagatctggaagctgtcagatgaacattttacttgggatggagatgaggagatattcacagccctgcccaaaacacacacacacacactatacatttgtattaaatatatgagtactctcatcagatctcattatagatggttgtggttgctgggatttgaactcaggacctcaggaagaccagtcagtgttcttgaccgctgagcatctctccaggcttattgtggagtcattaaccttaacagggagagcattcccaaaggaggaagacgaaaacaaatacattatcataaaaaagctttacacttagaagccgccaacacttgtggaggccaacgccctgctggttctgccccatgggcaggaactgcatcacctggtcccttccccagcagttgtgaaggactcagcagctcagctcctggggtgggtgtgggtgtggggcagacttcagaggcaggaagggagaaggggtggggaggggaaacccaaggctttctccaagtctcctgttctctactgaatgatcttgggaaagcctatgcctgtccatcttaaagaaagcaattatttctgaccatttgtactgtgatcatcagaccccttgctctctgggccaaactatagtcttactccctgcacacaggtacttctgttttaggtatctgttgttgctgtggctgttgttgttcttaatttgttaacacatcatgggcatagcttacacctattgatgtgaatcatagattatgtgagttttatatatatatatatatatatatatatatatatatatatatatatatttctaatatttacatcaatattttataattgtatttataataatatttataatacaattttatttatatttataattttatttataatatttattttatttataatttatattctaaatttatattataaataaaatgatgtattatttattattcattatttaatatattacaatacaaatatacaaatacaaaatataattttatttatactatttatttatatttatattagtatataacaatactatagtagcatatataattattacatataataattatatgtgtaatataatgatatatgttataaatatttatattataaataaaatatactatttatgacatatttaatcatatatattattaaagaaccacatttaattattgggtgtgcttggcaaacatgtggaggccgtaggacaacctggggagtcagttctctggttccaccctgtggattcagggatcaaactcagggggtcaggcttggcagcatgagccagcttgctctcccacagattatcttgtaatggcagtgtagagccgcaaggcttgcacgtagctcatgtgagtccttccttcgatgctcttatttgccgtgctccatcttagctcactcatcctcctgcagggaaggtttgatttgtgtgcctgtgtcatatagctgtgaagcgagtcccagttccccactccctcatagcttgggtatcaaggcttagtccccactgtggcgatcagaggtggggcttaaaggatgagattggaccctgagagcacagaccgaatctgcctgtggatccgcctgtggaatcctaaccaagtggatcattaggcagttttggaaactgtggaaggtggggcccggttacaggaagtcactgctgatgctgcaccgagcacggtatgcctatgaacacctctcttttgccttcctccacggcatttctgccttgtcatgggcctgacagctgtgaagcctgcaggtattaaagccaaaattaaaaaaaaaaaatgttttcatggttttataaatctgtcttaggtcatctatgtttctttcattaacatatcactttaggtgggttatgttctgagcgtttgtcacagggacaaaagtgaccaacacagcacccttccttacctgtctccccaggctctaccgaatgggggaactcctttaccaacatgagctgaagctgtgctgtgctcgtctgtgcccagggggctagggaagaagttagcgcccagctcacagttcacccacgttctattgattccgtttctgtcataaaacgtcgactcttctgtaaagtgctgacatatttatgggtctgggaaaacattgcttgctctgctcacgtcagtcccctgactaatctgtgttagtgcagtggcttcttattaatttattaaccttcagttctattaaaaggcagatcgtgagagcagcaaggaatcttgatggtgcttccaagtctcactctgctgtcacactggctgaggaccacagagacagaggttaggagtctggaggctttgctctggaccacaaatgtcctcagagctgggcttcataagcactttccagtcaagatccctttgtattcaagcaaccattacacagccccaaggatatagctatataaaagaggcctacaaatcaaacattccctgataataaatcataaagaaatttactctagacaactctttattatacagataatcttcctgtttgttaaatataaaggcaaatttgcatgctaatgagacagaaatgcttgtttttccatacagagcagaatcttggctgaatatttgaggcgtgggtggggacatcttccgcccatctcagagcgtgccaatagctgattttataatcatcaacgctgagaatgccgtttcacatgaatacataatacaaagtggcagaaataggcttagggccatttcagaaactgtggtaattccaccctaaccccaagacatcagcctgtagaactttgttctctgttatcaccaggagggttccagactgtccttatccactgagctatctcactagcaaacagaaaaattttaaaatcaaacattctagtgccttctaccacatgtaactaacttctttttttcttcttttctttttctcttcttttttccctttctctcctcaccttccttaaactttatagcatgtattttgtgggtgtttgtgtgggcatggacgttccatagcctgaatgtcggaggtcagagggttttctgcagctgcttcttgctttctgtgggtcctggctctgaactctgggcacccggcttggtagcaactgcctttacccattgagccacctctcctgcccttctgctttcacgatgagtcctggtgtctaggagctgagggaggccttggacttgctatgtggcagaggctggccttgaactctctacccttcctcttcttcccaagggctgggattgcaagcactcaccaccacacttgactttacctctcctaggagactctctgttctgtaggacaaggtgcaaaactcatttaaaaaggcattcattcagtcgtgtaatcacagtttgggaggtggaggtagggaggctgaacaaaagccagaggctagcctgggctacatagtcagattctatttgagaaacagccaagggggagtaggaagaggaatgacatgtgggagggaatgaatggggcagaagcagtttcctatattggaataacaaaaggccatcagctacatggcttaaccggcactgatttgtctcagcttggaggctgtctgccccgcgaggtcagggtgcttgcgctgtcggcttcctctttgccttctctttgctatgcagctaggctgactctccacttgctttttcctctgctcagaagcatccttggtgtctttttttttttttttttttttttttagcagattcagatgttcacctctttaagaaaatattctatatttttatttatgtacaatgtgtgtgtgtgccgcatgtgtgggtccctatggagactggaggagggtgcttggatcccgagagctggagtttcagggagttatgaaccttctgacgtgggttctgggaatggaattcaagtgctcttgaccagtaagctgtctttccagccgtactgagaatactctctcctgtaaatacaatagccagactggactagggctgagtctaacatcccattaaaagaacttacctccttaaagagcctgtctctaaatataccacctttgggcttcgcaatatgaatttaaggggaacacagttcagcccatacttagcagcagcttggattatttattacagcagtcacaacagtgcttcctggtgtctttctcggtgtggtagaatagcagagatggcatcctcctggtttatgatggcgtgagtcacagacactcccaggagaagggttgggaaggatatagggctgctgttccattctgagaactgtggaggaaggaaccagattcttgcgtccacccagaatgccctctctgttgttctgctgccagtcatatctctcagatacgtcctttctaactgaaacctgcgtatctttttccttacgccgaccatggcctccccttaaccagaccactatagctatgcttacatactttctaacctcagctcccctgggtgtaagattctggagtgaagtgtagacttgggagagggcaggaaggaggacatgtgctgaaaagagggggctttggggtcggagttacatgatctgaagaaagtgcagtaagtccccagagaacagatgcgcttcctgaaaccgccaaaggtggccacgcctcagccggtctatcagtggctgtggggtgttctttctttgggtgtggccagaatcccagtgtcagatgaagggagagaaccaggatagaatgaattccactaacccgaagaggagaaggcaagatgaggcttgggagaactttgtgaataacctcagtgtcagtggtggggatgtcagatgccacaggccctggtgacgttgatgcgattggtagcagcagcagtttgcacagctggaggagccgcggcacctgtcttcctgtaatggcagatatatgccatgctctaggttattaactgcaactgttctcatgaacccagcactggcttctgccaacagcagctctcagactggagaaaggtatgcagtgagctgagggctggtgtccctgtttagaaaggtttgcagcagggaaaagctgatatcccaaatcctccagtgaccaggtgcctgctcccacacactcctgctgtctgtgcctaccacattccattttaggtgttgaggttataaatgcgggtaaagccagtagacgtcctgtctaggtgaggagaggcacagtggtgtgacaagcgcaaatggcgacaagggctgacagatgcttcaaattaactgagctgatgaggaggtgcaccggagtctgaaagacaagggctggggtgaacagagaaaggtccctgcatatcacaggactactaataaaacagagagggctgtgtacagagagggctgtgtcctgtggtgcatttgggaggctgagaaacgaatctcaagtttgaggccagtttgggacacatggggagttccaggccaacctgggctacacagtgagatcttgttgtcagtgctctctgtccggtcttggtgtgttgtttagggtagacacaaggaggccggggaacagtgggctgctttagttagaatgctcagggcacctggttactcccaggatgccctgctgtggtccatgagtcggttgctaagggctgagtgggggtgattttctgctttgtgtaatagacttgggctctgtacgtctttgtctgatgcacctgttctttcccatgatgcatctgattttaatcacaagcacagccaatctcagacaggcataagatagcaaacggggctacttttttccctataaattaattttgaggacagatttttgttttattatgcgtgcactgaaaaccactccatgctgggctgtcccgttgtccataccttcctgatacattccagaatgtatttgaccacagactaggggttaccagcagagggagttaccatggtgttgctatgagtgacctacttcattgtttagagcaagatgcatgcacgttaagcttggggtttccaggttgctaagtgcattactgggaaagaggtttgggtataattcaaactaagcagaatcctgggttttcaatttgtccctgtgctggcctgcttcaactgttaaaaaaagaaagaaagaaaaatgtaagaaagtttttgacgttcaaagacaagcttgatcgtgggtactggatggaaacgtgttatgcatggatggctcagaggaagagctgtcagctctgggcccagggaagacgggaaattctgagaaatgagtttgacctgagtgttgagtgtgtgcttgcttgaggaagaactctggcatttgaattttttttttaatttttaattgattctttgtgaatttcacaccgtgcatcccaatcccactcatctccccactcttcatatctgccctctgacctggcaaccacccccacaaaagaagacaaaaacaacaaaaaacaaagcagataaaaaccatctgtgccatggaagcttcggtgtgtcacagcgtgtcacacggtacacccttctgctcaaacagctttactgatggcaatgagtcagcggtctggttcgaggcctctgctaacaccactgaattctcacgggactcctctcaggaatactgttgttgccctgagtcatggagatcctatagctttggatcacccatgccatgagggtgaactctccagctttgtccaggcaaagggcaaggacggctctcctgctctcccaccctcagggacagctcacccacttgctgcaggcgtgtgtgtgtgtgtgtgtgtgtgtgtgtgtgtgtgtgtgtgtgtgcgcgcgcgcgcgtgcgcgcgtgtgcgtggcacctttcctgtacataagccctcaggctgcctcatgggctctacctcgatgcccaggcggggtacaatccagatagtcctgattggtccagaagggtgggagggacatcaagaggttccgcccccaagcctccacagtcagatgctttaaaagacatcactacatatattgagtgtgagaagtctgtgaccagcccatggctaagctgatattcttgctctccgggcctcttgtcaccgagacatgcctcagtcatttgcattaggccgcttcacatttgatgacaaacttgggagaagaagaaaaatgacaatacagactctgagatttctcataagctgaagtgattcctctctgtttctaggccactgactagatgatggattacaatataaatcttgacagaattaaaaaaaaataaaaaagcatggccgggccaaccttaggtgttgaaggtataaaattaaatttcacattgtgtgttatacacgtgaagacttgtcttcatcaggccagtcaggcagatatgatttagtgaactatgtttagagaaatggggaggagaaaaaactatggaagagggtaataatacagattagaggaccatgatttgatacagcacctttctatgtagatcagtctggccttgcttctgtgggccttctgcctctgcctcctgaggatacaatcctcaggtttggggttatagacatgctacgttccaagatgggacagttccccgagccaggctgtgaatggcagccctcagcaggtttctcctggctgtggaataagcgagtgggttgctttgaagggtctgtaggtcatagagaggagcctggacggggctcctctggctagcccaccctgattgtggcatccacttgcttcaatatttcaatgaaaggtcccgctgctctgctctcttactccgaatttttgcatccgggcagcgtcccattttctgtgatgccgaaatacaggagaaggcagagctctcggcttaccttccagtccctgcatgctttcttatgactgccccccccccatcaaattgtctttgtatagttttaatttattctttagccattctgtttcttcactgaactctgcttccgtatctcaaagttgtttcttgacttcatgtttgatttcattctgatgagttggatatatctggttggagttgtttggacacagtgagttcaagagaatcactctcagccgggcgtggtggcacatgcctttaatctcagcactcgggaggcagaggcaggcggatttctgagttcgaggccagcctggtctacagagtgtgttccaagacagccagggctacacagagaaaccctgtctcgaataaacaaacagacaaacaaataaacaaagaaagaaagaaagaaagaaagaaagagagaaagaaagaaagaataactctcgaattcagaaagttctttccattcgtttccattgggcgccattacaatggaattcgtagcttgaaggggacctgttggccttttcacactgtttttgtttctgtaccaggacttgtgtatctggagttcattttctggttatgtaaacctgtgccccccacagctccccaacccatccatgttcttcattcagtggagggatttgcaatgtttctaagagaacaaactctcgtaagagttaagtgtcattttctcaatggactgatagagttgtaggctctgtccgtaatcttcctccaagagttattgcattgatgacagtgactatggaagggtcaacacactcttggctggtccttaccccctcggctgtttggtgtggtcagctgtggcctgattctagcttttctgcactttcatgcctgttgtgggcctccatgcatctgggagctgtatcctcccctctcagctctggcttcatcctggccttcactgctcgtttaagggctcctggcacttagattagcttagacctgattctggcttccccagccttccacgtgggactctgccacctgggcatcttaccctgggttggtttgggactccttcctgggttcatggcttcccctgcagtttttatgcacactcgggggccttgccctgggccagctccagccttcttacttggtccttgtttgctgagtttccccttgtaccttctattctgaattttccattgtctctttacaccttcagctttgccctttctcttctaaaaccaggagataaatttttcttcacttacaaagccaattgtcctatgagaattcctcattgaatagtctcctcacactgcctggctatctgaggtctctctttcaggttctggacaaggaattgcattgtgttgtgagacattgtcaagggacaaggagcctgacatttcaacaggctgttggtgcatctgagaacctgtccgttgttttccgatgctgacagtatcattgctcttgggtgtaagctgccaagcctggttctacctcagaagcaagcattttcccaggacttgggacacatggaatgcacccttgaatctccccaagttgcatatgcacacgtatttctctagtacacaaaacaacgaccggctgcttgtcctgtcaactgtggggtgtggagaggagagggcggtataaatgacagaaaacagttttggttataaggctttccaaagtggttctccaggacagaataaactgtctgtgacagtaaagaaggtgactcctgtgactatcttaaccctaaagctcccctctcacccatacaacttgcccaaagaaatgccagacaccaggaaaaacaggcacccggtgcagtgtttggagcctgacttcgcagggtaccctgaggcacactgcttagtgggttggatcttgtgcctccccaagtttcctttgtgaccttgggcaagtctttgctattcttctaactttaaagtgggctgcacagaccaagctgtgcaactgacccccctcctctgccccggggcagctggtaacacactctgctatccagggaaggtgatcaatgtggtctctgataaagactggattgggtggctggaagagagagagtatggggggtgtggagaaaggatggatgctcacaggaagagtatatcatgttaaatgagtttttaggattgagaccatcaacagataacagataagtaggtttacttgatccagttgtgggaggagaaaggaagagaggctgatcggtttatctggagtcagagaggaagataattcttcccagagcaactcagagacgggaagactccagttctcagccttatcactttctttgcggaggctccatctactccaattagtccaggattgtggtgacagctttgggcttgttcaggcttcaggtcatcagagccttggcaaaggattgaagccatagctctcctggtcagaacacttcagcggctgcctctgcacggcactgcttcccatgtccgttccctctgctccttgtccttgctgagagccacagatactaagcacactgtcaggattctaattctgtgtgatcatctgcacgtggaatgatgctttaaagtcaaggtcagctttagaaagaggctgtcagcattttgccttctgggttttttttttttcttcctactctttgtagaataataatttcccacacaagcaaattttcctggcataaaagacttaattaagattaaatacttcaattgtggttctcctgctcacagtgcctgcttatgattccgagtatccggcttagtagcaagcactctaacttagtagcaaacactctaactggtgagccatcttgttcccaactccaggaatctcttttgctttggcagagatctctaacagggtagtattcttctcatcttctctcttaccccccccccccactacccccccccagcactgggactaaacccagggtgttacccctgcagggccagtactccattccagtacaaaaacagaatttcttgtttacctcccctcctcccnnnnnnnnnnnnnnnnnnnnnnnnnnnnnnnnnnnnnnnnnnnnnnnnnnnnnnnnnnnnnnnnnnnnnnnnnnnnnnnnnnnnnnnnnnnnnnnnnnnnnnnnnnnnnnnnnnnnnnnnnnnnnnnnnnnnnnnnnnnnnnnnnnnnnnnnnnnnnnnnnnnnnnnnnnnnnnnnnnnnnnnnnnnnnnnnnnnnnncttccctcctcctccccctcctcttttcctcctcccccttctcttctcttcctcctccttcttcccttcccccttcctcttcctctttcttctccatcctccccttccttttcccttgagtcctccctgcttcttctttttaaacaaggtctcactatacagtccaggtttgcctcgaacccacagccctcttgcctctgtctcctgtgtgctgggatcaccagtgtgtgctaccacaccccatttcttttaaagtttcaaatctctcgtaagtcattcaagacacagttttctcccacttattttgaatacaatcttcctttggaaatgggtgtcaattgcagatagcatgttggctaggggtgggagccccatgtccattcccccgtctcagcagtgggaccccatctgccttgaacctgtacaggtcctgtgcatgcttccggggtctctgtggagtcctatgtggatcagagtgttatgtctgcaggacacttttcctgttcctccactctggctcttacagtctttctgcctcttctgtgtagctccctgagccccgaaggcagggttggatggaaacatcccatttaggactgagggctccaatatctgccactctgcacactgtccagctgtgggtctgttagttcctgtcttctgcagggagaagcttttttgatgatggctgagcaagacgctgatctatgagtataactgagtgacattgggttgacctgacttataaatggaatttagggaaaggattcttaatgtaggtagagcatccctaatctaaaaatctcttcactatccagcaccccaaacaacaacgcataaaaacgaagtgaaataataaaatgtattgcctgtacattgtttatactcaaacttagagttagatggtgtttgcctttattcctagaacttggaggcagaggtagatggatctctgtgagcttgaggctagcctagtctatatagtgtgttctaggctatccagaattacatagtgagtgagaccgtgtctcaaaaataaataaataaaaccaaaataacttgagtttaaaatgttggctttcttggatgggataagtagaaacggacacagctggatttaatgtcctcattcacctaacacagataaaaatgggggaattgtgtaggtctctcctgcgtcctcctgtgcaactttctccccacccccgctgtggcagtcatattaaccctttggactgagcctgcgcaactgttcctggtgcaaaggcttcctccctttcttctgcacagggcaggcgccttcatgttttccttcccttcacttgactttgaatgggtgttggttcgcatccagaactccaacctttaaaacatatttttaggttaaaacaaacctccccattctaaatccctgcgtgtctaaggggataccccttcacacaacaacatgcacaaaagctccattcaaatccccaagtaatttattttcccccccggcgataatcttcctgctttccccaatatattaaatttgttttctcaaagctatctcaactgtggtctgaaagactgggcagtttctttcccctcctaacccgcagcctctccgtggggttgtgtctcagctcctctgctcccccacaccttggtcctcttgtttcaccctggtgctgatgaggggcaaggtgtgaacgaaacaccttagaagagaaagaagcaaagatgctgtggtggcagcttatgcactgctgattatcggttgtcagaatggtcacagttatcagaaaacgtcctgggtcaggcacagtaatgagagcgggcatctatctgatacaatacagcggcttacagtgctacatacttgaatagacactcatttaactgcctcacaaacctgtgatcaagctattgccatgactcctactttacttaagaggaagctaatgaagtttttagtgaagaatttagtaagtgatgcagttggaacttagacctggtggagttagatctagaacgcttgtagcagtgcaagaggaagctgtgaactctggagtcaggggatctgcttctgaacactgctttccccatattacctgtgacatcacatgtcagctgtgacattgcatatctgctgtgacatcacatgtcagctgcaatatcacatattagctatgatatcacatatcagctgtgatatcacatatcagctgtgacatcatatatcatctgcaacatcacatatcacatttctactgtgacatcacagttcttctgtgacatcacatatctgctgtgacatcatatatcatctgcaacatcacatatctgctgtgatatcacatatcagctgtgatatcacatgtcagctgtaacatcagatattagctgtgacatcacatatcagctgtgatgtcacatttctactgtgacatcacatatctgctgtggcatcacacatcagctgtgatatcacatatcatctgtgacatcacatgtcagctatgacatcacatattagctgtgacatgcagcaatcccttaacttctgacatcagtctcctccagttagaaagagaaccagccccaggatgttctgaaccaatggttcctcattacgcagagttgggcataccaagtattcagtttttatgtgaattatgctgtctcttctgagatctattaactctcctcacttactctatgtcaacgtttccaagtgtctcgaagacattttagaggcttgcctctactttagcaatcgctttctattattccagattactgtggaaaacaaaagaatatgacagcgttgtggtgtggggtggaataatccactgatgtagctgatacagttgacaaaaattaagatgagacactgactgatgtgaagagaaagtttaaataagactagcagaccaaagacatatcatggcgggttaagaagaaagcccaaagaaggaagggagggagggaaggaaggaaggaaggaaggaaggaaggaaggaaggaaggagcgagcaagaaatgacaacataaagtgtacatcagaggacgaggtgtctttccaggaaagacacagagcattgacaccaggatgcctcagccagaggactctgggcggggcctcaggcagagggtgctgggacggggattcctggggtgtctttaggcctcttccctctggccctcattttattagtcagctctgctttcgtagttttctacctcacagacaatataggccatcctagccctaactttcctcgtgtcttccttactgtgtctgactgcagctgccacaggatctggattcagtactttggtttacaggtgagcgtttcataaagtgattccttctttaaaattgagaactagcacttctctccaaccaggcactgacctatgccctttgtaggttttgcttacattcagaggtcataagagaggatccgatctcctggggctggagttacagacagatgtgagccgtcaaggggggctcagaattgaactctagtcctctctgcaagaacaaccaatgatctcttgcagctgcttgctactggttcctctctgcccttctcaagggtcctgaggcaggaaacagtctgactgctcaccagcttactttcctgagtgccatgtttggtccatggagcatggtcttagtttgaacatcctcggcctagggagtggcactattagaaggtgtggccttgctggagtaggtgtgtctctgtgggctttaatacacttgtcctagcttcctggatgccaagatgaagatgtagaactctcagctcctcctgcaccatgcctgcctggatgctgccatgatcctgccttgatgataatggactgaacctctaagccagccccaattaaatgtccttataagagttgccttggtcatggtgtctgttcacttcagtaaaacacaaactaagacaagcacacagcactctagaaaacccagaaaaacagacagatccctgaatgctttgctgttaccccaagtgtctcaggaatgactctgagatctgttgtctgctgcccctctactttgttgaaaatattttaaagctttccacgggagctgaaaatatgagctctctccttaggcttgagataaagaagactcagcctttgcccgtatcccttgtggtgagaagagaagaggggacctgcagcgcattggtggctctctattgactgccccacgtacactctgacttttcccactcttgatctgtatttggcagccgtgagtggtggctgagttctatcctttgagaattttgtttctgatagctgtggtatcagtgcctcacagaaatggaagccgaatcctcttcctacacctcagtcactgaagcaatggagaaacatgcaaggcagggagtgtttcagctctccatggcttcttacaccccaaatgtggtggcttcaaaacatggggagaccattccttgtggttctatggtttggccgatggcttcccgtatagccgccatccttcacaaggcgtaaagctgggtgcttttgacttttagggacagggttgaacacctgtctttctcacagcgtctcattgtttagtgatccatgctggcttccctgtcacctgctcaaccctttcctatagctttgtgtttatggggaaagcaagtgacaagatgagatacttggcagtgatcagggtggagggcaggatttaggaagacgtgatggggtgggggaggggagggggaggggnnnnnnnnnnnnnnnnnnnnaaaatgtcttatattaaaatttttacttcattgtgttttttttctgaccacgttcctaagttcctctgtaatcccttgggtctctttaaaatcttagcgtgtatgaatccagccagcccttcccccatcgtctccccctcccccaacgtagcaaaatgcgaaggttgatcaccacctgctggctggtgcgctgatctatctcaccgggacctccttgaagggcagtacaaagagactgccagtaggcggcgctgtgcccacacctctggcaccagtgcaatgctaccaacttcacgaattgctagataactaaaacaagaaaggctcttcaaaactatgccattcgctgatttcttcttccccatgatgtacctgtggtctggagaggtgactgttggaaactgggctaaaatcctcttgacttccaggttggcgtttccactctccaattctcccccagacagccctacagccatctcggctgtgacttcaaatatcttagcagtgtcaaaaacaaacaaacgaacgaacaaacaaacatcttttatatgtgtaaaaaaatcagcaatgaacagaatagctttttggtgacatttgtttgtacccttttgcatttgtccttgcggtagttagcaaatatctagcagagatggaattaaattttctttaaaaatgtagtttagttaacaattgcaaagccacgggggaagattccagtttctgcaaataattaaaatactcagggatatgaggcagtttgcagtgttaatcttcaattctgttattgctagcttagggatcatggggaaacttcacatctgtaaaatggagcaatggtgttggtgggtcatgtcatagtccaagcggtcaacacgtgcaaatggtagtgagagtagtaatcataatttagaatctagaactcagaactgaaatctagttgtttctattacaacagaggaattcccctccttgctgtgggtatgtaactgtggcataggtcttttgcatccgtgtatagccactccagacactaccgtggctaggaactgtgaaagtggtgggtgagtggcttagctatgtggctggtgagtaaacaggagatgagaaaggaaggaggatgccagaatgacttcttcccaactggggacccttctcatagaagggtgtggtgggggatctgggaaataataataacagcgccaacaagatggctcagtgggtaaagatgcttgccaccaagcctgggggtctgtctgcgtgcaatcccggacatctacatcgtggaaagagagaactgattccagtaaggtgtcctctggttccacacatgagcacacggacacacacacacacacacacacacacacacacacacacacacaccctacactgaaaaatgtaaagaaatagtaactgtttgctttctgtgaaaactttttttttaaggtgtggatctttggtttgtttttgagatatgttgcacagtctagcttcaaacttgccatgtagcccaggatggtctttaattcatgatatttctgctccctagggctgggattccaggactcggactccccacctagctttttgggtcatctcttacggtgtcatccacgtgacactggcttcttctcttcctcttcctcctcctcttcctcttctcctcctcctcttcctcctcctcctcttcctcctcctctttcttctcttcctcctcctccttctttttaaaaaggatttatttattttatttatatgagtacactgtagctgtcttcaggcacaccagaagagggcatcggatcccattacagatggttgtgagccaccatgtggttgctgggaactcatgacctctgacagagcagttaatgctcttaaccactgagtcatctctccaccactcccccagtggttcttgtctgatctctcctgtgctatggttttctcatttggacagatgcctgcaaaagtctagatcctgcatattcttttcagttaattaagctgaccttgtgtctgtttggtaacatgattcaaatattgttttgtttacattttaaatattgaacttaactgggatttttttgtggattcctaccctgtggcacggttatcccggacttcagtgttgtctctttcctgcagctgtaagatgcttggaggtgagagtgttgaaatgttcctttaactaaaagccaagtatagatcagaaatgggccgaaaggcaggcacaagcatggcacttctttttcttttgtgcacagcagagcacagcagagcacaacattgaataatcggtaggtatatttgacaaattgggaatccagttcattagagagcttggagtctaaaaatcaggcagcttacaggaaaatttatgagagtattagactgtgcagctaccagaaaacagggcgccaggaaccgaggctgtattgatgatcttccgcccgaatcggagctgtgtccactgagcaaaaccttctcttgtcaatgtgacttaggggaggaatgttagtgacacatagatctagaagaccaaggggacagactcaaacccacagggcaggatcagctctgcaatatctgtggttgaagaactaggggccttgttcataaagcatcaatgtaaacaaaacccttggggaaagacttagtccccataaggatcaccaggacaagcaccaccaagttatgaaatgcaagttatgctggtaaaatcatctttaaaaaaatcaatgtctggtaaggcttttgagaagtttatgttcccaaactggcataaattagtacaaatatttctggaaaacagcacagtgaagtgttacgagcctcaaaacaccacagcctctagtctggtgacacactagagaccatttcttggagaaataagtcaacacaaagatacaggggctggagagatggctcagttgttaagggcattggttgctcttccagaggacccaggttcagttcccagcacccacatcatagctcacaattgattttgactttaggggacctgatgtcctcttctgacctgcacagacattttcacacaagtattgtacacgtacacactcatacacatgtatacacaaaataaataaattttagaaaaacagaatagattacctaaaaattattaaacagaaatgatatgtttaatcaatataatattattaggactaatatacttgggctggagagatggctcagcggttaagagcactgactggttttccaaaggtcctgagttcaaatcccagaaagcacatggtggctcacaaccacctgcaatgagatctgatgccctcttctggcgtgtctgaagacagctacagtgagcttacaaataataataaatctttgggccagagcaagcggggccagagtgagtggaggtcctgagttcaattcccagcaaccacatgatggctcacaaccatctgtacagctacattgtactcatatacataaaataaataaataaatcttaaaaaaagaataatatacttgtgagttgtgaaaacaaatggaaaagtcagtacaaaacaacaccaagtgaaaaaagagttcacttaactttgtaaacaccgactatttacttccttaagacagaaaccattggaaatgtaaatgagctaaatacctaataaaaaatggaaaaaaaagtataaacaataaaataaaaaaaaaagacagaaaccaagcagttacagataagaggaaatcactcgggctcactgcatagcctgataagaagttaatttgatttttctattgctccaaggtaccgtatctactgcttcctacaaaattaagacacatattaaaaagattaatattttgatgtggatgggtgttttccctacatgtatgtctgcatgccgtgtgtgtgaggtaccaaggaggctggaagagagtgttgagtctccagggatgggagttacagatggctgtgagccactgtgtgagtgttgggaattacacactggaaagagcagttggtgctctaaccactgagcaatctccctagcccctacaaccacagtttaaaaggctttaaaaccttgagttgtgaacctgctagtaatcccagcttcaaggaggctgaggcaggaaaacggctgcattcgggtctccctacacagggttaatcagaccagttagggctgcagagcaagacacagtctgaaacaacaaacccaaacaaacaaaggccgtatcacaaaaggccatttattaagaacaggacaaagatgacccttggctctctatcgtgtgtcttctgacagctgttcagatcttagataccaggtgggaagacagagtgtaccactctgggcctcacagacatgctgcacacggtggggaggagtgtcatggcggctctaagccttgagcggttaggggagactgtctaactgtctgctgggaagctgtctggctgccatctggttgggagcttggctttggtctggttcttatgattgcttggcagtgtggctggtttggacatgaagcagccagcgtgggatcacaaggggtggcaaaagaattggcttccttctgcgggtgagaattcccccgtcactaagccagcaccacagctcagcatcagtctcccatcctctggccagaatcttcctgtctcataagcatggcgtcttctcaggctacatcctgttgttaactcctaagggctgtggcgctcttcagtctcacccgtctttcaaacacagggatcctgttacaggcctgttttatttaatagtggccatttttcttctgtctttataaacagggcaccttcatttgcccttttgtaccaaacgacccccagtctgtgctttgacagaattccacttcagccaggcagagtgagggcaggggcacctgggccataccatctgtgttagtcagccccgtgtccaaaccttggagtgttcatctcctccgtttctctgtttcaatgcacagatgtgcttcctgctggaggtgggacaggtggtcacctgaacgctcttctggcttctgaacttttcttcccatcttgtctaacagtatcggtcctccgcttctcttttcaaattccttacagcaatgggatagcgtcactgagcaggtgacgtgcttcagacacgcctgcgtgcgtattgacctctgcaactgtctacgaggtagacggggacttgttatccccgcctgacagctggagaagcaggcacagagaagagcttgtctcagttcgacaaatggtaagatcgggttcacacccagcagacagtctaaagtgcaggctgttggcccggtgggtgctgaatgcctcctccgtgggccaggcctggcctgtctgtgctctggggaaggagtggtgtggagagcaacgcagaaacgaagactgaggtgaacatgcagctcagcttgggtccttgtgctgtgtacatgtgtcgggccccggcctcttcagatgcttaacctgtgcaaacagagttgtgcttaatgcttgtctttgcaatcagcttcattcgggacaccgtttgagagccaccgctctgcctgccctttctcctaggcctgtgtgacaggaagcacctctctggtgagttccacgaggcacagaatcttcatgtctgggagctgtccttggagaaggacagagagtacctcccctgttgtccaagatctgtttccttctctgagtgattgtcctggatcactttcaattcctgtcttgtttagagggagagacttggagatggtggtcggctgtcaatgaccagagaccagtcactttaaacaggccccgaaaggtagggacatttcagctggtaggagattcaggcaactgaagaaacgcctagaagccaggcacacacacctgaattgtcaaagggcagatctagaaaaccagatgccatgtgatttaaacaaatgaacaaaatcagtttctttgcccctcaggccagtggcttccagttcatgatcctcctgcctcagcttcctgagggctggggtcacacaggtgtgtggcacacctagctaatggcaggtgaatttggaattactgtgagaggagaaaactagaagtggagttcttggcaatgtctatgaccaaaggtgggggtaccaggaagaacagaactgtggggttcagtagagaccaagggtgatacttgatatgaagacaggccttgcagtctcttctgtcacctgggggaggggatggggaatagcttggctctttgagccctctatttgtgtggctgcggatttcagaggtctgagtttctcatcactactgtcttggtgtgtagagtgtgctctgaaccctaaacttcactctcaagaacattgcccagaaggctcagggatacagcagagcttcaagcccgactcctcccttctctcttgcagagacagatctggagccctttcacccacagcaggatgctgcttagtgaggctactgtggtggtggcggctgcctgggacagccaatgctctggcctggagtggcagggcaggcaagtggcagagaaggtcatgacactcttcccaggtgtcctgctgcccacagaccctgtggactcctaacaagccgccttggccaggctgtgtctatgccaggctttgcccagcagctgtttcctgcaccttgggttcctgacaaaagcaaaataatcgctcctttccactccagcagatggtccccagaggaattctgccaggtgctccaggttctcacagtcctgctctaaaaaatgatataccatgttggtcccctgcagatcacagggtttaaaattaaaatgaagagaactgaaaaaatgtcaaaacagcaagaattcggtgctggctcctctctgtggttggtggtctggcatcttctgtgcacccgaggaggcaacagtcccagcaggtaccctaagcaggttcccagagcagtcctccccccagcaggtacccagagcagcccttcccttccccccagcaggttcccagagcagctctgcccctcacccttcagtgggtgcctagagcagtcccccacttccagcagatatcctaagcaggcccccagaccagtcctccccccaccagtaggtgcccagagcgggcacccagggcaggctcccgaagcaggtgcccagagcagagaggttaggcttgcttgacactgtctgcttttagtgggagcctttctcaaagcagcagctgcccaagagggagcgctatcacctacgttcagaggagaagtaaaaatcccattttctgtcaggacataacattctctagatgatccttgaaggcagattagtaagcaagagaaacgccaacaggttctaggatatgtgcttcatacacagaagcatcctaggagctctaggaatggccagcacagggcctctcgaagactttaaaaaattcattcttcagtcatttcgtgtatgatgtagtgtatttagacatatccagtaactgcttcgtcccccagttcctggcagactcccctcacatccctgcatcctgtcccagcttcatgttcccccttcctcctcctgagtgcagctagtcctgcctatgagtggaaggtgccaacctctggagcatgggcaacctaccacgggccatctccctgcagacatctgacttgccttcccaaagggaccatcaacttccagtatccccttgtcttagttagggttttactgctgtgaacagacaccatgaccaaggcaactctcataaggacaacatttaattggggctggcttacaggttcagtggttcagtccattatcatgaaggcgggaacatggaaaagtccaggcaggcatggtgctggaggagctaagagttctacatcttgtttcaaaggcaaacaggagaagactggcttccaggtagtttgaaggagggtttcaaagcccacctacacggtgacacacttcctccaataatgccacgcctacttcaacaaggccacacctccaaatagtgccacttcctgggccaagcatattcaaaccaccacattcctcatgtaggggtgggatctggggagccccttctctctccacgccagactgttggctgactggatcttgtgcagttgttacagtgttatccacttacaaggaaagctaatggaagataagggcccaagaggaagatagattatgcagattttctagtgcctttgctacatcatcgagggtatactgggcaacatctgactctactaggatgtaagttttgtcttggtgaatgacatgggccgcaccttcccagactgcagagggctctcccactggttgggtattgtcgtggaagtgtgttctgttagagggaagaataaacacttttactaatcatccaaagaactttgaacacaggcatgccccagcctgggtagactgcttactagcacgaagactcttaatccctaggatctgcataaaaaggagcactttcatttcagtaatatttgtctgtgttctaagaggcagtatgtgtttcttaacacagttataaggaggaaaaaccaaaccaaaccaaaacaaaaaaacaaaccaaccaaaacaaaacactcatgtccttaccaataatcacaataaaaataaccagccttcaagttttggattggttccattgaaaaagtgcttatgaacctcgctgtgaaaacccgaggttctttttttaatattttttattttttatttgtttttatatttgaatactctgtcgctgtcttcagacacaccagaagagggcatcagattccattacagatggttgtgagccaccgtgtggtggttgggacttgacccgctgagccacctctccagccccagcccttgctgactcgtggtgacttgagttgatgctggctcaaggtttgggggaaatcgggaggctcctatgaagctttgttttcaaagggatcatgtctaatgtccagaattcaggatgggttagagccaccacagcgactgaaagggaaaagaaaaagaaaggaagcacactctgtcacccgaccatgttgcgaatcggaagaaagggcgccatatttgtggtgagataaaaataaggccaggtgcgcttgtgccctagcacattcctgttggctgactgagccacagatgcctgggcgtttgagcttgtgaggctttatgctaaccatcaagagcctgctgtcgtctctacttcatgtggaagcgaagagttatttatttctgatttccaggaaagccattgtttaaatccacatgctgttctgagctcttcataaaaagcagacggcattttcattgtggattattttttcagactcaaggcctgcgcttgcttgcctgctgagagctgtacctgcccgccaggctccagggatgctgtgattcacgtttccttttcagctgaatttgaaccccaggaagcatcgagtgagttctcctgctgagtatcctcccactggcattaattatgcaacttgaaattacagaaaacccatcagatcttctttcagtggaagaggttggaaatctattcttaatttttaaatttcctcattcctttgttttgagagaaggtgtcagcaagccctaggctggccttacaactcactggcagcccaggttggccttacattcactggtagcccaggctggcctcatactcactggtagcccaggctggcctcatactccctggtagcccaggctggccccagaatcactggtagccaagactggttttgcacttttgatcctcctgccttgtcttcctaactactgggattacaggcgtgcaccatcatagcatctggactattatgatagttatgataactgaagcaatgcagcaaggcagctcttgctgagtcagcactgccaataagaacttcccgggttaaaataactcatatctagatctcttctcccttcacaatgaaccgctcactggcactttccttctgacttgccaaacagaagcaacagcatgagtggataaataaaaagatcagaggagtgtgcgggagtactttgttctgtgagcagagacccagctctgcacgcttggagcctcgccctgcagcagccaccttctcttttaacacgtagtgacaaataacctttccagacttgccttgtgagtcccattttagagatggagacaccgagacacaggatcagaagacaactacacctgttcacatgtatttacagttgcttatttttaaaatctgggttttgcctttcttacctattttagggcctatctattcatggacagggaaaggaagtgtgcatttatttaatttttatttgtttactaccagaccaaagcttaatccatactttaccatgtagctcatgtgtgttactgattttttaaaaaaattattagatatttatttacatttcaaatgttgtgcccttccatggtttcccctccaaaaaccccctatcccctactccctccccctgctcaccaacccacccatacccacttcctggccctggcattcccctacactggggcttagagccttcacaggaccaagggcctctcctccaactgatgaccgactaggccatccatgtgtgttctgattcgtaagtatagtcatgggcattaatggtgtgtgatgcagggagggnnnnnnnnnnnnnnnnnnnngagagagtgctgaagaccagtctggactcaaactcagaggtcacctgcttctgcctctcaagtgctgggactaaaggtctcttctcttctcttctcttctcttctcttctcttctcttctcttctcttctcttctcttctcttctcttctcttctcttctcttctcttctcttctctcctctcctctcctctcctctcctctcctctcctctcctctcctctcctctcctctcctctcctctttcttttttccttcttttttccctttctctttcttcctttctcccttccttccttccttccttccttccttccttccttccttcctttctttctttctttttttctttctttctttctttttcttcctttctgcattaaaaaaaggcaccagggattaaatggacataggctctaacaaatgccaggcttgtgctctatccctgagctgtgtctttatctgcctttgactgaatttttaccttttattttgaggttcttaccgacttgtccaggcccctccacaaatcaaccagcttgggtgtgcatttatttgtttttctttttaaaaacctctgagactacaatataattataacatttttttccttccctttctttctccaaacctatatatctttccccgatctcttttaaattcagtcttttttctcactcattgtttctgaacgcatatatgtaaatgtgtatttctaactataacccacccaactgtataatgttgcgtgtatggatgttttcagggctgacggtttggcacaggacaaccaatggtgtctcttccctggggagggcctgctctccggcttccagctttcctcagttgcctggagttcgttgtgtctggtagaagccttgggggctttctccctgtctgctttggcatgtgcactggtgtggtccttgtttcaatcatgtttaggcaggcatgctggtgggactttatgtgtgcagcttcggacattcccaggagacacagccgcacaggaaactccctcatccttctgctcctgcaatctcttcatccatcttctgccaggctccctgagtactgggtaccagagagtcctgtgatgtgtccgctgggactgggcccatagctctgcatcttgattggttgtggttttctttatttttatcttccttcagagggatcaacatttgtgtatccatgtatgtatgcatgtatgcatgtatgcatgtatgcatgtatgcatgtatgcatgtatgtatgtatgtatgtatatctctgcacatgtgtgtgggtatgcatgcataattgtatatgtggatgggggactacaggacaactttggctgtagtttcttaaagactgtttatccactttttttggtggtggtgggggtctgttttgccctggggaatcaggctcatcagagagcagggttctgacgtcagaatccatgtgcagacacacnnnnnnnnnnnnnnnnnnnnnnnnnnnnnnnnnnnnnnnnnnnnnnnnnnnnnnnnnnnnnnnnnnnnnnnnnnnnnnnnnnnnnnnnnnnnnnnnnnnnnnnnnnnnnnnnnnnnnnnnnnnnnnnnnnnnnnnnnnnnnnnnnnnnnnnnnnnnnnnnnnnnnnnnnnnnnnnnnnnnnnnnnnnnnnnnnnnnnnnnnnnnnnnnnnnnnnnnnnnnnnnnnnnnnnnnnnnnnnnnnnnnnnnnnnnnnnnnnnnnnnnnnnnnnnnnnnnnnnnnnnnnnnnnnnnnnnnnnnnnnnnnnnnnnnnnnnnnnnnnnnnnnnnnnnnnnnnnnnnnnnnnnnnnnnnnnnnnnnnnnnnnnnnnnnnnnnnnnnnnnnnnnnnnnnnnnnnnnnnnnnnnnnnnnnnnnnnnnnnnnnnnnnnnnnnnnnnnnnnnnnnnnnnnnnnnnnnnnnnnnnnnnnnnnnnnnnnnnnnnnnnnnnnnnnnnnnnnnnnnnnnnnnnnnnnnnnnnnnnnnnnnnnnnnnnnnnnnnnnnnnnnnnnnnnnnnnnnnnnnnnnnnnnnnnnnnnnnnnnnnnnnnnnnnnnnnnnnnnnnnnnnnnnnnnnnnnnnnnnnnnnnnnnnnnnnnnnnnnnnnnnnnnnnnnnnnnnnnnnnnnnnnnnnnnnnnnnnnnnnnnnnnnnnnnnnnnnnnnnnnnnnnnnnnnnnnnnnnnnnnnnnnnnnnnnnnnnnnnnnnnnnnnnnnnnnnnnnnnnnnnnnnnnnnnnnnnnnnnnnnnnnnnnnnnnnnnnnnnnnnnnnnnnnnnnnnnnnnnnnnnnnnnnnnnnnnnnnnnnnnnnnnnnnnnnnnnnnnnnnnnnnnnnnnnnnnnnnnnnnnnnnnnnnnnnnnnnnnnnnnnnnnnnnnnnnnnnnnnnnnnnnnnnnnnnnnnnnnnnnnnnnnnnnnnnnnnnnnnnnnnnnnnnnnnnnnnnnnnnnnnnnnnnnnnnnnnnnnnnnnnnnnnnnnnnnnnnnnnnnnnnnnnnnnnnncacacacacacacacacacacacacacacacacacacacacacatacacactgggagatggagagtggcatcaattccaagccacctgtgagcacctcgcctccttgtcagagagctgggcaggagccagcatctgtacacaccgattccccgtctagtaactgagactcgccctgtctttcaaagacaagctgtatgttatttgaagaggctttcgaagaagataataagaagtcccacagggagcggggaggcatgctgtgtacagtgcgaggccccagagtaagctggcctctgctcctgagcacttagctcatagggcgatactttggggtctctgtacttgaaaaagactagtaggggaaatgataaaagtaactgatttttgctttgttttgttgtttaatttttgtcaaatgttaagtaattgggtgtctcaaagatggctcttctcatacaggttgagattccctgattggaaatgcttaggatcagaagtattttggattttaaattcagatttaggaatacttacatacgcataatgaggcatcctggggatggagccaactctaaattcaaattcatcatgatttacatgtaccttaatatacatacatatacacaaaaatacacaactacacacacatgtacatgcacatatacatacacatgcacatacagacacacatacacatgcacatgcatatactgacacacatacacgtgcacatgtatagaaacacatacacatacagacgcacacacagacacacatacagatgcacatactgacacatatacacatgcacatgtacatacagacacacatacaaacacatacacccagacacatgcacatacacatgcacttacagacatacatacaaacacacatagacacatacagatacacatacaaacatacatacagacacatgcacttacacatgtacatatagacacacatacacacacacagacacacacacacagatatatacacatactgacacacatacacacacagacatctgcacatacataaagtgcagacaatgtgttggcctgacctctcacaactacagaaacagcagagacatttattttagctcagtttcagagatttcaatccatggcttcttgaggtaaggcttgatgtcatggcaaagagcatgtgacagacaaagatgctcaccccgtgaaagccagcatgtagagcaatgggagggggcagtggtattaagatacatcttcaaaggcgtttgccctggtggcttcctccaaccagatcccacgccttagtttccccatcctccaaatgatggggatcaaatgattcatcaaacaatgaatccattgatctctcatgacccaaacaccactgaataactgaccaactgatccacaattgtgtaccaagcctgcgacacacgaatctgttggagcacacttccaaaccatagcagcagttacagtttggtgtcctagcgcctgtgttgaccacatcctgtcatgaaagtctactggggaattttctacttgtgacattatggtactcaatatgtttcagagttcaaaggatttcctttttcagagccttggatttgggaagctcaaatttgtgctttgtgcgaatactgcgaatacttctactagttgactgacatgttcaagggcggatcggcagctgaacagtgccgtccttggcagatgctgggaaacaatcttaaccccaccttttcccagtcatttagcttgggtcacttgtcatgtgtgctgtcagtaagggctgacagcatcatcctgtgacaactaagggtgtgtgtgtgtgtgtgtgtgtgtgtgcatttatgtgtgtgtatgtgtgtgcattttagtgtgtgtgtatagtgtgtgtttgtgcttgaaggcacacaagtggggttcagaggacaatctatgaaggtacagtctcttcttccaacatctaagtcccagctatcaaactcagttatgatcacaatgtctgagttcttaactcaagacacattgtaacaaatgtcttcccatcaagggctcttttatatgtatgtatgttttgatcaagcctattccccatttcctctcttttgatgcctcccccattcctcaccatgttcccctcccaacttcatatgttctttaaaaacaaacaaaaaccgcactgagtctgagaccgtctagtgctgtctggattacacaggtgtaggaccatctactggagcatgcatagcctctcaagggtcacagccccaagaaaactgactgtcttccagaagccaccaactgccaacagcacctcatcaagaggaacccacattttgtacagtgtgtgtacatgtaattttacatgcttgcaaaaagcaaaccaacaataaacaaaaggatacaaacatgctttgtacatgagaggaatgatggtgtggttataggccatggaaatagtggatgtgggggatgaggagaaagcctgtcgggatgtgcatgggagagccaggtttaaaggcagtgagggtcgctgtctgaagtaacagagatggaggggtgcccaggcacagatgttgacagggcagagatggatcgcccaggagagaagttctgaggtttttagttgaatcttcctggaagatgtgggcaattgttcagagacttacgcaatagcataggagaagctgtatgcggcaatggtggaagactgtggatgccagagagggactattggtattgaattcagaacgttttagtcacccataaaaaaaaaaaaaaataaggtattgcttctgagcccacagtgtccaaggctttgtggaaacccttctgattttgagagagccattcaccaagtgcctaggaatcgcctcaaagtcttgagccttgacgccgtctagtggctactctgtagctctctggtctctgtcatgagcgagcacacaaagctgggtctggatcacaggctggcgtccttctctagcttgcactggggtcctcagtatcagcactacctgtcaacctgctacaaacgcaagcacaggtgcacatctgtaatcctggcactctgacggcagagtcaagaggtcttaagttcaacacaggatgtagtgagaccctgtcgaaacaaaaacaaaacccaaaaatatcaaaaaccaaaatgaccaaaacccttccaagtcaacccgaacttgctgtgttaggcggtgttggtaggaggcatgcacattataaaaggcagtttattagactggctgacacggggcctgggtcatccagcagtgactgaaggcatatcatagctgtcagacaacagagatgatgcctctgtggcctctgtctggcactggagtcccatggagaccctttgtagaccctggcactcagcctacaggggnnnnnnnnnnnnnnnnnnnnnnnnnnnnnnnnnnnnnnnnnnnnnnnnnnnnnnnnnnnnnnnnnnnnnnnnnnnnnnnnnnnnnnnnnnnnnnnnnnnnnnnnnnnnnnnnnnnnnnnnnnnnnnnnnnnnnnnnnnnnnnnnnnnnnnnnnnnnnnnnnnnnnnnnnnnnnnnnnnnnnnnnnnnnnnnnnnnnnnnnnnnnnnnnnnnnnnnnnnnnnnnnnnnnnnnnnnnnnnnnnnnnnnnnnnnnnnnnnnnnnnnnnnnnnnnnnnnnnnnnnnnnnnnnnnnnnnnnnnnnnnnnnnnnnnnnnnnnnnnnnnnnnnnnnnnnnnnnnnnnnnnnnnnnnnnnnnnnnnnnnnnnnnnnnnnnnnnnnnnnnnnnnnnnnnnnnnnnnnnnnnnnnnnnnnnnnnnnnnnnnnnnnnnnnnnnnnnnnnnnnnnnnnnnnnnnnnnnnnnnnnnnnnnnnnnnnnnnnnnnnnnnnnnnnnnnnnnnnnnnnnnnnnnnnnnnnnnnnnnnnnnnnnnnnnnnnnnnnnnnnnnnnnnnnnnnnnnnnnnnnnnnnnnnnnnnnnnnnnnnnnnnnnnnnnnnnnnnnnnnnnnnnnnnnnnnnnnnnnnnnnnnnnnnnnnnnnnnnnnnnnnnnnnnnnnnnnnnnnnnnnnnnnnnnnnnnnnnnnnnnnnnnnnnnnnnnnnnnnnnnnnnnnnnnnnnnnnnnnnnnnnnnnnnnnnnnnnnnnnnnnnnnnnnnnnnnnnnnnnnnnnnnnnnnnnnnnnnnnnnnnnnnnnnnnnnnnnnnnnnnnnnnnnnnnnnnnnnnnnnnnnnnnnnnnnnnnnnnnnnnnnnnnnnnnnnnnnnnnnnnnnnnnnnnnnnnnnnnnnnnnnnnnnnnnnnnnnnnnnnnnnnnnnnnnnnnnnnnnnnnnnnnnnnnnnnnnnnnnnnnnnnnnnnnnnnnnnnnnnnnnnnnnnnnnnnnnnnnnnnnnnnnnnnnnnnnnnnnnnnnnnnnnnnnnnnnnnnnnnnnnnnnnnnnnnnnnnnnnnnnnnnnnnnnnnnnnnnnnnnnnnnnnnnnnnnnnnnnnnnnnnnnnnnnnnnnnnnnnnnnnnnnnnnnnnnnnnnnnnnnnnnnnnnnnnnnnnnnnnnnnnnnnnnnnnnnnnnnnnnnnnnnnnnnnnnnnnnnnnnnnnnnnnnnnnnnnnnnnnnnnnnnnnnnnnnnnnnnnnnnnnnnnnnnnnnnnnnnnnnnnnnnnnnnnnnnnnnnnnnnnnnnnnnnnnnnnnnnnnnnnnnnnnnnnnnnnnnnnnnnnnnnnnnnnnnnnnnnnnnnnnnnnnnnnnnnnnnnnnnnnnnnnnnnnnnnnnnnnnnnnnnnnnnnnnnnnnnnnnnnnnnnnnnnnnnnnnnnnnnnnnnntccccatccttctctctagtactactggagtactacactggagtactagcctcctgagtggatcgactgagtactagcctcctgtgtggatcgactgagtactagcctcctgagtggatcgactgagtactagcctcctgagtggatcgactgagtactagcctcctgagtggattgactgagtactagcctcctgagtggattgactgagtactagcctcctgagtggatcgactgagtactagcctccttagtggatcgactgagtactattgactactagactgtgttttgtggggtgcttagcaatagagctggcttctatccactagaggccagtagcacccttcaggtttcagttgtgacaaccaataatgttaagatatcaccaagtgcacagccttgtggcatggcaaggaaggatatctgacctccatcagagaaccataaccttaaagtgagggcgacagtcttccctgatgaggcagggttatggctgcattccagggcaccccaggagccaggggtggcttgaaatttgtacatattatatctttcaaccttacaataagcccgtttacaacaaatgattgcctgtttatgaatgcagaatcaccaggtaagttgtttaacctggtgcagtcctggactcatcttagccattatgttctagagcagagtacagagtacacatatgcgttgctttttgtgtatgtgtgtgtgcatacaagtatgtgtaggtatgtgtgtgtacatgtgcatgtgtatgtgcgtgtgttcatacgcatttgtgtggaggccaagtcgatgtctggtgccttcctcaatctctttccaccttatttgaggctaggtctatccgggtgcagagctccccgatttggctaagctggagctccagggactttacctgaggattggagtcccaccttcctgcttgtgtggcaagcatcttagcagctgagccacttcctagtcctgtcatgtattttctccatctgtgtctccagctatgaacctgcaagcatctccctgtctctcttcagaattaagagacgcctggagaaatagccaataattggccagtgcccagaactgatttttccagacccgtgagttagttggccaaaaccccaaatatcaaagagggatgcctgcttcgatacccccacaggggttgcctcgtgcccaggagtcctccgcctctgtttgctacccctgcttctccccaagttcttggtggatgaagttcttggttcttccattccctgcagctgcacatgcctggatatcaaaggctttgtctgctgtatggtgcctcggggccatctcacaccatctgaggctgctaggtccaaaccatgagaatgcaaacaggacctggatagagttcatgtcaatcagtcgcttagcatttacccagctggaggcagcatctgcagggggttggcattgttggcaaagcagcggctgatctcagcttcactgtttgaatgttgaatactgagtttgattgagcaggtgggacctgtgcttctttaaaaatgccacttctagagcaagggtttcctggcactccaggtgaccatgatgtacagccaggatctactactgtctgctggtctgaaagggcttggggctgagtatttagccccagttttttcatagagagatcccaagttacttaatgtctctaggcctcagttttgcacctctgtgaaatggaaattcatgacagtgaaactgtgattggtaaagtgacagccccgagccagacttctgtgacccttgaccttctctccattctccctccatgtgctttgaggctgcggctgtgcctcatctgctgatggacacttgggttgcttctaccttctggctctgtaaataatgctactgtgagcagggtctggattagatggtgactctggctttaccattttgaggacctcccacacatttccacttcgtcactccctctcacatccccacaagcagtgcatgaggcttcccacctctccatatctaagtgggtctgaagtggccatggatagacataaaaatgcacacatatacatcttttccagcctcagggttctacatttaccagtgactctgctccaatgttgcctccttgtaggttttgatttttcaaacctacctttaataagggttcttaaatgctttagcctcccttctagcccaccacccaccagaggttgtggaaaagaaaggttattagcatatggggggaaaggacctgtttagaaattgttctttggagcaaatccaatctgcgttgttaggaaatcagcagcggcagctagatccactcacaaacacttcatggatacaccagcagtccagttcagtagagtcaggatagtaaacacaaatcagccacggtggcacgacctagcagaaacagccaggcctcagtccgatcagtatgagtcagcaggagggaccaggatcagcagggaagccagcgttctctgcagtgcctctctcaatgaagtgaagatccgtgaagatgaggactggagacagagaagcgttgcaaagccagctaggcaagcctcccgtcgctgtccattgagtcctagatatactccctctaaatatcacttgtcctcccgagcgtcttgcctcactacatgagcctgtttcataaaactccacataagtgtgtatcagctgacctcactctgccaactggcctgagtccgcgtaagtggcaagaagccgcagaaacatcttgagaagtacttaggtgcttttctctctatggagtcacaacaaacctagctcagcagtgcaatgtaaggggaaccaatgtatgcttgtccttagcgaagaacccttcatcacgcatcctttcatgtgtttgctttatcaaaacattctttcacctgtgtctgcttcagtgaaatgtcccttcacatgtctgcctcatgaaaacactatctgacacaactgactttctaaagagaccagaagtctccaccttacctcctcctcctacctgccccgatcccatctcatccttaaggtattaacttaagctacataccgcctgtacagctgcctttggagtcccaaataagtcagctccttttatatactatttgctccaatttctttgcagcacttgacataatttaaaataattcggcaagtgatttactttttaatctgttgtcagtttatggggagaggggctctccatgatcatgtgcccaccatgcaaatccagacctaagcttaatgactggcacataatgggggctcaataaatgggagctctaatgaacttaggtactcttgtttttggaaaacatgttaaatagggtgcaaaagaatggtcatggtgtttgtgctggtttgtatatgcttggcccagggagtaacactattagtgggtgtggccttgttggagtgggtgtggccttgttggagtgggtgtggtcttactggagtaggtgtgaccttgttggagtgggtgtggctttgttggagtagatgtgtcactgtaggcgtggttttaagaccctcacccaagctacctggaggccagtattctgccagaagccttcagatgaagatgtagaactctcagcccctcctgcaccatgcctgcctggatgctgtcatgctcctgccttgataatactgggctgaatctctgactctgtaagccagctccaattaaatgttgtttttaataagagttgccttggtcatggtgtctgttcacagcagtacaaccctaactaagacagtgttgtcagcaagggaatggatttgcaagcaggaaaagacaaagtaaaccaggacttggaccatgtgcttgtgttctgagctgcttggaagaaaataatgcaccagggtctttcctactagactaaggttgtggtactcaagggacagccagcagacatgccagcatgggcctttctgccttaagctggtctggactctctcacttgnnnnnnnnnnnnnnnnnnnnnnnnnnnnnnnnnnnnnnnnnnnnnnnnnnnnnnnnnnnnnnnnnnnnnnnnnnnnnnnnnnnnnnnnnnnnnnnnnnnnnnnnnnnnnnnnnnnnnnnnnnnnnnnnnnnnnnnnnnnnnnnnnnnnnnnnnnnnnnnnnnnnnnnnnnnnnnnnnnnnnnnnnnnnnnnnnnnnnnnnnnnnnnnnnnnnnnnnnnnnnnnnnnnnnnnnnnnnnnnnnnnnnnnnnnnnnnnnnnnnnnnnnnnnnnnnnnnnnnnnnnnnnnnnnnnnnnnnnnnnnnnnnnnnnnnnnnnnnnnnnnnnnnnnnnnnnnnnnnnnnnnnnnnnnnnnnnnnnnnnnnnnnnnnnnnnnnnnnnnnnnnnnnnnnnnnnnnnnnnnnnnnnnnnnnnnnnnnnnnnnnnnnnnnnnnnnnnnnnnnnnnnnnnnnnnnnnnnnnnnnnnnnnnnnnnnnnnnnnnnnnnnnnnnnnnnnnnnnnnnnnnnnnnnnnnnnnnnnnnnnnnnnnnnnnnnnnnnnnnnnnnnnnnnnnnnnnnnnnnnnnnnnnnnnnnnnnnnnnnnnnnnnnnnnnnnnnnnnnnnnnnnnnnnnnnnnnnnnnnnnnnnnnnnnnnnnnnnnnnnnnnnnnnnnnnnnnnnnnnnnnnnnnnnnnnnnnnnnnnnnnnnnnnnnnnnnnnnnnnnnnnnnnnnnnnnnnnnnnnnnnnnnnnnnnnnnnnnnnnnnnnnnnnnnnnnnnnnnnnnnnnnnnnnnnnnnnnnnnnnnnnnnnnnnnnnnnnnnnnnnnnnnnnnnnnnnnnnnnnnnnnnnnnnnnnnnnnnnnnnnnnnnnnnnnnnnnnnnnnnnnnnnnnnnnnnnnnnnnnnnnnnnnnnnnnnnnnnnnnnnnnnnnnnnnnnnnnnnnnnnnnnnnnnnnnnnnnnnnnnnnnnnnnnnnnnnnnnnnnnnnnnnnnnnnnnnnnnnnnnnnnnnnnnnnnnnnnnnnnnnnnnnnnnnnnnnnnnnnnnnnnnnnnnnnnnnnnnnnnnnnnnnnnnnnnnnnnnnnnnnnnnnnnnnnnnnnnnnnnnnnnnnnnnnnnnnnnnnnnnnnnnnnnnnnnnnnnnnnnnnnnnnnnnnnnnnnnnnnnnnnnnnnnnnnnnnnnnnnnnnnnnnnnnnnnnnnnnnnnnnnnnnnnnnnnnnnnnnnnnnnnnnnnnnnnnnnnnnnnnnnnnnnnnnnnnnnnnnnnnnnnnnnnnnnnnnnnnnnnnnnnnnnnnnnnnnnnnnnnnnnnnnnnnnnnnnnnnnnnnnnnnnnnnnnnnnnnnnnnnnnnnnnnnnnnnnnnnnnnnnnnnnnnnnnnnnnnnnnnnnnnnnnnnnnnnnnnnnnnnnnnnnnnnnnnnnnnnnnnnnnnnnnnnnnnnnnnnnnnnnnnnnnnnnnnnnnnnnnnnnnnnnnnnnnnnnnnnnnnnnnnnnnnnnnnnnnnnnnnnnnnnnnnnnnnnnnnnnnnnnnnnnnnnnnnnnnnnnnnnnnnnnnnnnnnnnnnnnnnnnnnnnnnnnnnnnnnnnnnnnnnnnnnnnnnnnnnnnnnnnnnnnnnnnnnnnnnnnnnnnnnnnnnnnnnnnnnnnnnnnnnnnnnnnnnnnnnnnnnnnnnnnnnnnnnnnnnnnnnnnnnnnnnnnnnnnnnnnnnnnnnnnnnnnnnnnnnnnnnnnnnnnnnnnnnnnnnnnnnnnnnnnnnnnnnnnnnnnnnnnnnnnnnnnnnnnnnnnnnnnnnnnnnnnnnnnnnnnnnnnnnnnnnnnnnnnnnnnnnnnnnnnnnnnnnnnnnnnnnnnnnnnnnnnnnnnnnnnnnnnnnnnnnnnnnnnnnnnnnnnnnnnnnnnnnnnnnnnnnnnnnnnnnnnnnnnnnnnnnnnnnnnnnnnnnnnnnnnnnnnnnnnnnnnnnnnnnnnnnnnnnnnnnnnnnnnnnnnnnnnnnnnnnnnnnnnnnnnnnnnnnnnnnnnnnnnnnnnnnnnnnnnnnnnnnnnnnnnnnnnnnnnnnnnnnnnnnnnnnnnnnnnnnnnnnnnnnnnnnnnnnnnnnnnnnnnnnnnnnnnnnnnnnnnnnnnnnnnnnnnnnnnnnnnnnnnnnnnnnnnnnnnnnnnnnnnnnnnnnnnnnnnnnnnnnnnnnnnnnnnnnnnnnnnnnnnnnnnnnnnnnnnnnnnnnnnnnnnnnnnnnnnnnnnnnnnnnnnnnnnnnnnnnnnnnnnnnnnnnnnnnnnnnnnnnnnnnnnnnnnnnnnnnnnnnnnnnnnnnnnnnnnnnnnnnnnnnnnnnnnnnnnnnnnnnnnnnnnnnnnnnnnnnnnnnnnnnnnnnnnnnnnnnnnnnnnnnnnnnnnnnnnnnnnnnnnnnnnnnnnnnnnnnnnnnnnnnnnnnnnnnnnnnnnnnnnnnnnnnnnnnnnnnnnnnnnnnnnnnnnnnnnnnnnnnnnnnnnnnnnnnnnnnnnnnnnnnnnnnnnnnnnnnnnnnnnnnnnnnnnnnnnnnnnnnnnnnnnnnnnnnnnnnnnnnnnnnnnnnnnnnnnnnnnnnnnnnnnnnnnnnnnnnnnnnnnnnnnnnnnnnnnnnnnnnnnnnnnnnnnnnnnnnnnnnnnnnnnnnnnnnnnnnnnnnnnnnnnnnnnnnnnnnnnnnnnnnnnnnnnnnnnnnnnnnnnnnnnnnnnnnnnnnnnnnnnnnnnnnnnnnnnnnnnnnnnnnnnnnnnnnnnnnnnnnnnnnnnnnnnnnnnnnnnnnnnnnnnnnnnnnnnnnnnnnnnnnnnnnnnnnnnnnnnnnnnnnnnnnnnnnnnnnnnnnnnnnnnnnnnnnnnnnnnnnnnnnnnnnnnnnnnnnnnnnnnnnnnnnnnnnnnnnnnnnnnnnnnnnnnnnnnnnnnnnnnnnnnnnnnnnnnnnnnnnnnnnnnnnnnnnnnnnnnnnnnnnnnnnnnnnnnnnnnnnnnnnnnnnnnnnnnnnnnnnnnnnnnnnnnnnnnnnnnnnnnnnnnnnnnnnnnnnnnnnnnnnnnnnnnnnnnnnnnnnnnnnnnnnnnnnnnnnnnnnnnnnnnnnnnnnnnnnnnnnnnnnnnnnnnnnnnnnnnnnnnnnnnnnnnnnnnnnnnnnnnnnnnnnnnnnnnnnnnnnnnnnnnnnnnnnnnnnnnnnnnnnnnnnnnnnnnnnnnnnnnnnnnnnnnnnnnnnnnnnnnnnnnnnnnnnnnnnnnnnnnnnnnnnnnnnnnnnnnnnnnnnnnnnnnnnnnnnnnnnnnnnnnnnnnnnnnnnnnnnnnnnnnnnnnnnnnnnnnnnnnnnnnnnnnnnnnnnnnnnnnnnnnnnnnnnnnnnnnnnnnnnnnnnnnnnnnnnnnnnnnnnnnnnnnnnnnnnnnnnnnnnnnnnnnnnnnnnnnnnnnnnnnnnnnnnnnnnnnnnnnnnnnnnnnnnnnnnnnnnnnnnnnnnnnnnnnnnnnnnnnnnnnnnnnnnnnnnnnnnnnnnnnnnnnnnnnnnnnnnnnnnnnnnnnnnnnnnnnnnnnnnnnnnnnnnnnnnnnnnnnnnnnnnnnnnnnnnnnnnnnnnnnnnnnnnnnnnnnnnnnnnnnnnnnnnnnnnnnnnnnnnnnnnnnnnnnnnnnnnnnnnnnnnnnnnnnnnnnnnnnnnnnnnnnnnnnnnnnnnnnnnnnnnnnnnnnnnnnnnnnnnnnnnnnnnnnnnnnnnnnnnnnnnnnnnnnnnnnnnnnnnnnnnnnnnnnnnnnnnnnnnnnnnnnnnnnnnnnnnnnnnnnnnnnnnnnnnnnnnnnnnnnnnnnnnnnnnnnnnnnnnnnnnnnnnnnnnnnnnnnnnnnnnnnnnnnnnnnnnnnnnnnnnnnnnnnnnnnnnnnnnnnnnnnnnnnnnnnnnnnnnnnnnnnnnnnnnnnnnnnnnnnnnnnnnnnnnnnnnnnnnnnnnnnnnnnnnnnnnnnnnnnnnnnnnnnnnnnnnnnnnnnnnnnnnnnnnnnnnnnnnnnnnnnnnnnnnnnnnnnnnnnnnnnnnnnnnnnnnnnnnnnnnnnnnnnnnnnnnnnnnnnnnnnnnnnnnnnnnnnnnnnnnnnnnnnnnnnnnnnnnnnnnnnnnnnnnnnnnnnnnnnnnnnnnnnnnnnnnnnnnnnnnnnnnnnnnnnnnnnnnnnnnnnnnnnnnnnnnnnnnnnnnnnnnnnnnnnnnnnnnnnnnnnnnnnnnnnnnnnnnnnnnnnnnnnnnnnnnnnnnnnnnnnnnnnnnnnnnnnnnnnnnnnnnnnnnnnnnnnnnnnnnnnnnnnnnnnnnnnnnnnnnnnnnnnnnnnnnnnnnnnnnnnnnnnnnnnnnnnnnnnnnnnnnnnnnnnnnnnnnnnnnnnnnnnnnnnnnnnnnnnnnnnnnnnnnnnnnnnnnnnnnnnnnnnnnnnnnnnnnnnnnnnnnnnnnnnnnnnnnnnnnnnnnnnnnnnnnnnnnnnnnnnnnnnnnnnnnnnnnnnnnnnnnnnnnnnnnnnnnnnnnnnnnnnnnnnnnnnnnnnnnnnnnnnnnnnnnnnnnnnnnnnnnnnnnnnnnnnnnnnnnnnnnnnnnnnnnnnnnnnnnnnnnnnnnnnnnnnnnnnnnnnnnnnnnnnnnnnnnnnnnnnnnnnnnnatgtgaagatatttgtgtcccatgtaaatgctcaccaaaggtgacttcagccgaggagagagttcaataatcaagtggataagatgacccgttctgtggacagtcagcctctctccccagccatccctgtcattgctcaatgggcacatgaacaaagtggccatggtggtcgagatggaggttatgcttgggctcagcaacacgggcttccactcaccaaggctgacctggctacagctgctgctgattgccagatctgccaacagcagaaaccaacactgagtcccagatatggcaccattcctcggggtgaccagccagcaacctggtggcaggttgactacattggaccacttccttcatggaaaggacagcgttttgttcttactggagtagatacttattctggttatggatttgcctttcctgcacgtaatgcctctgctaaaaccaccattcacggactgacagaatgccttatctatcgtcatggtattccacacagtattgcttctgaccaaggaactcatttcacagccagagaagtacgacagtgggctcacgatcatggaattcactggtcttaccacattccccatcatcctgaagcagctgggctgatagaaagatggaatggccttttgaagacgcagttacagcgccaattaggtggtaacagcttggaaggctggggcagagttcttcagaaggcagtatatgctttgaatcagcgctcgatatatggtacagtttcacccatagccaggattcatgggtccaggaatcaaggggtggaaaaaggaatagttccacttactatcactcctagtgaccctctaggaaaatttttgcttcctgtccccataactctaggttctgctggcttagaagttttggctccagagaggggagtgctcctaccaggagctacaacaaacattccattgaactggaagctcaaacttccccctggtcattttgggcttctaatgcccttaaaccaacaggctaaaaaaggaataacagtgttaggaggggtgatagatccagattaccatggggaaattggattacctcttcacaatggtggtaagcaagattatgtctggagtgcaggagatcccttagggcgtctcttagtactaccatgtcctgtgattaaagtcaatgggaaactacaacagcctaatccaagcaggatgacaaaggacgcagacccatcaggaatgaaggtatgggtcaatcctccaggaaaagagccaagacctgctgaggtgctggctgaaggtgaaggaaatacagaatgggtagtagaggaaggtagttataaataccaattaaggccacgtaaccagttgcagaaacgaggattataaagtaatatgaatgcccattgtaaatttactaatgtgtttgcgattgtacgagggatagttatatcatgttaggcgtatttacaaccttgttattgtttcatgtgaacatgagatattatttgtgtcaagttgacaaggggtggattgtagtggctattcctggttgtcaacttgacaatatttggaatgaactacaatccggaattggaaggctcaccagtgacccttatctggaggcttggagatccttatctggatcttggtttgaagctcttgagccatagtggctatggattccagaagattgaatctccgagtttaaggaacacacctttaatctgggctacgcctttcatctgggattaaaggtgtggtggaacacacctttaatctgggctacaccttctgctggagacaatataaggacattggaagaagggagtctagctcttgctcctgctccttcgcctgcttgctgcgtgagactgagtaactgctagatccttggacttccattcacagctgcgactgaacaattgttgggaattgggctgccgactgtaagtcatcaataaattcctttactatttagagactattcataagttctgtgactctagagaaccctgactaatacaggtatataagggctcttaaggttatgggcaggatcccagcacttgggaggcagaggcaggcggatttctgagttcgaggccagcctggtctacaaagtgagttccaggacagccagggctacacagagaaaccctgtctcgaaaaaataaataaataaataaataaataaataaataaatggcagactctgaattggtcagtctaaataaaaaaaaaaaaaaaagattatgggcaggaagagctgattggtcataacacagaacctaattatcatacagggggaagggtcaattggtcataacatagcacctaattatcttatgtgcaggaaggaagagcagtgattgtgtgctgagtcacagctcttgcaggaagaggtctggcatttgtgctcagacacattttctagacaagttcaggcagataaaaggaagccctgttgagaaaggagtcctccactttgtatgagctcagagagccatccgggcatggcagactgcaaccttgtagcagggttctccagcatgctgccatcactaaagttagttataaaacatcctggtcacttcttactcctgaaacccatcagcagttgctccctcctccctccccacacctgcaggactgacctcatgcaatactattctactttcagccctcacaggggaactcttctataatcagaatttaaatcttccttttccggagagaaggttccagcataatgaggcctgtgttagttatctattgctgcataatgcattatccccaaatgtatggatgtgaacagcactttctttctcacagtttggggtgtggggcaggaatacaggagaagcttagccagggaggaccttgcatgaggctatggtggacaggagtgccgtctgcaggcttggatccgcatccaagcccattcacacgtctgtggcaagatccagcagctgtgaactgggcagctggagcctcactcacctattggctggaggaaccctcttctccttactacataggatcctctaatgtggaagcttatttcatcataactgacttattagagaaatatgcttgcaaatctgttgtcatgttaccacagaatgccaaatcctgccacgtggaatggatggcttgacacagtttccactcctgggcacactccatgagtgtggatggtggctaggtatgaggcttgtctttataataatgtatatagtttaatgttccttctttggggaatgctttccctgttaagattactgattccatgataattagcaacagcatgactctaggaagcaagaatgtgtctctgtgatgctgagaccttcaggacaggccttaaggctgtgggaaagaaccctgagaacatgagtccaagaatatataaacaggaatttctcaactacgcaaaatataaggatgcaatataaattatactaggggcttcagggacctaaaagaacagagacagctgtaccacgagccagcttgtcagaaacttattaagaaaggcgataaagagactgagggagtggcgatttcaaagtgagagcctatccagctaagtttattgtttgtgctaaaaatgcgatttatgcaaaaatcaaaagggaacctgtgtaaaccattaaattgatatgtaaataagacttggtttttgatcagaaaacctgctagactaaattctatccatatccaaattcaactcatgagttgtccatagagcttttgtaatttttttttctagcaagagagagagctgtctcacgcacagagagatctagggagattttgagcagactacagagctgtcagcttatacccataattgatgtcgagtcattcttttgctgctcccaaacaccccttcttcaggaacccctctctaagccaaggctggttcttggcaatagaactgacattccttcatattgctatgctcctttggtcagaaataaattactaaaggggacataaagccattagctaggggcaaacacttagtcatctttgggtcatgaccaaatagctgcttccctctcaatatgtcctgaaaaatttaggcatcagaaattcagaccgctttaagtaaaaatggagtttgttgaccatagaagtttagaagaacgttgtggagactcaaaggatggagaagatcattaggcttctaggcctacaaggtaagcagttcttcaggatcccatgggtgtcccatcacctttgtgtctcatttttcaatctctgcttagctttttgacatgtgacaactaataaaagttcaagacctagaaaagagacagagttgatccagtcggttactctcatggttaggagggcagggtttgtgtttagccaaacaggggttgcatgaaggcctcagaaaaccaacaaccagcacgtctcagtgcagaggctgacttgaacccatgtcagtggtcagaacatgggcagacaagctatgcaaatggaccttacatttttggagacttcccacaggacaagatgatgccatactctccagtaagggccttgttgagaaacatggattgaagtgacattttcacccaatgtttttcatggaattttggcattaattgtataacatccagggtctagaatcttagcttattttttcactctggattttactcctaactacctgacagctgcaaagtgaatagtagagacataaacgccagcgatgacatggaaaacaacttccattccacaggttcatggccaaggttcaagtataatagctaagaagagaaatgctttttatttactgtcctttctgtgacccacaggcaggctcctgtttgtcttttgcttttaatctctcaaccaaggcatgaatcgtcaagctcataaaagccatgtgtcttcaggaactcacccacctcagggctgaggataaatcttgcgttctgaattctattaatgtagattgagtccaagatcagtcaggcacttaacttttgtaagatgtaacattgtgttcctattaaatatgtatactgacatcaaacttgccataattctcccagaaaagagtcacacagactttctacgtgcctgttctggccttggactattcacaaccactgtgaggcctgattcacagcccagtgcttttagtttggcagctttttatgattggccttctagtgctaggtgtatgggccacatcccaatagcctggcttagggctttctctttactagatgtgaaagtgggctgcttcctcacttgaaaacagcaaggtacagaggagtaaagacaaaacttactgaatatttcccagaagcaaagtcatgttgctggcaggtctctgtccttggttcagaaagacttggaattgactcttagtaaagatgctccagtttcatgactgtggggacctgtgagtttcgacaaagctcactcttgtgaggctttgttctctcatctataaaatggcacaagtaataatacaaaccacatacacttgcttaatatgatcaagataatccagttaaaattcttggcaacaatggacacactgcttttaaaatcactggagctagatgtaataatctccaggaccattattgttggatccctatatatctactttctattaactggtagcaccttctatgcctctggacaaaagggaaaccaccatcacaataaacaccatcaccatcaccatcacctctgccatcatcaccatcaacaccacctctaccacctgcagcaacagcagcaacagggacatggggtctcttggcaacaggtaagggtagggcttacacataggatttaccagtcaacccctcagggagcctcaactgtgaatggaggaaggaagcacctgtggtgagctttagagatggtaaggtctataagtcctattctaggttggctataaaaccatgcctcatctgacatcttccatctctagttcttttgaaggcaaatctcatcatccctatggtcaggcttattttcatccatattggccccagtcagacttcattactgctaagcctaccctaatttccttcaaaacgaggcacatggaaccatgatatatgcaggctgcttacagacatgctctttctagaacacttacaagggctgtggaagagatggggagagccctcacttccagaagtgtaggtgacaggcaaaccagaatgcaaagggcattcaagtgattgagcctttgcatgaagaccagaacaaaaatcagcagataaaaggcttttttggtgttgaggagaaatggtgttgaaagcctctggaagttaggccaaggtttccagaaagttctttccacctcttttcacctttccctgttatggaaagctactcaccaaaacaaaacaaaacaaaacaaaacaaaacaaaacaaaacaaaacaaaaaaacaaaaaaccaaaccaaaccaaaccaaaccaaaccaaccaaccaacaaacaaaaaaaaccaccaccaccaccaacaacaacaacaacaaacaaaaaccaaacaaacaaacaaaaaagtacatcttcttaagttactgatacagcatcttcctgtatacagcatcttccttggatggacaccattcccgtggactcgggagagaaaaccgaaggataatctaaaggcttggtgacagtggctgacctttgtccctgcttgtgtcttacagcctacttctgcttcctcctgactgccctgtgtgtaacggctggtggccaccatctgtggagtcacaggtcctacaaggccaagctgcctctcaggatatttctgactgctgccaactccatggctttccatgtggggacagtgggctcctggggaccggctagcaatgtgggaggagaggacagctgggcaggtccttctcttcccttgctctaggcccaatggccagtctcaaacactctcaggctgcaccagagttttcttttttcctctcctggagctatagacacagtaaaatgtgtcttgggggattttgtgcctcaagtcatgctgccaaggagggaaggagacttctccatccagaattcatgctatgaaggtaccgtgacccctgacctttatgtattatgcacttgaacgtcacaataccccatgaactagctgttacatgaatcccaatttacaggcaaggagactggtgggtttgtttttttgtttgtttgagataaggtctcaagtagcccaggctagcttcaagttcattatgtagtcaaggatgactttgaattcttgatcctcccaagtgcaggggttagaggcactgccacaggcagtttataggatgctggaggcggaactggagcctcctgtgtgctaggcaggtagtctgcacctatgtgacatctccatcctctaaaccagtggttctcaaccttcctaactctgtgaccctttaatacagaccttcatgttgtggtgacccccagccataacattatttttgttgctacttcataactgtaattttgctacatttatgaatcattaggtaaatactttttgtcaaaagagtcacaacccacagctgagacttaataaggttaacaaattcactcaatgtgtagaggtaaagtgtgggtcatccagtctgggcagtcatgggcactctcacattgaagccatcatgcttgcaaggcctcctcctctgattgccctgcagaatctcagtgggaggtctgtgagatccggagtccaggactcggggacctaacaccaacagatgctagctgtgaatcacacatcctttctagctcattcccctgtaaaaataagactgccttccttgccagttattacataatccctgaaggctgctgtgcactagagaaacttaaagagaaacgtagacactgctctctttgcgctggaactgggctgtatccttccggtcaattccagttctgggttctccccaccgctttggacactttctgagctgctgggatttgggttgaccatagatttctcttttcccaattcctcatcggatccaggctgctggggtgggaacaacttgtttgcaaagtttctacccatgtttgcacatagacgactctgggcctggtttatcttcactcatccaggaggaatggcaatttaaaatccagggaatcaagcaacctaggagccttcccgtggcctcggacctgcagctgctatggcttcctgagatgggcctcccatccctccaaatatcgcacccaagtgtttctctaattgtccttgtggccaattcattcccccattttaggcctctctacagttggattattcataaagcaaatagctcagttgggagacttatttggcaggagggacttagactcctcgttcaagcacagcgatgacctagtcccagagcccccggatacactgctgagcacagaggaccagcagcagcctcttgctgccatttctttgcttgctctctgcagcatgaactccgtgccttttattttgagttcagccatcatcgtatggctgcgtcattctttaccatagattctgagctcattgacaaaggtctgcgatgccattctggactgacaattttaatttatttcattcatgcagtttattgtatttaacttccagttacacattcacacggttataaaacactccaactatcggaactttttcccaagatgaataacttgtagctgagagtctaagctcagtgagattatttgtgtataactcaacatttgaaaagctgtgtttctgtaacaacacatcacagggcagaggatgcagctttaaagaaagtactaggtagaggatggacccaggccttagaaaaaactcttggctttgcacttgcaagctaagggcctgtatagaagtctttagttttttgcctacaaagggagcataatcgaatcacactcagagtcactggatgacgaggagggtgaggtaactgtgatccagcccggcgtggaagcacacacctgttaaccttgggaggcataaggatttcaagttcaaggtcagtctggattacgcttttaaaaagtgcttatagtagcatccagtaggtggttcttcatcttgtcttttaggtcaattagcatgctatcacttatctctagctctatcacagggaaaacagtgattgttgttacataaataaaagtgaatggctttgggaagtacctttagagatcacatttgacgtataaagactttttcaaggtccatattacagcaaactttttaaaaataattttccttacagtgtttatcaggcacccaccacatccccccagactctgtggtcacaatggtgaacagctatcacaatcctgctgccttcacagcgccgttccatctagtgagatgttagaattacagctgcccagtagaaattttcagtgctttaagacacagggctcggctggtaagagcatgcactgctcttatggaggacctaagtttggttctaagcatctacatcgggtgactctcgactgtctctaactcaagctccaggggatctgacactgcactcatgtgtacacatcccacatacagccgacacacacacacacacacacacacacacacacacacacacacacacgtacatgcgcataaataaaaataaaatattttaaaaatgactctgggaagtttcataatattgacacttagacctaggtgaaagttgtctatgtggctggcatagggcttgctgccatgatagtgtatggtgagccagtgggaacacagtcagtttaaatcatataacctgtgaacagtctgggaggattacaaaaagagtggtctactctggcactgtgaggatggcccccaagccccgactagagtggtttgtgattcactttcactctggtttctgtcttagttagggttctattgctgtgaagagacaccatggctaaggcaactcttataaaggaagacatttaattggggctggcttacagttttagaagtttagtccattatcatctgtaggaggaatggcagtagccacctttacataaacatgaggggagacgcacagccacaaaggcaactcttgcaggaggtcctgatcaagtcagctcagtcagtctacagggtctcaagagatgaagtgaggactgaaaaagaaaaacagacaaaattagaacgtgactccagccatactgaggctctatgtctctccagcctgcttttgtatcattctaggtgcatccaaaagcatggtcagttcttagatcaaagacaaagtaaccaagtgaagtagtaaacaaggagaccatacaatgtattagttagggttttactgctgtgaacagacaccatgaccacagcaagccttataaggacaacatttaactgggactggcttacagatccagaggttcagtccattatcatcaagatgagagcatggcagcatccaggcaggcatggtgcaagaggagctgagagttctacatcttcatctgaaggctgctagtggaagactggcttctaggaatctagggtgagggtcttaagcccacgttcacagtgacacacttactccaacaaggccacacctcctaatagtgccactccctgcgtcaagcatataaaaattaccacacactagaagcaattaagtcaagcagtaagcaaagagatcacacaaggtgtgattcagcaaagcagtaaacaaagccccatggcaactgttgatgatattcttatttgagcctacttccttgtcctagcccagtgacaaatgacaaattcctagaaatggcaccaaaagccctcaacatctcccccttttttgtttcataaacaagactgcgcctatcttaggttattctgacaagaatgccttccttatccattttggaatttacattttcaaaaacaatgtaattctgtcttagattggtaagacactgtacagaaagttatctgtctttggcaaccagcctgttagattaaaaactctgcctggggatccatttttagtttcaagctgtattttggccaccaacatgaggatgttgttaaagccaagttttatcacaatgggcaggaataaaagtattcccaggacaaggagggctaacatgatcaagctatataagccattcttgaagcttgaacaagatggaaatactaaccttaagtcatgaatcaggatgaccaagattaaagaaacgccacacactcccctgacactcctgggatgactttattttgagctttgtattccttagattcatgatctccttatgcaaagttaaaatatccagagaggtgttagaattatgccaaataccctgtaagtatctttgaattttccattggtatttagcatgatactcaaaattacttcttattcttaaactctgaacctactctccaatagtttgaatagtatcaataacagcatcaatttgttattttagatgtctatctaaatcttcttgaatactcagagacttagtaacattttatgctaaacggttaacaaaagtagctgtcttaacttcttgtgtcaaagcaattgcagaagcaatggtgctagtagctattaatgtaatcaaagctgcaataccaccaataatcaagcccactacccttttgcttctgcttaaagtctgactcacttcttccagtatttgcaagtctttttcagaataccaaggttctgtaatactcacaagcaataatacaaaagctgattgatagaccaccataacaggcgtgccagatttcaatacattaacacaactggaaagagtacaatcaattcaacttacattaaataccatagaagaaacaaaagtaattttaacatgatcaattaataagattctaattttaaggaaacacagaaacacacccatcatttgtactattctttataaagcaaacagaaataccatcaccaaatgcattgaaagtcatggtcttattataagctctctgtccagggagctccaagcaggagaatctccagtctggaccacactgctggatgtaccagtggtaggttaggaacacgggaccaatacagcttccctgtccccaccgtcaggttactcagcaagctcacggtcagcatcatttttttttttttttttgtcccagcatcagcacatctcaccaatcactctggcagctaccatacttcttcagcatcctgcagaaaaaacacaaacatgacctcttccccgtattaatacctgattgggatcatatgctgataagtggatctttccatttcacctaggcataagtatgtcaagttgtaggatgccataggacttaaaataatgaggcattcttttaagaattctttggcatccaattttttaaatatttaagtaaatttgtgatgtacagggacataattccctcttttttattttataaagatattgtaactctgaaaagcaaaatcagtttaacagtataaacaatccattttctctaaaatcaataccaagttcattactttcatattagaaagtttggctgccagttcttatatatgaatgtgtgatggtacagcttttaatgcctcattattttaagtcctatctttaataaatctgatttctaggacaaaatttatcccaatttagaggtatctttaaagacctctttccctgggttggctcataccgtgtgttgttgtctagaattactccaaccctgagttaccagtttcaagccaactttttttacccatgttacaaatttttaatcatacccaataacttataagtcaataatctataaccaaacatgcagaacatatgtgtacatttaaacaaacatgaggtggccacacatttacttatatagagtggaaaattttttcttattttttctagctgtagtttcaagggagaaacaacttgtcacctgctgaacccaacaatcacagtcacagagattttctaggagaaacaaccatcagcttccttaccatggaagctgagaagctgctggaccctttaagagcagcttgtacaggcaatcagctcctggcaaggcctctccagctgtgctatattcctagctacaggtgcagggctccaaaatctatcagtttttgttgtgtcagttgagaccactttttttttttttcttgaaacagttaaaactaaatcaaggagcgaacaaccagcagataaagctttaaccatttttttttcttttgaacgtgaaacacagagcaacaatcaagcaacaaaatgaaaacatagacataatgtgacagacatggacagattggtacaccaaggacagacaatagacagaaagggaaaggaactagcgtgccaaagggacccagaaccagaacgaagcattcccccagtaggagtcagggaggaagcttaacatgtcccgacctcttcctctccctaggagagctccagacagcctatgttcatgttccttctcttttgtctaagcacacacacagaggagaggactgcttttctgaaacccattctctgtctcatgtgagctatctctaattaggatccaaagactaaaagcatctatgagaattatcttcaatcctgtatattctatcataattctaaacacattcacaaaatacattctaccattaccttgtctctctttacaaaatttattcaccaccggcccaagtcttttatttccctttacctttcattttccctttcgagtgctcctctctcagcagtgtccttcactgtatcccccttacttgagccccaggttgggcgccatgctgactaagccagttcagtcagtcaacagggtctcaagagagggagggaggattgaaaaagaagaaaaacaaacaaaaatataacgtgactccagactatactaaggctgaaacagctttattctttcccagcctgcttttatatcattctaggtacattaaaaaaacatgatcagttcttagatcaaagagatcacacaagacagtaatctagcagagtagtaagcaaaaggatcacaggagataataattcagcaaagcagtaaacaaagccccatggcaactgttgatgatattcttatctgagcctacttctttgtcctagcccagtgacaaatgccaaattcctagaagtggcaccaaaagctttcgacaaggacctaattgaagacttcctgagagatcaaggattgctgacagacaatgccagataatcaggaactgctgtttggaagagatgctttcttgggacgaatgggacatgggtggagggtattaaaggagcttgcagcagcattcgcatgagcttgctgcggctttctcacctgctcctggagtctgtgccattgattctgaaccacctcatcttcaatccccaagggcaagtagggttgggcagcaggctgtccaggcacaggcagcgatcatcctggtgggaaacatggcagcatgcaggcagacattgtgctggaggagctgagagttctacatcttgatccacaggcagcagggaactggactccacactggggcatgcatatatatatatatatatatatatatatatatatatccatcctacccccaaagactaccccctcagtgacatacttccttcaacaaggccatacctcctaataatgtcactccctatgcccaagcattcaaacacatgagtctatgggggtcatacctattgaaaccaccacattccattccctggcccacataggtatatagccataatgaaatgcatttagtccaatgtcaaaagtcctcatagtctataacagtctcaaacttgtttaagaagttccaagtcttttctgagattcatgcaatctattaactgtaatcgtctataaaataaaatagaagagcagatcacaacataaaatggcacaggatatattttactgtttcaaaacgtaggcagggagcactgtgaggaaatattgaaccaaaacaagctgggcaaacccaaatctctacatccccatgtctgatgtcaaaatgctcttcagatctccaactccttttagctttgttgactgcaatacacttctttctcttgatctggttccacttcttggcaacaaattctctccatttttttgtaagtccattttgcttttgaagaacactttcaatcacagaattcctaggactactgttttgctctcagcacggttagtgttctgctctcatgccactggcgtggcttctgaagagaaatttggtgtagtttttcatcactcctgtgaaataggccaagggttttcttcaccttctcttccttcaagcttttctcttttctttgcttttctgcagtttgactgctcctaagtataggatctttgctgtgcaccctgtctcatgttccctgagatgtctatacaggtgtcttggtgactgagctcagctttaaagagtctgtgtccttaatagttcgttcgtttgttcgtttgttcgttcgttccttccttccttccttgcttgcttgcttcctgtctgtgtgtctgtttgactgtctgcctttttcttttggtttgtttttgtctgcatgggttggaagtgagagactcagctgggtgtttgtgggcaccagtagggatgctgaaagagaaggtggtagatatagggactctaggcttccctagaaatgattcatgaactgctctgggccccgagctgtttcccagggtccatttttcacctggaagacacaggtggcctgtgggtttctgggattttccatttcttcacctcagagagaggagtgtcctgaatcaattctgccggcttggtgcagactacattcaattctttgagttgattgtacagtccacaggactatgcacagcagcaggtggaaggctgctctccagatctatcttctatagggcaagagtgctgccaggctcacattaaattcactggtggagtaaggtaggactttctggaatactgaattgacggatgactgtaaatgaccaacagaaagctagctctctgattgcatttccctgggtaacaataacaaaagtcctcttctctattcacatgtcttacacagacttttgtcttacatggcatgagaactcctcctgttttaaaggaagtcctaatagtgtctttttttttttaaagtaaacagcagctacaacattttgtgatcaatgtagactcgttccaggtctctgtaatgctgtaaaggcagaacaaaattgtgtggttgtaaaccagtctggtccatgtctgtgctatgaacatttctagttaggaactacaggatccttgtggtattctgtgtgacatcttcaggctggcttcactgtgctttctaacttctgaacccaagtttccataacatatctcatgcctacctctctcagagcctgcttacccagatctctatctagccagaggggctggtcatcttccaaagcctctagctaactgttaactattacttcctcatataaaactatatgacaggttttataggaaacagaccagatttaccaggcccctccctcaggataataaataataaagactatggagtcttagtcaagtgcagtaggactgacagaccaaacaaccagaaggattcctgcaagacaagcatattttatatagcccctccttttttaaatgatgtgtacttatgtgcccatgaacgccagaggcattgtgtcctacagacctggagttataggtgctttcgagtcacccaacctgggtgctgggaaccaaagttacatcctctttgagagttacagcaggtactcttttttgtgtttttaagatttatttacttatttcatgtatgagagtacactgttgctgtcttcagacacacccggagagggcattggatccctattacagatggttgagagctaccatgtagttgctgggaattgaactcagaacctctggaagagcagtcagtgctcttaaaccacagagccatctctccagcccctttatataacttaatgaggagtctcacaacccaagattgactgtcagattcatgcttttttttttttaaagatttacttttatttcatgcgtatgagttctgcctgctgcacacacatacaccttgtgcctgcccagggcaagaggtgtctatagcctgtcaccaccacgcctgtcaccaccgactgtgtggcccgtctgccatgggagccactacagtgtctaagaatatgggaggtagatgggagagagagagaagcagaatggtttgagcattatgaagagagatggaactggaaacataagggttatggggaaaagcctgtagtgagtagccagccctgccacctgaggccatggtgaagtcccagcctatcctgcagctgaaagccacgtctgggcctgtggccatgcagcagcaggggttggtgttaatgtttgtggctcagattaccactggagagcatggagatgtccctagtctgggcaaccacctgggaccacacagatgtggtccaaaggctgtgcaaaactggcaccgcctatcactagctgtggcactctggagaactgaccctacttctcattggtgccagcacttgggatagtgggccctgcaccttgcctgggcaacattctgatgctggcccagatagcaaaggcacaggtgagccagctctgagggcgtgagagcaggagagctggcccagcccctcacaggctgcaacactgactggacctcgtgccatgactggccagcacgtggagctggatctggtggtctgattgcctgtgagctgatcctgatggcatgaacacaggagagctgaccctgcctcctgtcagcgatggcagctttgggtggcctggccagagcagtgccggagagctcaccttggtggtgtggataacggagagcctgcgggctgaccagctcagctaccagccaggcccagatccagggctttgagttgtcctacccagaaatctacatcatctgtgaactggtggagcatgtgaaagggctggtcctgcagattcaaagctgcaggataaatgagaggagtcctggtgaatatccaacattggtgctgttaaagaagtcagagactggggctggtgagatggctcagtgggtaagagcatccgactgctctcccgagggtcaggagttcaaatcccagcaaccacatggtggctcacaaccatctgtaacaagatctgacgccctcttctggagtgtctgaagacagctacagtgtacttacatataataaataaataaatctttaaaaaaaaaaaaaaaaaaaaaaaaaaaaaagaagtcagagacctcgagctagcccagcgagtaattaattcaatacacatttgcaagggcagatgtgtggacagaggggtgtactgtaggacacactgcgacacgttacagcatccacaaagagatgttttctatgcttggttttgcttatttatttatttttgcttgtttttgtttaacttgcaagggtgggtggtggatatgaagaggtgggaagatgagtgggactggggttcacgatgtgacattcacaaagaatcaataagaagcttttaaaaatgttatgtagacccagttccttctatgcacagtctcctctaatgacacaggcatgtaggagtcctactgatgtgccagcagctggggaggggagaggacacattctgttagtgagaagttcctgtttggatctgggctgtcctccagagaccctagtctccagcctatgactctattgggcattggtagaaccatcaggaggtacagctgagtagcaggaggttgtctcaggtggaggtgctccagggcatgttgggtccctgctacctcttctcttcacctttccttcctggctgtcaagaggtgagcagccaccatcaccatgatgccacagacccaagacaacagagtcgactgcttgtgcatcccgtctctgaaacacatgtactggctagttctgtgtcaacttgacacaagctggagttatcacagagaaaggagcttcagttgaggaaatgcctccatgaaatccagctgtaaggcattttctcaattagtgattgagggggaaaggccccttgtgggtggtgccatccctgggctggtagtcttgggttctataagagagcaggctgagcaagccaggggaagcaagccagtaaagaacatccctccatggcctctgcatcagctcctgcttcctgacctgttgagttccagtcctgcatcctttggtgatgaacagcaatgtggaaagtgtaagctgaataaacccttttctccccaactgcttcttgatcatgatgtttgtgcaggaatagaaaccctgactaagacatgcaagatcaaaataacagatagaaggaagcttacagttaggtcttaattattttttgttcctcagggtttttttttctttcctccctccttccctctccctcctccccctccttccctctccctcctccccctccttcccttccctttctacccttccttgtcctcccccttctctttggtctctccttccctccccctctcccttttcttccttcttttcaagacaagatttctctgtatagtcctggctgtcctggaactcgctctgtagaccaggctggcccaaactcaaagatccacctgcttctgcctcctgagtgctgggatcaaaggcatcaccatcacctggcaggtatttttctttgtccagattgtttaggtaaaactcctgttgtttaggtccctgtaaaacaatttctttagagaacaggccttattaaggggatggagggcccttgctgaatttttaaaacagctgattttatcttctcccgaaaaaagcccaaggccatcttcttgagattgtcatagtgagaatttgataagatcctgcaagtaaagttcatgaacgtgctgggtttccctgggacagcccatcccatggatttagcttctaatgtccaccctaaccactgcatccatcacttacaatatacgtgctctttctcctggctcccgctgcaggcctctgtccctgggctatgagcttctacattgtgttcatcctgctagtttacagggctgcagtatgaccttaaggctctaatagatgtaagaatttcttgtctttagtttgtttagcttttatttactgtgaagataagagatgacttctagggctagagagatggctcagtggttgagagcactgactgctcttccagaggtcctgagttcaattcccagcaaccacatggtggctcacaaccatctgtaatgggatcttctggtgtgtctgaagacagctatagtgtatttatatatataaaacaaataaataagtcttttaaaaaaagagatgacttctaaacatgctggaccagtatacagaaattatagtgtgatttggaaatagatcaaacatttaaatacagtaagggaatcacacaatcatggggtatgcactttggagtaatataataatcataacaatgacaacatgataacagaactatgcagtgctaacaacataatatataagcagttcattagacactttatacagtcattggacagaacactacaaagtaggcactgttgagttcctgactggacagatgagaaaagaaaagatactatgttgctagtccatgtcacatctgtttcagtgacagagaagattccaatgcaggcaagccaacttcagcttcttagagctgtaccctaatgtctattccaatagagtatgcacttaccttttggttcagcaaacacaagagctaagcactgcaccactctccggggatccctctcctaatgacatatatgttacagagagcactaatgcacatacaaacgaatgaatgaatgaatgaatgaatgtattcagatgaagaacatgaagaacatttnnnnnnnnnnnnnnnnnnnnggcagcaatgtgacatacagggaggtgacttctttagagaacagagatgacctggcagaggacacactaggaaccaaggagcaggagagagcatctgtggagctggggatgcagcccagttggtaaagtgcttgtgtagcatgcagagagccgtcagtatgagctctagcaccaggtaaatcaggtatcttagcacacacctgccattctagcatcgggaggtagaggctggagaagcagggatttaaggtcatcttcagatgcatagtgaattcggggtctgaggtccatgagatcatgtctcaaaaaaagaaaagaaaagagaagagaagaaaagaaaagagaagaaaagaaaagagaagaaaaggaaaaagaaaaggaaaaagagaaggaaaggaaaaagaaaaggaaaagcgaaaggaaaaacgaaagggaaaacgaaagggaaaaggaaagggaaaggaaagagaaaaggaaagagaaaaggaaagagaaaagagaaaaggaaagagaaaaggaaagagaaaaggaaagagagaaggaaagagaaaaggaaagagaaaaggaaagagaaaaggaaagaaaagaaagagattttgaaagtaagaagaacattttagtagctagaagaaagagcctaagcagagatctagtatggtcaacccatgtcttgggaaagatagtcataaatggagccagatgaggtgggggtgagggtgtcagggccacaccctgtgagaccctgccaggaggtttggactttgttctgaatgccctgggaaggtacaggagggagtgacaaagtccacgagttacactggtataagagagactcagattgcagctacaggaccctggagactttgagctacattcaggaccacaaactatctcctaaggctagatttctgtgagggtgtacgccaaggagcctacaccaggggcaggaccctcaatgcgatctccatctccttttaggtttgccaccttccctaaccacaagggtaagaaccacacggataacttccataagtaacctagcaacagtctggtcctcccagacagtgggggcgcctgactcggagtcctgaggagttttccttcctttgcgacttaggagggggcccatcttgtcttcctcctccatgtcttgctcttctgggaacactggagacagatggcggtctcttcatcctctgatgctcaggatggcggtgatcaatcaaagcatcctgcctctctctgactcagggcagaagatctgacggatgcagtgaggcaattggggagtgggagacagactcctggagcggttgtgagagcgccaacatgttccacctgtttttactgtgaaaattaactgcccatcctaccgagacaaaggttccctttacagtagagagtaaaatcatcgcacatacccacaagtagtctctcttccttcgttgttggaaatctaggtcaaatgaaaacaggtgagagaaaacggcccagcagagtgtgctgcgtggaaggatgaacctacccagcagaggcaaacctgacaggagatgactccacagatggctgactgccccagaggctgagcagtcttccccaaatagagtgggagatttttccctttccttaaaaaaaaaatagttctttaagaattgtatatgtatttttactatatccatgcctccnnnnnnnnnnnnnnnnnnnntatcccatccccagcccgattaaccctttctgttcccttgtttctcctatacccagttataccatactgtggctttcctggaaggtccctttcatgtccccatcctaacttcctgccctctgtgggcattccaaatggaacacgtacatctagagagtcaacgctaatgaaatgagaggaacaggagacgacacagaacgtgtgcctttctgggtctgagctccttcactccgaatggcagtttccagtttcattcatttactttccaatgtcatactttcattttcaggacaatattctgttgtgtgtatgtagtacattttctttacccattcttcagctgatgaatggatacacccaggctgttttcagtatctggcggtgtgaacagagcaacagtgaacgtggacaagcagctcgctctgtagtagaatgtagaggcctttgggtagatgtccaagattggtgtagctggatcgtgtggtagagctatttctagctgtttgaagaaccccacatggatacttcactccaccaatggtggacacgtgctctgcttcccatacccatgtcagctctcactcatgtgcacactcttgtcagcactcactcatgtgcacacccatgtcagctctcactcatgtccacacccatgtcagctctcactcatgtgcatacccatgtcagctctcactcatgtccacacccatgtcagctctcaatcatgtgcatacccatgtcagcactcactcatgtccacacccatgtcagctctcactcatgtccacacccatgtcagctctcaatcatgtgcatacccatgtcagcactcatgtcttctttaaaaaaatttttttttatcctagccattctgactgggataagatgaaatctcaaagtagttttaatttacattgtccttgtggctaaggatgttgaacattatagacacatgcagacagacagatacatacacacagacacacagaaacagacacacagacatacatacatacctacacagagacagacagacagacagacagacagacagacagacagacagacacacatatgcacacagagacacatacagaaacacagagataggcacacacacatacgcatacagacagacacacacagacacacacagatacacagacacacacagatacacagacacacaaacacagacacacacaggcacagacacacataacgagacacacacatagatacaaagagatacacacagacagatacacacaggcacacaaacagacagatacacacagacagaaagagacacacaaagtgtatcttatttatatttcaccgttttgagaactctgttctgtgttaaaaattgttccatgtttttaaaccgagttgtttgacctcttggtgtttggtttttcagttctttgtatgttttagatgaacagcaggtaaagatttgcccatgctccaggctgttgcttcacttgactgacaacgtcttttgccacacagaagctcttagtttcatgatgtcccatgtgtgtatcatcagttttaatgcctgcaccacttggtactgctcagaaactctctttctgtatcaacaagctcaagtacactccctacttctcctctctcagactcgggcatcaaatcttagctgaggtccttgatccattttgaggtgactcttatgctggtaagagacaaggatctaacctaactcttctacatgtctctgttcagtgggccagcaccggtcgctgaagatgttgtcttttctccaatgtccatcgctggccttttgccatcaatcaggtggctttggcatcagtaccatgctattgatcagtgtatctgttctcacgccagtactgtgctctttttattactgttgccatgtaatatggcttgatatctggatggtaaggaccctccccccaccccccagcagtatttttcgtttttcaggattgttttagctaccctggcttctttatgtttccataggaaactgaaaaaaaaatttttttttaattctgtgaaggattacattggaattttgatggagattgtattgactctatagatttttttattttaattaattaattattaacatttttcacaatatcaatcctaccaacagggaggtcttcccatcttctggtgtcttcttggatttttttttttcattgtcttagagtttccatcatgtaagcctacatgtaagtaaggttacttccctgacagggtttattccagtattttcgaggctagtttgaatggtatcagttctcctatttctttctttgtatcatctcattgcatctaggaaggctaccgggtgttactgtatcctgctttgtggctgaatgtgtctatcagctctagcagggttctggaggagtccttagggtcctttatgtttagagtaacatcatcagcaagaatattttgacttcttttcctatttgtatctcctggatctcctcgttgccttactgctccagctaaggctttgaatgctacattgaacaggagagggaagggaacagagctgctttgtgtctgactttagtgcaaatgctttacatttggtctgtttagctggctgctggctgcgggcctgatagattgccttttcaatgttgagatggctagtttctccaggacttttatcgtgaagagatgctggactagtttcttcaggactttaatcatgaagggttgctggatttatgaagagaatttttttaggggaattgcaggtggctaaccctcttaatcctgcaccagttttccttaccaatcccaaacaactacagttagggggtcctgagctacaaggcttagccctcctaacaatggtggaatgaaacccagatgtctgagtgtgtctcattggtttcttttccctgctagtctcccaccacgtttatggatgtcaaggaaggctgttgcaaggcagtctttgtcaaacaatttctctctctacctgccacctgctgccaggctgagctacaggctgttacagcatgcccctattcccctgtcggcctgacagaaacacttctgctgctgtttcctaggtgccccagcctgctgatgggcctgtatctcaaatgatttctccctcagctaccttcatttgcatttttcctaaatcacatctcattccgatcattttttacttatattcctaatctctctaggcccatttgtaacatctctgtcctcaacggtgtctgttgcagctcccaatttagaaccagctaaaaatgttattaaccaaacgtgtaacccttgcttctgccgttaatgaagatctcaatgaaactgggtctcacaggcaggggctttccactacctgtcttgtcccctcccctcattagacgctatctcctgaattagctgttctcaccagcagctccgttcatcacagctcagggctttcaattatcctgccccaattcctcctggtgccaacctcaggttcccccacaggactgttccaggatgccactgctttgccattaagctccaaggctacaatacctgcagtgtcactgaataaacagatttaatcgatggtgagatttatggaacgtcacatggcatgtgggcatttctaaccttgcaccagaaaattacggtaaaacctagaaacatctgattgtttccatccaggtttcacccaccaaatcatccattgtttttgtgtaaagcctctggtcaactccctttgaggtcacataaaccgttatgggccactgaggaaagcagggagctgtataagaaatggcccttgtcatgggggcttacagtctaacagagctggctagagtggcatacagcaaggacagtgccatacaggacagtatggaattaaattcaatggcttcacattgttctggctgcagaaattcgaatacaggctgggatagctggaaaaagcctaatgccacacaggttttgaaagggttctttgaccctttgacctttgaaagataaaaagaattcacctaagcagagtcgaggggaaggtgagggacacacccaggcagaggtagagaggagtgaccacacacacaggcaaatgtagagaggaatgaccatcatgtgctgtgttgagtgattggggaagtaaattgacaggcttcagtgtggttccaatccagtactcagcatgtcgtttgtgtatatgcatgtgtatgtgtgtgtgtgtgtgtgtgtgtgtgtgtgcacatgtgcacacatgggaaggccacatgatacctgtaatcttttgcagttgctgtctaacctgtttttaaagacaaattctctcacttgaaccaggagttcacctattcagccagacccgttgttcagcatgcgtctggggtcctccttcctctacctcctgagggctgggattataagcacgtgctgcagtgctgaggtttttatgagggtgctggagacctgaactcaggtctgcatgctctctcagcaagcttttctcactagccagtgacaaacccataaccttctagcttcagtaaaaattcaccggaatagctcagaactcaagaaagtgctcagcttccctaaaaaggaacaatgaaatagccacatccggtaaggtttgggagggcctgcagctcagagctgccatgacctgtcccctggggtcagggagcattaccttcccggcacatcaatgtgctcaccaaccagcgagctccaccaaccttccctgtccagagacattatcaggatttgttgctttggcgtggggatgcaatcatgtgtcaggtgaccaaattcaatctaagctccgcttccctttgagggccaaactcgaaatcatctgactggtccttctagtgatctgtccccactctctaggggtgcacgtgagtcacttcttcagcgtgacaaggactgtcctggccattaagcaaagcaatgccaagcttctcaaagttctgagctaagacccaggaacaaagaccacctttattcctcatcagagtctttgtcttcatctcgcccatcctgtcctagctcggtgctacggacgcctgactttgaaagtcctcccttctcctcagatggtgtcatcagctctccctcaccctcaccctcaactcccctcaacctgaggtctgtcaggtgagaaaggcctgtcctgtccccagcaacatctcctgccagctcacccatctgctgaaagacacacaacgtgaggactcccccacgttctgactcaggagaggcgacaccccaaatcactcacgagaaacggtcttgctgcaaaatgcaagaggacttttaatttaagagcgctcttgggcccacggtcatacaccacgcaggggtagaggaccgtggcgccccgagtagctgggtaagggggtatttaaaggaagaaaccacaactcaaggaggtggggagggtgttgttggaaaataccaaaaataacagttaagaatcacaaggaagtgcaaagtcacaagagtcacaaggaatacctggtaattgtgcaggttatttctcaagacagtttctaagatgttgggagctattaagataacactattgtcctgatctctgaattgggcctccccccccccgccccccgggaagaaaagagggtcaaaagcgggccaccaacacgccgctccgagaacaaccacagattgttccagccctaagtcagcaccggatgtcctgacctcaagataccctgataccaccaagttcctgcttccccgtgtaactgcctaagaatgtgcaattctattgccccccacccccactgataaatacttctccttttgcttgtattgccccatccctcctgctgataagtatctgtacttccccttttccttgtgcaattctactgccccatccttcctgctgaaaggcacttccccttttgcttgtgcatttaaacctcgggcctggcaaatacatttgggggctttgatgcattccagaacatctccgtgtcgttatttgcacaaggccctcatccctctctaccccccatttggttcttaggaggaggtcccctcgagaccctcgaataactggacctgctggacaggtcactaagagcccctaacaatagcacatttgcatagcggtttccagcaatggtcaggtgggtcagggtgactttctttgaatgaacattctttgaacccaggaagcggtaggtggaggaatgtttctatctgttttatgattagcataccttggagcattgagtcacagaggtcacattctcaagcctgggcctaaaggcctagaattttgcttttatgttatatttttttcattgcctcgaggttccagtctcagtctgcacctgtttgtatttgccacaattgctttatgcttgttttatcttccataaaaactgaggttcccccaagacagtcttgattgcccttatcttgtctgccagcataaaaccaaacataaatatttgtcacactgaaagccaaagtggagatgataagaataacaggaccagatcttcaaagggggagatcactgactgctgcaaaattccgcttttatgagaacagcagtaaggggcagcttgtcacataataagcaagaacatggcaggcgtttggggaatgtgagcggcatggaggatgtctgcagagtactctctcacagtgctgatgaaaggaccagtggctggaggcggtgacaaagtcaccacaggagctgcagacaaggatgaaagccggaggcttcacagagggatgcctttgaaatgctttagctttaactttcattttgaaaccatccctgtttaaagcttgagtttgctgctctggaaaacctgatgaaggcccttctgtatctcctgcccccagatggactgatgattagcgccttgcctcatgtgctccctcttctgtccacattcgtgtgcacgtgcatttgcctgtatcctttgaaatcttttgagactgttctaaacatcacactctttctcttctgccaacggaacgtcagagcacatttcctggtaacaagacacagcacttactgagtccagcaatttaatgatgcggcactaatcagaggtctaatccaggatggtaagagtgagttgtgaggcctctctataatcttttagtctggaacagtcttttctttgatcttccaatgttgacgactttgaaatggagtggccaaggtcagtttccctgtagagttggggtctgctcatattcccttattactggactcagagtgtgcctttaggcaggaaatctacccaaacgatctcatgttcttagctttaagcgagaggtgctcgatcccaccttgtcatgttctggtgacatgaactttgatcgcttggtgaaggtggcctctaccaagtttctgtgctgaagatgacgtggcgaatggttgggccgtgcaacacctcagtgtttaatgtactatgagactgtgtagatatgtcttcatcaatttttaacccactagttttagcttacattggcaatgcttcctaaatccgttacgcccatgacagatgccaaatagggatttgcagccatcattccttctgcttctgttggttggcattctcctgaaaggaagagagtttttgtttttgttgttgctgcttattttgggcccatgaattcttattgaatagattatacttaatggctgtcagtattaattttaacggcccggtcgcttgagtttattcagcttgagggattgcagatagactcataccccacatttggtctctcccatccaatcttgctttttcttttctttgcagtgctgaggattatatccagtgccttgtgcctactaggcaagcactttatctcagagcggcacccctagcccaaaccctgatgttcagacactttccccatccccacaatagcatttgccaattccgcatgagctttcctgctctcattttgtatcgggcatttctcccgagttccaattcccgttaatgggcgatagtacttaaagggcaagacctgggagccaagtgtgttcactgctatccaaatgccagggcattgccttaatcttatttcttattgctgtgataaaatagctactaaagcaactccaaggagcaagggcttatttggctaacagtcctaggtttcggtccatccctgtggtcgaggttataggaagtgaacatagctggtctcatcatactcgcagccaagagcagagaacaatgaattgatgcatgtgtgcaaatgttcacctcactttctccattcacataatccaggtgctcagggaatggtgccgcccatggtggagtagggctttccacttcaattgatgtaatcaagagaagtcccaagagacatgctcacaggcccaaccaatctagacaacccctcactgagactcctttcagggtgattcttttttatttttcaagacagggtttctctgtgtagccctggctgtcctagaactcactttgtagaccaggctggcctcaaactcagaaattcgcctgcctctgcctcccaagtgctgggattaaaggcgtgtgccaccactgcctggccttcagggtgattcttgattgtgtcaaattgacaattaaaactaagcatcgtggccacttttttcgaccaaatttttacacataaagtaaaggagtacagaataaagcccactcctctgaccaatgactcttcccgacctgaacatgggaactttcatgaaagggctatcagacacatttctattgatttttttattcttggaaaattatcagagacatttttattgattttttttttaagatttatttatttattatatgtaagtacactgtagctgtcttcagacactccagaagagggagtcagatcttgttacagatggttgtgagccaccatgtggttgctgggatttgaactcctgaccttcagaagagcagtcgggtgctcttacccactgagccatctctccagccctttattgatttttttattcttggaaaatttcacacatatatacaacatatcttggtcgtatgcatcacctcacatctccctccaaacttcatcttctccttcctctcccctccccccatacacgccccaccccctccccattcctgctgaagaggtcagctcaggaacttttgaaaattctaccaggcccctcccctcctggaagagaaaggtcatgggagcccctcccctctggtagggaggggctaattacattcctcagacaacagggaggagggaccaaccacaagccacctgtaggtacgggaggcccagggctcatagacacattccaagactgttggccacctacttcattccctaaagacagatcagcttaaaagtcacattgtcctgccaatcacattgtacccagtggctgctgccttgagaactgtataaaggctcactggatgggctgtgtgtggtctttttctctctctctctctccatgtgcagggcgaccccaacatgttggaacaataaattcctctttctttttgcatcaattccctgctctgagctgttcgttcactcagggagtcccgataaactaaggctagacagagtcttatactgcctttacacgtttgagggtggggtcatccactcagacgtgggtgatctatcggtagccactcctcaaagaaaagtgatcctcccacctccagcagccatcaggagccagtagctcccctgctagagctgagggtttgtaagtccttcccctacccatccaaaccagcattaatgcaaacctttaaaatgcttttgtggggctgggaagtggcccagtttataaggtgcctgttggacaagcatgaggacccaagtttgaatccccagaacccactttaaaacatagaggagtggctcatgcctgatgcctgtaacccagcacaggggtagaggcgggagggaaggacaggtatacaggaagttcactgcccagccgagtagcaggattggtgagctctcgattcaataaaatactctgcctcaaaaacagaaaggtggagagtaactgaggtgatagacctaaggccagcctttggctccgtgtgcgtgtacatcacacacacacacacacacacacacacacacacacacacattaacaagtacagctccctcccaataacatgcttttaaaaaggatcatccaggagtgccggcttatacctttaattccaggaagccgaggcagatggatggctgcaagtttgaggtcgacttgggcaacatagtgggtttgaggccagcttgggctacacagtgaggcttcctttaaacactctaaataagatccaacatctctttacccctttgcagactttaaattttgtcagcaaacacctttcgagtcactaagattggcttctaaactccctccagcttctaagtcctggcgtaggtggagtatcctatcaagacaagtgccagcggccggcagctagcctctcagaagtacctgccagatggcagacacctgtgccaggcccccggtggggactttccggaccaggttttacagattgtaagcatcatctgtaagtgaattagtgctgactcagtattaacggtgggggaagcactgaagggtctcccaggctatcccgtacagtgttggcatatgagctggactagcagagccctgagatgattgatttccagtgacttacaactcccaggaggtgggcagtgagctgtttcctatttgacttcttgacagaaggatgcctttacccagagtgcactctggcacactcacgcaaacgatctctcccctctcccaagcctgcctgtctcagcagatacgttgacatgttaggactggtttccttcccactacttactggaagctcagacaagttatgaatagaagcagaattccctttggctgggttttgagcccacctggaatgctcttttggacttttaagcaaccagaaaaaattgaattacagaatgtaacagccacactgtnnnnnnnnnnnnnnnnnnnnatctgttttcatctctgggaaagaggcacgctctgagctgtgtgaggcgagctcagagttatgtgcagcctgccttccctcttgtcaacagtggaacgcagcctgagtcgaaggaacactcagcttgttttcttttgaggcagggtctcactgaagcccaggttggccttgaacaaatggtaatcccatgttagtcttcagagtgtgccaacatgcccagcagaaatttgttttgatcatgaaataaagcagaagaagaatagtttcatccaggcgggctgcttcagagcgggctgcttccgaggtacactgcctttgcccgagtcccctgtggcatgaggagtgacaagtgtggagaagaatctctaagtgatcagggttgttcaccagggaccttggttagggacaccatccttggttagggcagaggactggtgtaagacagtgcactgcacaccagctgacacgattgtcattggtgctatgaaaacatacaggagcagaaacaagaagatgttcagtgatgggctgagtctcagtgctttgtgtggttccacagggcagggctaaccacagagctcaggacacggcccacggcagagctcctcaggacagggctcaccgccgagctgggacgattcttttatatgtttttctttcttgattatgttttaatttttaaaaatgtcaagctcaaaaaaaatttcaagggaggtgtattgaaccactgtataactttacctatgactgccagctttaaacctctggttgaattttgaatatttggtatatgtgtgtgtgtgtgtaagtttgtgtgtgtttgtatgtgttggtgcttatgtgtgcatgtgtttgtgtgtgtgcgtgtgtgcatgcatgtggtgcttgtgtgtgcatgtgtttgtgtgcgtgtgtattcatgtgcttgtgtgtgtgtgcatgtgtgtgtgtgtgatatgcataggtgcactttttcctaagccatctggatgttaacaacacactcaccacctttccatctcaaaactgcacgtctaagtacaagtgcattccctacatacctcaaaacaacaacaaactaggagttttaatgatcatatgactactatctactgtacagaccacagtcaaatccccccgtatcccagcagtgcccatcatcaatgcttactgttgtgacaatcctgattgagcatctctcctctgctttgtagtcctggccatagagcccagggccttcatgccaggcaagtacttttaagatgggacttttcggttcaggaagataaggactttttcaacaacagtctgcttcctttctcttccttacaagagagaaatccgtacatctgatagagcattaattcatctctcaaccctgccagagacacttctatttgcagatgaaaattaacacagagagttagacctagccaaagctcaggtgagaaggaattgcagaatgctcagccctagatggaacatgtatacttcaccccctcttccaaggcggctcagaggtcgttgtggaaaggggggcagaacagtgtaaggccagagacagtgggtggctatgaggaaacggtgtgttctgaacacgcagggcagctgcacacggggactcacagtggttgtgacactgtctataagacctatgcaagcctaaaccagactaaatggctatcttgccaaaagcaatctacagattcaatgcaatccccatcaaaattccaactcaattcttcaacgaattagaaggagcaatttgcaaattcatctggaataacaaaaaacctaggatagcaaaaagtcttctcaaggataaaagaacctcttactacagagcaattgtgataaaaactgcatggtactggtatagagacagaccagtagaccaatggaatagaattgaagacccagaaatgaacccacacacctatggtcacttgatctttgacaagggagctaaaaccatccagtggaagaaagacagcattttcaacaattggtgctggcacaactggttgttatcatgtagaagaatgtgaatcgatccatacttatctccttgtactaaggtcaaatctaagtggatcaaggaacttcacataaaaccagagacactgaaacttatagaggagaaagtggggaaaagccttgaagatatgggcacaggggaaaaattcctgaacagaacagcaatggcttgtgctgtaagatcaagaattgacaaatgggacctaatgaaactccaaagtttctgcaaggcaaaagacaccgtcaataagacaaaaagaccaccaacagattgggaaaggatctttacctatcctaaatcagataggggactaatatccaacatatataaagaactcaagaaggtggacttcagaaaatcaaataaccccattaaaaaatggggctcagaactgaacaaagaattctcacctgaggaataccgaatggcagagaagcacctgaaaaaatgttcaacatccttaatcatcagggaaatgcaaatcaaaacaaccctgagattccacctcacaccagtcagaatggctaagatcaaaaattcaggtgacagcagatgctggcgtggatgtggagaaagaggaacactcctccattgttggtgggattgcaggcttgtacaaccactctggaaatcagtctggcagttcctcagaaaattggacatagtactaccggaggatccagcaatacctctcctgggcatatatccagaagatgccccaactggtaagaaggacacatgctccactatgttcatagcagccttatttataatagccagaagctggaaagaacccagatgcccctcaacagaggaatggatacagaaaatgtggtacatctacacaatggagtactactcagctattaaaaagaatgaatttatgaaattcctagccaaatggatggacctggagggcatcatcctgagtgaggtaacacattcacaaaggaactcacacaatatgtactcactgataagtggatattagcccaaaacctaggatacccaagatataagatacaatttcctaaacacatgaaactcaagaaaaatgaaaactgaagtgtggacactatgcccctccttagaagtgggaacaaaacaccctgggaaggagttacagagacaaattttggagctgagatgaaaggatggtccatgtagagactgccatacctggggatccaccccataatcagcatccaaacactgacaccattgcatacactagcaagattttatcgaaaggacccagatgtagctgtctcttgtgagactatgccggggcctagcaaacacagaagtggatgctcacagtcatctattggatggatcacagggctcccaatggaggagctagagaaagtacccaaggagctaaagggatctgcaaccctataggcggaacaacataatgaactaaccagtatcccggagctcttgactctagctgcatatgtatcaaaagatggcctagtcggccatcactggaaagaggggcccattggacacgcaaactttatatgccccagtacagggtaacgccagggccaaaaagggggagtgggtggataggggagtgtgggtgggtgggtatgggggactttttggtatagcattggaaatgtaaatgagctaaatacctaataaaaaatggaaaaaaaaaaaagacctatgcaagcctaaaccagactaaatcccatgggggcggggcctgatatcccatgggggaggggcctgaaatcccatgtgggcggggcactgacaattggtaggtgctggctgagggagaggctatgttccctgtggttgtcgcccctggttagttgacactgctgtagtggaaagcctcccattcaagagtgggcaaaacaaattggtcttaatgggctttttagttacttttctattgtgataaagctgtaaccaaggcaacttaggaaagagagggtttaactgggcttatggtttcagaggattggagtctatgatgacagtgaagagcttataagagctaactgaaaatgatggataaggagcaaggcttttgaaacctcgaagctcaccccaatgacagacttcctctagcaagacgggacctcctaatcctctcaatctgcgcattacccagagaccaagtagtcaaacatatgaggctatgggagcgttctcattcaaaccgtcacaatgggactaatttgagaaaggacacagattgtgtgggaagggaggagtgggagggtctgggaagagctgaatattgagtgaatatgatcaaacaatttttctaaaagaactgataaaatattcttaaaatctgcacacaataaaaaattagaaaatgaaaactaaaaaagaggatctcctacagactcatattgtggagagacactgtcaagttcaccttatagattccctccactttcctatgcataaacacacattttgtttgtttaaaaagtgggttaacagcatacataccattttgaaaactacttcacgggactgctttgatggtcattctatcattgcacaatatcctttttgttaaaattttagccacaaaactaattggtctttagtcatcccagagcataaaagagaaaaagcattttttctcatctctgcctcttgaagtgactctaagactttacttaactatttctttccagaaatgtctatgtgcacattattatgcatacatagagaaagacactttctactatatgaatggtacttacttgattaatgcatcacagagtgattggttgaaatctattctgtggaatctcagagtttccctcgtgttctcactctggtgaccattcttgtggccaggtgtttgtatacagccacagctgctccctaaagccagcatccagaagatgatgatctgctagcttaaaagtcatggacaatgtaagaacatctctgccacttagtcctctgtgccagcttcacattcacaccagcaggcaacactgaaacaagtctcactgtgtagccctggctgttctggaacttaccatgtagaccagactggccttgaactcacagagatctgcccatctctgcctcctgagggcatgtaccatctcctccaaggcagcactgaattcttaaaaacttggaaaagtgaaatacatgacatttgtaggagctgtgagttagacctacactgtccagtgtggtagccaatggctatggttagctaccgagcatctgggatgtggacagcctgaagagaaacgtcctgtgggagaaaaatacataccacatttctaagacagagcatagaagaaataaggagaagtccctcactactactactactaataatgataattctgtctgtctgtctctgtctctcctctccaccagtgtgtgtgtgtctgtgtgtgtgtgtgtgtgtgtgtgtgtgtgtgatacgtgtgtggagatagcactgaattcagtattgaattcaaccgtcaaggtcagctgacctcctctagctctctatgcctcgttttgtgaggcgaggcctctcactctgcttgcagctcagcaactcagtcagaccatctggtcagtgagctgctgggagcctcctgcctctgccccctcagcacaggggttttaggcctgtgacaccacatggttttacagtggcctctggagatccagactccagccgtcatgctcacacaagcactgtagcctcggagccacacccccgatgacttttacactcatatttggggtacattacatcgagtacaacacattactaaaattaatattacttccttgctttcaaggattaatgtggctaccagtacactgataagtggtttgcgttatattacattacacttctattgatcatcctaaagtaggaccgtgacacagtttcttcgagggtcaaacctgcaccatcagtgtgccctctgtatcctctcacttcctgttcctgccccacccacccacccacctttgtcacagttattcccttgtctcttagagcccaagtcagtccttgaacgcttcaggactttcttaggaatgatcaatagaggttacgatgtgaatgtaatgtgcattaagactggcctatcagaacctactgttgaatataaactccaaattgcacttttttataatttgttagtttagaatgtatataaatttaggctttcagcatggtgactgatttagcatgttcctttcagagtgtcccccctgccccaacacacacccagggtaggaagagatgggataccattacacaagagccagggcatcagtgggaactggtcaactctgtgcctccctggcctgtcctattctcctcttctgtcccctcctctactctccccttccctcctccttgctcccctcccccatcccttcctctcccctcccctatcctatcttactcaatgacatgaaaacaatggaatggtgtctatagttttagactggagtagtcagcactatatgttggcatttagtctaggctctgccccatggttacctggcaacagtcagatgtgcctgactcactataaaaggggctgcttgccccctcctctcttttttgctctcttgctctgacctctcgctcttggtcctctctctccccatttgcctgcccccccccatcacgtgctcacggctgacctctactcctctactctttctcctcccccccaccctctcagctcccctccctatgccctgaataagctctatttgggctgccttagcgtggacttcggaggcacccctccctacacaccactgcacattcatcaacattccttctctccttatctttttataaaacacaacagtatatgaacatggcaggaaggaagttaatgagatgactgtaggactctggcttctctctctgtcgaagttcagtttgctcatgtcttctagttcaccccagctttccctttggtccatctctaaggtacacactgcctggactccaacgcaccggaggtgtacacacctttacccagtcacaggtgctggtcacaggcaggttcttctgtcctccaccagctgcttcctgtcattcccaggtcagagagaaataaatgcaggctaagagggaagagagaggcctgtgggtcaaacaggcgacccgatttctttttgcggttctattgttggctcacagtttggtctttgaatccctttctcgatggtctcagctttacagttacagacacagcgagagcaaagctatcacttgaagtatttttggctcacttctgtgctttggaatggggcccaaacccttccctcattccattgttccagtcaaaagccactgtaaggaagccatctggtgagaggacttaaaaccaaagctgttgttccgacctgtcagcgtcatgcctttggttttgtttcgttttacttttgtgttaggcttaattgggggagaactgtgttcctagcccttcagaatgctcctctcaggtctccttaaaaaacaaacaaacaaacaaacaaacaaacaaactgagtgcattaaagaactgctataatctttttaaaagaatgagcgctccctgtaaatgaatccctacacttgaagaggaaggggtgtgtcttaggtctgaggagacgccatcttggctccataactgttttcccagtgagatgaactggggggcatatagtctaagccttcatgtttgctgccgtgagcaggaagcacagtgtcctcgtccttcagcaacacctcgctgacctcttcaatatatcccaaactcaagcttgcattctgctgaatgagaacttcctcctgttctggtgaaaaactatcaaagaccatgtttaggagttggatgtggggggcagagactgtgtggggacaacatggggacaagagaaccagagtgggcagtgagaataggttggagtggctggaactttctggaagggcatcctggggatgacatttcacccaggctgttttctctctgtaaaaaagacatcttgggagtgggccaagggccatcaagcccaccacaagcactcagagacattcgcagacccccataacacccgtcgaggtgtcttcttctcccacgttgggtagctgctggtcctcaggcatccagatgtcattgagaagggcaagaagctgatgtcgctgatctgcttgctctgcttgctgactgtggtccagttccagagaaagtgagtgaatggatagcaaagggaccagaagagggtacaaagcagagggctgtagtcatacctccagcacagtccccccaccccttccagctgagctcattctgagattggctgtccattaatcaaatcctgtctgtgttcgttttgaatttgaagtttcatatgtgctgggtttccattaatcctggcctcattccctctgactggccttgcctggctgatttcatgaaatttgtcagttttccatctcttctgcctgagctaccctgataaggcagagggaggggtccagcctttatatagtgacacgcttgatgccaacacagctaagtctctctcagtgctcttgttgccccatggaaatgtggcactggtaggttactgtgtaaagaaaacgggaccacatatcagggtgcctcaaagcacccatgttgggggctggagagatgacttagaggttaagagcactgactgctcttcaagatgtcctgagttcaatccccatcaaccacatgtaatgggatctgatgccctcttctggtgtgtctgaagacagcgactgtgtactcaaatcttttctttctttctttctttctttctttctttctttctttctttctttctttctttctttctttctttctttcttcttctttctctctctctctctctctctctctcttctttctttctttctttccttttttaagcacccatgtgttagccaagtatgtttagttgactgccatttgcagggcaaaaatagtttgaataagcactcgaagaaaggctgcctataatggggtcagcaaaaggaaagcgtccttcaccttctagccaggcaccttcatgcttccgtatgtcgagttcatgttagtcagggtctacaacggtggacactccaagagcatttataaacaggctcgttgctcctaaagcaatggatttgtgtgtgacaaggacaaccttggagccatatcttgctcagggctttctttgcaataacatggggactccgtggttattcaagaccatctcagacaggctggagtcagctgggtacctttcagttcagaatctgttcaggctgaaactgtgaacagatgctgtgcctttggtcaatcccaaaatccttgcatgaaaggaagtgcgctgcagactgtcctcctgagcagaggagtggaaaattactcagcggaaactgccctgatccggccatgctcccactggcccgtgaacatattactagtgtctccatttcatcataaaatagggtagcagcgatactccacaaagctttgggaagatagcttgcaagtagaagtatggctggcatatagtcagagcctgtaagtcacgtgacataagtcacaatgtcacccaaaggtagctgctgggcgtgatgcagaactgtgttttcctctctgcttccgttgtctctgctcttttgggcaaacatgccgagtgccacaagcctaaagtcttagagcagaaaataacacagtgttttctctcttagcagtgatgtgattttctaattttgagtttttacccaacaagtaaatattaaaagtcatggtgccggagatacagcttcgtgggacatatgtgcccatcatgcaggaggccacaggttcaatcctgaggttgcaaaactgccaagaaggaaaatagggaggggagaaagagagagagagagagagagagagagagagagagagagagagagatctttagagaaaagcacaaggaagcggactcacccgcagtcctcacacacaaacactgccgctattaatatcacactgtctctatgtttaggcatagatttgatgtatttagtgtgatggcagtcacactgcactgtgattttatgtctcgattttaacttcagattacattatacacaccattgtcaaagccttcgggccaatccttcagtcaagtgtgtcatagttgatttaaccaacgctgtggttagatatgtatgtcacttccagttctgtgatataaatgatgtcactatacaatttgtcatgctttgggacaatcaaccctcagattgatgtcaagagtctggatgagaaggcaaagacgcttctgttttattaacaagatggagatgatataatagcagtctgaatttcttagccctctccaatcttgtcccttaaaaatgttggaatacaattcattatgtgtgttctggcaggacacatgtcccaaggctgtttctaaatgtaaaccggagaacaaagactattttgacaagttccttgaatcatcaactgggaacatctctttcatcactgggcccgtgacgaccaaaggggctcagctatcaggaaccaccactcagatcatctctccacggggctccttgagcttctgctggaaccagtgctgtgaggatggccctaaagattagcctctgtctccccaggtgtagagaagggcagggaacctacagacagtgagaaagatgctgcaatacagggcaagctccgagaaagcacagaggaccagctcctaactctcactgcaaggtgactgaaggtctcacagaaggagctggaagtggtcaggataaggacacgtaagccagaaaggtttttaagctgtcaaaagcaccatcatggactatttaaacatgcacacacagtgtagcctatgagaaaagtaatacgtagatatgaatagcaaaccggagcttgaagtccctccggctctgattattcgctcggtgttctttccgtcatacctgactgtttgaaagacacaagaacactgtgggcaagcactcttgtcctctggtaattatccagctgagagatcacagggacccatgatcccaagtaagccttagagtcactgaactaaaatggacatccaagacccccatgctgaagtttgaattctgtcatgttcgtggaactggtctttctagtcatgccaggcagccaggctatatcaaccagacaggttccttactggaatcaggaatcgaagtcattgcgtgttgtgggtgagctacaggggaggacctgggcttgtcacatcagctctcagttctccttatccagggctgagtgccaggcttcctagctggcacaggaatgagccttgggagcacggtccagggcctttccgaggacgtcccttacagagctgcttccctgcttctgtcctgctctctggggcaatagtttctgtcccatcccacaatagaacattctgtctctgcccccttttcactgcccccagggtgtggggttcacgaaaacatgtcgatccatctacctgttggagatgttcctgggtgtgactgagacagagggcctgaagaacccgcttctgtctattaacacagtttgcagatcagtgacagccaaacctctgcttaaccattctaagcaacagcccaccaaagccacgcatggctgagagtcaggcttgagggtcgttccttcatcctgcctaatggaggaagacaggatccttaagagtatcaggaaagcatcagagctcaggctgtacggtcatatcctctctaaaaggccaggtaccaaggctctaaaacaagtagtcaaccatgactggcatccaggggggagtgggggaagagtgacacagagagactacttggacctcagaaggcacaccttgtgtctgagcagattgcagggccacaaggactttctggggtttctgtgacatgcctgggttcctaagagcttagaattccctgctcagatgtctgaggcccagtctagagcttgcaatggtgtctgtcaggcgtgaagggtggtccggtggtagcgtgcttactcaaggttggatagacacgcagaggacagagctagatgtgacaaaggcctgactatgaactccacctatcctcttggcccaagtgctacgggtattggggttaccctagaagtgagtcatgcataaggctgagataggtcttcctgttagagagtgtgtttagtttaagcaagaagggagtttatttctcctacaattaaaagcactctggaagcaaattactgtagtcctggagctctggacttgatatagaacaaggatgggcaggggcaggggcgggggcagggcgggggcgggggcgagattgattgattccagaaacaggtttccaaggaggcaagaaaggacacagcaccagctctgtaaaacctgggtcctcttccttcagctcaacagtatttgccatgtggcatctgtggttccacgtgacatctgctctctgtgatttaacgttccacgctgtccactgagctccaaccaggagttgtttggtagaggtaaagaggcacacttctgagttttctcagaacacacacaccctatccactctactcttgttgtccatatctgccctcaagggaaaaggaaactatatgctcttggtgaatacattgtgcctttgagtaaggtcctgattggttttctatgtaaagattattaaaaagaaaaaaaaaaagagagagaacagtttagaggatgagactattgctcagtgggtgagagtgtttacaaccatgaggacctgagttcaaatctccagcacccaggtgtggctgcacaggtctgcgatgcagcattgggggagggggagcagagacagatggctcctaggagcttgctggctattttgccaaagtgtcgagcttccaattgaatgtgagactttgtctcaggtgtcaagacagagaacactagaggtaatacaaggtcacatattcagaatcatacagagtatttcactacccaacagccctgtgtgctctccctcatcgctcatatccccacagcacctccaatgtgcatctcatgcctccatagttcagtctgtcacaccacgggactcccacgggacaaagccttttcaggtcgccttccttgagggagcaatgtgcattgaggtttccttcgcatcttctcaccactgggcagctcaacgcgtgttagcactaaatagtgatccacacactgctctgtgtgtgcctcagtttacctagctattcactaaaggacatcttggtggcaattattagtaaattattagtatccacatgcagggtatttctgtgaacataacattttagacccatttgagtaaatgccaagaaacactatggctgtgttatacagtaaggcaatatttaattttagaaaaaaaaaatagccaagctgccttcctaagtgtctgtatcattttgtgctcctgcagactgtgggtgagagtccctgctgtcccacatactcgccggcatctgatattgtcacagttctggactgagctactctgattgatgcataacacctcattgtcacctgatatgcctttccctgatagcatatgacttacagcctcttcccatgtgctaattctccactagtgggcctttctcaatgagatgtgtgcagatggttggcacctttttactggtctgtacttttcttttaaaatgtacttattttttatttcattcttattggtcttttagctttgttggtcttattgcctgtgtgtgtgtccgtgcaccacatgtgtgcagtgcccgtggaagccagatgagggcatctgatcccggagttacagatgattgtgagctgccatgtgggtgctgggaactgaacccaagttccctgcaagagcagccagtgctcttagcctctgagccatctctccagcctctgcctattttcttaatcttaggttttcagagttctttgtatattttgaaaatcagttctttttcagataagtcttttgtaactatttcccccagtgtctttggtagaggagaacatatcagggacaatatcagtgctctctccctccctctcctttctccctccccctnnnnnnnnnnnnnnnnnnnnnnnnnnnnnnnnnnnnnnnnnnnnnnnnnnnnnnnnnnnnnnnnnnnnnnnnnnnnnnnnnnnnnnnnnnnnnnnnnnnnnnnnnnnnnnnnnnnnnnnnnnnnnnnnnnnnnnnnnnnnnnnnnnnnnnnnnnnnnnnnnnnnnnnnnnnnnnnnnncccctccccctccctccctctctttctccctctccccctctctcctctctgagattatatttggggttacacctaaaattcacccatcaaatccaaggttatttaggttcaatcctttgccgttttcaaatagtttgactgttctgtattttatcttcatgtctgtggctaaatgcagatttttaatatgaatatgtttagctaccgtaggactctctgtagaaaagactgcacgcatgttctattttattgctttagctcctctgttgtactcagctgactatttcttgtgggtgtatttttggactacattctgttccattgatctgttagtctgtctccccagtaccatactatcgtgattaccgtagatacacagttcatcttggagccagatggttttcctccttcactttgtccttctccttcaatgtggtgttggccattctgtttgtctcttgtgtaccagctatagcatcactttggcaagtgagtcgctgggctttcagttagaattacagtgaccctgggtcaaaccaggaagagccagtgtcttgatgatactgaaccttcacatccataagcatgaggtgtcttcatttatttatctaactcttggatttctttcatcaaagtcttgtagtttccctcacacggagtgtgtgtgtgtgtgtgtgtgtgtgtgtgtgtgtgcccctggaactgttgttgcagacagttgtgaagccacctactgtgtgtaccaggaaccatgattagaaagcactcttaactggtgaggcatctctctagcatgtctgtctgtctgtctgtctgcctcttgagacagggccttgctctacagcccaggtggcccagagcttacgatcctactgcctcagcttccagaatgcggggactaaaggcagacaccactgtatctgctctccttttatgattttaatattttatgatttttaatactttatcatcacagtgtctttctttgattagcagggcagttatacttaaaaaaaaatttagtggttgccctaaagtttataacggagaactaatccaagttcactttgaagtaattctgtatcacttcacccttggtgttctatatttaatgcagaactttgacttgccctcttgtccctaatgtcatggctctcagtcatttctctcatacaagcaggggctctgcatacatttaaatgtacagttgtacacatgagatgagaattcacaagtagacatgactttgggcattctgctagaccaataaaggacaagaaacttagggtttcttttatagtcgtcaatccttccctaatgcttttcctttcattttgcaaaccgtgtttctgacccatatggttctctctctctctctctccctctccctctcnnnnnnnnnnnnnnnnnnnnnnnnnnnnnnnnnnnnnnnnnnnnnnnnnnnnnnnnnnnnnnnnnnnnnnnnnnnnnnnnnnnnnnnnnnnnnnnnnnnnnnnnnnnnnnnnnnnnnnnnnnnnnnnnnnnnnnnnnnnnnnnnnnnnnnnnnnnnnnnnnnnccactccccctcctctctccctctccccccacctctctccgacttcttttcatgtcctgtgaaaagcaggcacacacaactcacaccctcagttttctttgcctgagattttaaaaaaatatattattttcacttttcaaggatagttttagttaatgttttttctgctcaaaacgttaagtacttccgtctactctcttcttgcttgctctgtgaggtctttatcatccctcctgtacaggtaaaggtgtttttattcttgccttctggcttgctgcaggatttttttctgtagttttgatttcttttgccagcctgtgtataggattatttattcctacctgcatgacttcttcccatccccatctgccctgctttggattctctgagcttcctggaaattctgtcatcactgtttcaaacagctctcctgcctctttcttctcttctgttgttctcctacccgctgcagcttgttacagcttgtatggttgattcatagctctgggagactctttccacagctgtgtctacaaatactaaaaagcccatcaaagatcttcatttctgctacgctatcatttccagtgtctgtgagcccttaaggccgtgatcatgatttctgactttccaggtatacttgccatgctacgctatcatttccagtgtctgtgagcccttaaggccgtgatcatgatttctgactttccaggtatacttgccatgctacgctatcatttccagtgtctgtgagcccttaaggccgtgatcatgatttctgactttccaggtatacttgccatgtgttcttgcccgatgcctgttttatgcagcagagcatctagttgttgacttggttgctttgaattccctccgacatctctgctgcggctcctgatgcttgagctgcctcttcacactgcagaatgcctggcactttttctcttgccctctaggcatggtgtactacgtacaggtagaatataggcctggctcttggtagtgtggaactgaggagtctgggaggagaggggagccttctgtaattccgtgactaggccttttgtcctcgtgtaaccatgcccttggattgtgaatagcacaagtggtcctcgttttttaggtcttcttttaaagcaaggcagatagaatgatcgagagctaggtgttccttcctcatgtgtagaaagctctatctggcttcagttggattcctttcttcactgagctaactaggctctgataaagcaccagcatgccccagccgctagtttctcctcaaggtggacattgtcaaatggaccggtgtatttaaaaatggctccctctagagactgaagcaggaagtgcagggccaacaagggtctgcccagctcctcggcatttacagtatagttttcagcttattatttttgtgggactcctgaatgtggggaccagtgggtctctgattcttgtgccttctcttgggctcttttccatctgttggttttccttgtccaactttcatgtgatgctttttgttccatgtttggttgttagctcttagaagcctgtccttttcaacgagagagagagagagagagagagagagagagagagagagagagagagagagagagagagagagagaaggtgaatagatctggaggggtgagggaggaactgagaggagcagaggaggaggggaaactgtaatcaaggatttgttctatgagaaaataatctattttcaataaaaggaaaaatgcccccccttcctccttctgcatacaagtataagggacacttcctgtgaagttctaccactgaaacctagttcaagcacctggagttaaaagtcacagagcatcagggtgacttgtgactaggtcacttgggagtagtcagctcccacatatgtgtccttctatctcacagaaacttgtcaggtgagtctcagttttcctgcatcagcaccagaacttgtagaggaccatcagaagacatattttcagtggtcttaagaacttcaaccatacacttattttcattgctactatataactgtaattttgctactgagcggtgtctccattcccaagagcactggaaatatgtgtttttgcggtggttgtaacccaggggttaggaactgctgctggggaaacttctgttccacgtgcggtagcttcctgcatcttccggtgtcttcccaatgtttggtagcagtttgccctggaccttatttctctcacgggtctaagaattgttggattttcagcctgttcagcttttcactttgaaacgtcacagttgcctacaccccgagtacatcctggtgcttctgagcatggtatacccagggcagagcagtctaccatcagcaccaacccgtccttacttccctacctgacctgcattgctttccacttggggatttctgcggggaggatgaatcatctggagatgcataaacatcctggcctcctctcaaggtcaattttgctgcctttgatctcaattctgtttagggctcttaggacatctgcgtgttccgagtccctctgccatgggcctttccctaccagttgttaggctgatagactagttcttattcagacattagcagctttgagaggatgaacatatttgagattttggtgtgttatttgtattttgtggaaacagtagaaataatctccaaaggaggctcaaataatgactcagacacttaaatgtgtgcttgagacttacggggagatgtggagacaggagatggtaaaccatgaccatctcccagagccttgtgcccctcagccacccttggctttgcacactggctatttcatttggatcctgggctgttcctgccttggggaacccaaatttggcttagctatagcagaacctggttctttgacatcccttccatgaacccacagtttaacaatggataccgtgtggcatttttttatcttcacaatgtttccctcgcatgtcccttgcacagttcattatacactaatgtatcgagcactcattgtatcccagacactgctgaagagcccggggactgaacggcacacgagagagcaacatttgggggaaccatttggtctttccagagcttctcaacttggatctgggatgccagaggcagtgtcagcccagcgctgccccagcttctcttcccttttctttgggctctcccacagttctattcctgcagaaaatctgtttgtccacttgtttcctcagcttgcttgtttgtgtcccttacagttactcttccttttgctgccttctctgcatggggtctttctccttaatatcacagtgctttctgggtcccatgatgcttttctgtctttccagctcgtcactcagcagacttttgtcagatggagatctctcatcctcccagagtctctcctcacttcaccatttcactttgagttaacctttctgaacttccctatgagttcagaaactgtttttttctccttagtctcatgtcccctctgaggtgggcaagctgtctttggtttccagccctgcatccagactttcccacctccacctacctcagccactgtatcttctccgggctccacaaagtcacagagaataataaagtggctcctctctttatttcccctgcacccagatccagttgtcaaagatgaaaattctgaacatctcagctccaaaggcttaataaaaaatcaaccaaagtgtatcctgtgtctcattattcctttctgttgaaagtgggtggaagaggttaaacttcctttcctactgctattcagcaacttgctctttcaaaggagatttcaaacattttggagaaatggctgaattacccaggtgtaggacagcagtgattcagcgcccaggttacagccttggtacaaaagcttccccttagtggttcaaaatttgagcagaagtcagtgtgccagacaattcaacagcttgttttgacctttaagacatttccaagtcaaaatgtcaccttttgtctctctctgagtgtaggaggtactttcctactggagttttgggagagtgtgtgtgtgtgtgtgggtgtgtgtgcatgggatgtgtgtgtgcacatgttatgtatgtgcacacatggtgtgtgtgtatgtgcatggtatgtgtgtatatctgtgtgtgcaggggatgtgtgtgtgcacacatggtgtgtgtgcatagtgtgtgtgtgcatggtatgtgtgtgcacatggtatgagtgtgcacacatggtgtgtgtgcatagtgtatgtgtgcatgcatggtgtgtgtgcatggtgtgtgtgtgtgcacatggtatgtgtgtgcacacatggtgtgtgtgcatagtgtgtgtgtgcacatggtatgtgtgtgcacatggtatgagtgtgcacatatggtgtgtgtgcgtagtgtacgtgtgcatgcatggtgtgtgtgtgcatggtgtgtgtgtgcatggtatgtgtgtatatctgtgtgtgcatgggatgtgtgtgtgtacatggtatgtgtgtgcacacatggtgtgtgtgcatagtgtatgtgtgaatgcatggtgtgtgtgtacatggtatgtgtgtacacacatggtgtgtgtacatagtgtgtgtgtgcatggtatgtgtgtgtacatggtatgtgtgtgcagacatggtgtgtgtgtatatgcatagtgtgtgtatgtgtgtgtgcatcaacagcattagaatttacttttctttcctcacattgatcctccatttctgtgtgcaataaattcccctggaaaaataagaaaatgttttccaccacagcacgggagacagtctttaacagtaatcagggaaggggcactgtacagtctgtgaggtgttgtcttgatgtcattgttgatatcagtaagggcatcttcctgcatcatgactcacttcaattgccaatggcaacctcatttgttagttctttacctacagttgttcattacccagatatttctgatccgttcaataattttgccatgcagatgaagtagactgtggactgagtcatgaataccctaactcttcactgctttgagtaaccaagtccaaagaataagtgaaatactcttcattcatgagaggctttatttacaccttaattattttctaagaagttagatatgggtgggtgagatggctcggtgcgtaaagaccctttcttgtaagcctagttttgatccatggaacctgcagggtagaaggagagaaatggctcgcaaaagctaaccactggtcaccataaagaggagaacagagagatcatcagcaatcacagtttcccttgagaacacctcttcttcaggccattgttgtgtggatgagtggcgggggacacagaatgaatcaactcaccagaggctgagctgggcttggatgttgctgctgctcgccttctcctgcgtgcaccatgattcccaggtgcttggagcccagggtgacagagcagtgttctaaatgttcagccatctgtgtcccgctgtccaggctcgggctgtatctcggagtctacctccctttgctctgctgcctgagggctctactgtttgtctctctgtgtgtgtggcttattgtaagagtgtgggtttctttactttcctgtccagggtcatcctcagccaaggcacacttgtctgaacctcgggatcctgattcagcctctctgccttctcaccagtagtcaaagacccatgctttggagcaatagagaatcctgggtaaaaaggactctctctctctctctctctctctctctctctctctctctctctctctctcttaccccttctccaaacctgatttatttcttgcctaactcaatattttttgtctcatcccagaagccagactttctatttcctctgggcagtggttgacttttgcttcgcagtagacagctctgggagagaaggcagggtttcccactggcccctagcaaggtgctggccacccttgcaggtgtatgcagcaatgggcaggtgtggtctcataccttgttcccaacttgttctcatgagcaccaagtggagattctcagaatggagttaagagtaaggccacactctgcctcttgttggaagaaggttacacaggcacaaaatctcatcactggactgtgtgagctcctggacttcaacccaaactttccatgcaatagctcatttgctctatactttctaaagaatcaagctaagataaagccaggcagagtgtcgtaaggaagttgtttctcaacacagcttgtcagacagtaagagaggaagtggctcaccgtaaagtagctcatctcacatcttcttagtctttccaagaaatgatttaggagattaatgcccttcacgacagctagtttttgttaatactaattgactctgggctcctttctggaatggaaaggatgtgattatgtgcgtatttgtgaacttcaagtagattgtctctcttcagctggatgccacgttattgcagagaccctttgtcagttgacagttgaagtgaaaatattgtctccagaaatgagtttgttgatagctgttccaatactctaaatggatattgagattagctgcctgcaggctgtcccgtcagagctcctgggagcatccacctgcaggctgtcctgtcagagctcctgggagcatcccacctgcaggctgtcctgtcagagctcctgggagcatcccacctgcaggctgtcctgtcagagctcctgggatcattcccttctgatagaagattttcaattcttcggtcccatgttattctgttgtatcccagcaactgtggcaagggaggattaggttgagttatctggggttttgtttggcaaaatatacacaggaaaactgaagaagctagtcttctctgagtaagtctgggcacagcgtcagtcgttttctttcttttcttcttcttcttcttcttcttcttcttcttcttcttcttcttcttcttcttcttcttcttcttcttcttcttcttcatcttctnnnnnnnnnnnnnnnnnnnnnnnnnnnnnnnnnnnnnnnnnnnnnnnnnnnnnnnnnnnnnnnnttccccttccccttccccttccccttccccttccccttccccttccccttcttcttcttcttcttcttcttcttcttcttcttcttcttcttcttcttcttcttcttcttcttcttcttcttcttttttctgcttcttcctctttctcctccccccttctaaattcatacaaaaatgtccccaaacaaggagaagccctcaaacaagaggccatgttacgacacacactttgtgagtaacttcagaagtagaccctctcagaatctaccctttagctgtcacatggtcactaaaggcaatctacaagtgctgccagttgccacatgtcccttccacatccctggaggcattctgaaggtcagaggacagattcacagtgagactaggtgagaacattaaataaaataacagatgggaaatcaaaatcacaaactatatgaagctgtagactacctgaagcaaagacagaactcttattgggttgatcctgggacagtggttcacttaatccgtctacacagtgaggcagctgtggagtgtgagacatgcacggtaccagatggaagcatctgtctgtccgttctatctttgagattctgtttccacagtgataaataacgatggtggtgatggctcccttccaaagtgcatgaatatgttactcaatacaggtgacattcccaatgaggtgagcatgaaatgtctgtttttaactgcatgtgtagcactacagtgtagctattccacttagaaaggtttaggttctaaccgattatctgtatgcatttttacttaagaccaaatcttacttcacagcccatagttccatttctattttttctccataaagaatagctcttcctttaaaaaatatttatttttaattatatgtataagtaagtagttggacacatgcgtgttccagtagaggccagaggcatcagatcccctggatctggagttacaggtggttgtttggtatccatcttgggtgctgggaactggacttgtttcctctgcaagagtaatacatgcttttcactgctgagccatacctacagccccaacattccacttcttaaaaatcatcccaacacgactaagatctacttaagctactgatgtccagatgacaaattttcctagctaaaagcatcagaggtcccaagaaagctatacatctaggagtgtgcttctcttccttcctggcactacacaccttcctcagtgtggacctctctctacagcatccttgttactggaacccagagcctgggccctgacagccttaaccagctagccttgaacatgtcaccatgccaattaaaaaggcaagtgaagtgagaagcagaagaggaagatttacgcaatatgaccacattgggaagaagtctagggatggcctccccaacaagggaattggcaagatactttaaatagagtgcaaaagagtgacaactaagcagtcctggccaaggtatggtcctgcccagaactgacataccatttgtcttggaacctgactcctggtctgccccacagattgacaacacgttgtgaaatctttctgagagataagttcttccccaggtgggccccagacttcaatctctctgtttcacatgatgagactgttgaagaaacactagttccttggggaatttttagttaccatctcaatagtctaatgactaaagaacgactcatgagtgtctttcataggtgtctctcctcaatgcctgcactcctgtgaggatggtcttaccttcatgccatccgaccatttgctgttctgttgctttgagggtctggatgcatagttctcagcccctgaagctaaagttggcttcagtctgtcgagttgcccccaggctccatcttaagctccctccggaatgcttggcccttactggcactaatgcaacgtaggcaaagatcactcattgctgctgacatttgtggtgacctcatcaggattctctttccattttgcctctctccacctcaaccattatttactctttgtcttagattttctttctccattgtgccacaggctcctttcaacatttagcattgtgccctgttttgcaaatttgaaagattatctctacttttgtttccatcctaagtatatgcctctttttttttttttagcagtgcttttatacagttcaaactgacaatatgctgatattcataaaatatttcagactgaatacaaaccctggggccacactcctgagtagtcagtggtccatggctgctagctccatctgctacagtgggcagtgtggacattccaaactctgttttgttcatacctgtggccatttcaatgaaaaagctttaaacaaaagcatttctatactaagaggtacaggggacacaaagggagaaatgtagcagaccttgtgggtcttgtactatgactggtaaataaagacatatgcgtgaggaacagccagagactccaccaccaccagtctgcacatgaaagtgttgctgaaaatcttggagagacccacattgggcaccagatgataagaaggaaattggagttctccctttgggtctttagtctccttaataagtaaattttaaaacagactctcaagggccagactttgagagaaaagtaccagggtgtgcaaactatgaatgtcagcagctgctggaaggagggagacagaggagagaaagacataacttttgatgcaggcttacatgttcagcaatggatgccagcaagcaacaccacgacttagcagcaggcaggcttaccagagctgcatggtggtagctgtatgggtgagagaacagaggacagggttcctgggaagggaaagtacattacctcattaaggtaataattactcgtcccatctctttaatgtggctttaggtgagtaagcctctttaaaaggttgccttttgtccacacgatcaacagacccatctagatgaactcttaatggaagatacagcaatatataatgttctactctttggagcagttcatgatgtcatatcttcacccaggaccaaaggcagattccattagggaaggtccatcctggaagttctttaaggctcctgtaacattgatctattaattggggagaccctaatgtcacttaggagtgggctaaaattggggaacaaatataatccgtttcatgaaaattcagagatccagccccaaagctgaccaccagggggagttcatgtctcaatgacacagatacaacgtctagaccagtggttctcaacctgtgggtctcaccctgcatctcagatatttatagcatgattcataacaatgaattaattttgtggttgggggtcaccacaacacgaggaactgtattaaagggtcgaagcactggtaaggttgagagctagtgttctaggtggaaacgctcatttaggagagaagagagaacaaggaaccaagtaccagagctctactctggcctccagcaaggactttcctaggtccgctgctctctgaaacattgcctttagctgcctaagcagttttttttatctcctgttctcatcaaaagtgacactctaagatgatttcatcagaagcctccccactggcaaggaccaaggcggatggaagtccttgcagaagttttatgggaatgacgttccttctcctgtctatgcttctcttcaggagccaagtctacccttctgtcaactctttttgtatgtgtgcatgtgaggggctggggagtgaggccagatcgtactggacaagtgtctatcactgagctacacacccaaccccatcaataacacctgcttctgtaagtgtttaaattcctttagtgtgggcttagatggtccttacttggtctgtttccaaacagcataaaatcgttgttgttaatcgttgttaacagggattagttgttgtccttgttaacagggattactgatttttttttttttttttttttttacattcactgaacagatacccagacacctggccttagggagctttggttgaccacaggaaccagcgagtgcctgagagctgtaacctgcagaggctgtcatctgggtggtcacctggcagggggctcctagtagatgcccattgtctggatagctgatgtaattcagccttgagtatgaaaattcaccctcctcacttgcttgtcttaaagatgcatttcacaggttcataaatttgaaaagttcaagagtgtgggcaagctcccttcttaggggaagaatgcctcattgtgaagagttccgagttgaatttctaagattagtagggattacacaggacaaaagagaagccaaagcaacctgcatctgctagcagctggggatgagtcaggttttctcaggacccggcacatttctctgtacactgctcatttcctataagacaagtgtgacacacagataagaatgggggctgaggtaatgcaatttaccagagcacgcttctactcaacggatgggctgccaactgactctctcttaaactgctcttagctgcttccatgccgaagcatgtcacaagtaattaccatcaagagatcgaaagcagctctgtgtgtgtttgcgcgtgtgcacacatgcaagtacatgtgtgtgtctgacatgtctgtctacctgtctgcatgtttgtctgtttgagtctgtctgtctgtgtgtctttctgtgtgtatgtgtgtgtgtggttgtgtacgtctgtgtgtgtctgtttgtgtgcatgtgtgtgtgtgtctgtgtatgtgttatgtgtgtgtatctgtgtctatgggtctgctgtctttcctagtggacagaacttgaccttgtttatttaatctaaaatattgcacatacagattttctctttttgtctttttttctttatgaggttataaattgattacacaatttcttccttttcctccttctggctcttcccatacaccttccatattcctctttgtcaggtttattctctctctctctctctctctctctctctctctctctctctcacacacacacacacactaatggctattgaatgcatatatgcatggcacatggacttttaagttctgctcagttcagagcttggcatttgtaatgatgaaccattcgtttgctttgtatcaatatttgtccaaatgagtaggtggatcacattgtgagtaactttggttaattttagggccagtgtggaatattgagccctcggatgcccaggtggtggtgtagggatttctggatactaaaggccaagtgtttccaaagagaaacaggaatagaaattactaaattagcagaatcttctagcacgggtgcccaggcagagggagaatcttaaaactataaagactcttaacaggcatgctctctctctcttagcccttcatgcctttgctgccaggagagggcaacagggagaaggttaagagtcaaaccaatcaagtatgtattgaaagtgtgtgttggaagcagagaggattcacttgaaacgtgctgagttgacagcagctcgctggtgcccccaactcctctcttcctgtgggtcactgtgagggactgccttgcctatagtaagcaaaatattccatgtgtaggattcccctctgcaggtaacctgctcctcctggatgtgctggcaggcccctgcatggcaagcaggacaccgtagtatttcagagacaaagagcacagctcaccatttagggaaccgagccacagatccccatccgtggctagaaataaggcggaactcaagttagaccacgctagagaacaggggatgctgggaagtacccacgcggtgcttccagccagtggtgtcgccatttaccagtgaaaatgtatttccttcctgtaactacagactccgaaggtgagataactgaaaatggaaacagtgtagcaaatccgatatgtgagctatttggtcctgtgttaactgcagggtagtttcctcattacggctcttcgaatgttaatgaattttcccctagactgagaaataaaacagacatgcaaaccctctagagctcacccagaaccagaacactggccaacccaagtggcagtgtatctgtgatttgtgatattaaagctcaacaaaatttgctaagtagggactggaagagatggctcagtggcaaagagcatcttcaatgtggactctgtgccaatcactcttcagggaccatccaagctgtcaggactggatggggactgctaaaactatctgccttctgtatcagccagcatgcaggtcagcactgctggactacccagcctctgatgtgtaagccaatctgatcaatctctcttaataatatacaaattctacaggttctgctctgcaggaagcggatgcggccgtatgggccaagatgtttactgccttgcccgagcatgcgcggtgaggctgcatgcgtgggctgcctgccaggctggactgttcctcatgatccggacctgtcagactatcagtgaccgacctaggctcgtgcctggagcatgtataaattctgattggatgaggtggggtggagctagaaggaggtcagtcggcacgagtataggagtttgttttagcccttgccatgagtagaagtagtagtaagagaagttgttgtaataagagttgttttagcccttgccctaagtagaagctagttgtagtaagagaagctgttgtaaggggagttttgtaagaaaagccgcaagaaggagaacaagtaaagaatctgttgcgtgaacccaacttggtgtccatgttgttcttgtcgccgctggctcgaaggactgcgtcaagtgcctgtatggggtcatcgtgtcggtcagcaatggtaagtaagaaaattttagtaagcagagataaggaaattttgataagagcagcagtaggaaaattttggtaaacagcggtaggaaatttttggtaagcagcggtaaggaaattttggtaagcaggggtaaggaaactttagtaaacagcggtaaggaaatttaggtaagtggccagtttagaatctctttagttagactgtaagagtctgtggaacttttgatacttgaaaatgagtgatcagagtgatgccatcttgtaaagggtgaaggaaaatgcagtttccatatggaaggcattcagattttagtagacaagtcaaatagataggatgggtgtatcaaggccagaaaggagaggcagagcagagcagaggcaaatgtccaaagtgatctaaattatagaccaggcagctttacattttaaaaatgggacttgcatagatagtacggacaggtaacctcagagacttgagaaaaattatctacaaggagggaactacagtgcctggcagataattaaatcaccagaaggtggttgaaaagtaaacttattctgctagagagagcaacaccttggtggaaggttggtgtatctaagctcagtttctttttggagaggtttgaagtgattgtctctcttcgtgaaggagaaactcagtaaggttcctgggaaaaaagggacaaagcattaagggtctcaggtatagagacgaaggtaaggttcccagggggaaaaagggggacgaagcactaaggatctcagatatagagacggagagaatttaaacaatatgggttcaactgcgaaaaatgaaagtaaaaatgttagccatctgaatcttggtcagggcgtgcttgagggacgacagtggaaagtacaatgctgaaatagaggaaggagcggcgcttgaggaggctaaggagattgcttctcaggctagctgccaaaaacctaaacagcttagacaacaaaccaaagataagaaagagaagaaggaatctacctctgaagggtctactagtgacagcgacgggactgatagcgacagtgacgtctgtagtcggatgtcccgctggagtttgaggcgcggtaggccgcccgaaccatcatcccctccgtggccttctcctccccactataaagatgagggagacaaaaggggaaagcatagtcttcatgcagaaatctggaaaaatgtgcccactgttgcaggggccttcccagtatttcaggaccaacaggggcaacggtatcatgaacccctggagtggaaggttgtacaaagattgaagaagtcagtttcgacttctgggatccaggctgcctttataaaatttgaacacgtgtttaaactctgataaaggcagtaagagttaaggttagctactttttgagcaatttcctcaaagataaaacattgcaacctgcaggaaagctcctgaagactcagtagtagaaagttgagccattaaaggagaatgctttaaatgaaagaaaaagagaaaagatggtcttatatagtggatgggaggactagccaatagtattagaaggaaaacaacactatgaaagggaccattgttttgtgtaagataaaaacatttaaagttcttaggtatgcatatgtatgctctatgtaaatatgttacaaatttatgtctataagcattgaaaagataaggaaaagacatttagtgaacaggcagggaacagaaggcagtgtggtatgggggtatagaacagaatatagccaagtttgaataaaaggtttttctttatgtacttctgtgttttgaaagtaataaggtgttcacaaaaataagatcatgttttcctcccccagaggggtgtctgccatttcccctggagatagaattgctcaaattttgcttttgcctagtcaccatgctagcttcccttcaaggggactgaaaagaggaaatcgggacttcggctccactagaatacaaatttgaaagctggtatccttatggttaaccaaagagtggattggttgcaggaacagatgaatattttggagcagttaatatttgcttcctgcattactcatatgtcaggaatgtgtgtaacctctgttcagcatcagaatttttgcagagctgcaaatctgtcgcatgcaattggtgctttgctgctaggaagttggagtcatgatctccacacaaagatgaaggaattgcgagcatcgattgttgcagtgaacaacacccatgtggagattgcaactgcaaagcaatggatggagatcatccagggaactgtgggattcttaaagaattgaggagggatggccttttgagtgctcctgctgactgttgtatgtggaggaatgctttagtggatggcacgtatgtgaaggcggcacagggctgataaatgagccttagtgcaggctatggcagccttggaagcaggaacatcaccccaatgttggctcaacaggctggatcagtaatcaatgacggataagaccctcacgtgcgcataccaacttaagacaggatggtgaaagtgagttcgtctctcccatgatgggtaaggatgtggcacggatgggggcaacctaagacagatgctgatcccagaactgctaataaaacaaaaagggggagatgtggaaagtggatgtggctgcatgggccaagatgtttactgccttgcccgaacatgcaaggtgaggctacatgcatgggctgcctgccaggctggactgttcctcgagatccggacctgtcagactatcgatgaccgacctaggctcgtgcctggagcatatgtgaattctgattggatgaggtgaggtggagctagaaggaggtcagtcagcgtgagtataggagtttgttttaacccttgccatgagtagaagtagtagtaagagaagttgttgtaataagagttgttttagcccttgccctaagtagaagctagttgtagtaaaagaagctgttgtaaggggagttttgtaagaaaagctgcaagaaggagaacaagtaaagaatctgtcgcgtgaacccgacttggtgtccgtgttgttcatgtctcccgaggactgcggggactgggacactgctcctctagagagtcctgtctaataatttagcttagattatcatgaccatctaagaaggttgaggtttttattagggcagaaaagtgaataataatatattatatatattgtattataatattatgtgattatataacaatgtaattatataatatgtaatgtattacattataatatatgtagtataatattatataacatataatagacacatacatattacacaatccatatatgatataatacaatactattatatatacaaatatatttgtgtgtgtatgtatatatatgcatatatatctatacatacatacatatatgatgtgtgtgtgcacacttgcatgtgtgtttgtgtgtgtgtgcgtgcatgcgcacatgtgtgtatgggggcaggttctcattaaatagcttagattggcctttcagacttactgtttggtccagactggtcgtgaacttgtgacactcctgccacaagtctcccaagtgctaggattacaggtgtgtgttaacatttctgctcataaacatttatttttataagtttatgtgactgagcatgtcaactctcagttagcaggaaaaccttggggtcttggcgtcatcgcaccgaaggccaccgggaatgcaggagctcacagcacaggtagatctagcaaaccaggcttctgcaatttggaagaacagcacagctcgaacacaggaacggaacccatgtgacatgtatgaagcatatgtctttaaacatgggagggaggggtcatgctagatgtcttgttgacctttgccctggatgagaacaatgtgcccatacacataaccaggtcagcaggagtaggctgactgatcctgagggcagatcaaatggctgcattggctctttcccctcagagcctggctggctgcttaccactgagagaggtggcagggttggttgactgtcgtccctccagcacatgatctttgcatatgtaggatagaataatcaggggaaacacacacacacacacacacacacacacacacacacatatacacacacacacatacacacacatacacacacacgactgctatctcgtgtcagcataattatttcccacttttctttaactgctgtagaaattggagatgacaatctcgttttttaaaaggatcagactttaaattgaattaaatttcttctgtaaatccccaaacaaagcaaatcacagttaaatagctgcaccatcatcaaagaaaacagtagttttgctacaaatgcactcccttgaggatcagatctctctgacgataagagccgtagcttttgcctcccagaaaaatggcaatgtacaaatgaattgcattcaatttcacaggtcccagattaagaggagcagttatgtctttttttgcggtgatcagtttatgccaggaaggcagggtgaacgtaggaagaggttctaagggtgacagaaactacaaacgcagccactctctttaaaaaattactccacaaatgattttaatttgtctgggtaatcctgcgccacaggccactagcagccgggctactgttcatataacttactgagaacaattgataactaataagaaagggaaggagagacagaaacagacagaagaatcagacagggaaagccagaatggaggacaagtgacttagctgcctttacaaatgcttactggacctcagttcttcgtggtgcaatgtaaccaggcagacaaagccagaagcagagagcgcgttgactcttaactctgttaaaattgaaaacaggcaggccttgactttcatgtgttgtgccgttaagtaaaagcaaaatgatgactgtatttgaatatccttgggaagttctcatcagaccctgtggatcgggtcttgacctcacttcttcagtattacacaagcaaacatgcccatggagggaactctgttcactggactctagtgagtccaatcctcgtcttctggctgcatctccgctccagcagaaggataaatagcaagctacagcttcccagagcatcttagtggcagggaaatggccattgcgtcacttgcaacctgccagggtgtgccgtttgccctataaataaatgcttagtaaacaccctcattatttttcttggtgttcaacaagatgaaagaattgagggggaaatgagtttccggtgaggctttaaatgaaatcacaaaagcaaacgtgtttaagcaagtggttccggcagctcattgctcgtcattacaccacacgcatggggctgtaatctcgtttgcttcttctcacggttccccaggctgtcccctctggaggctggcaggtgcatgccttcatgccacgctcaatagatttctctctcaagatctcctatgccgccagcttgggactgctgtgtttaggagcaaccaatagacaggaaaagactacagcaattgctttctccatgaaaagagtactgagagctttaagcttatcgggggccaaggttgggggtggggagaaatccagaacttgttttcacggaacagtttgggtctctgggatgttttcagtgcgtaacttctctttgtttggtttggtttcttaaaatgaggggagattctgaagagcaggagcagccaaaaggtgaacaccctgcatatctcacagactagccagcacttggtatgtggtggcattgggtgtatgaaatcaggattatttatttatttatagttttcgtttgtttttagtagtagttgtttgttttttgaagacaaggtctcaaggtcactgtgcatcccaggctagccttgacccccatgatcttcatgcctagcctccccaagttatgcgattacaggtgcgtacaaccccatgtctcaataaaataagactctgtcctgaactaaaatctgagaaacatcttttccgttgtggtactggtgtggtaagaactggtgagcggcagggatgagaatctctggcacctaaccagcagtcttccagcagcaggaaacagctttagaattacccgaaaggtggtgcgagtgacttcgtattcctgattaaatacgtgggcctctctctgctttcaaatctgtgaggccagccgctatactctgtgggtccttcttgattctgtatttaccacctctttctagtcttgaccttgtcatttttctcctcttgatctcaaaggttttctccaagttcagagccaaaatgctctcagggagacttcacaaagcacaactaaactcatgagaatgagaattaattctacgtattgttgcattttcacacattttactgactggagaataacctagaagttcatcatcagaaatggttcttttaaactagggattggaaatctttcaatgaatcctggtgcaagaaagcaacatggtgaagaaaagcctttgattgggttgttagctttgtgtgtgaaatcttgaattgataacccaacagataagcatctaatagcatcccagaacagcctgctcatgtattgtatggttgggtctttaaaaacaacaataacaatagcttgattcttaatctatttgctttactaaaatcactgcagtgatcttatctttctgagaagttagaaattcatcatttattaaccatttagaatcatttagtcagtccgaaaatatttaggagtgttttccacttccttgtttgagctcagagtctgcctgtctgccaccacatatccatgtggcaagtgtagtcgcctgctgtgtgacaaaacttttcccggggagacacaacacatgtgcttactcaccccagataggagatccacaacagaccaaagtgcagcttggtgaatcagtaagttttattggagttacttacaggagtgtaggtgaggggttacttataggagcagaaataactgaaagacagctctaccgtcaaagcccacccacaaagctggggacctggagcacactgtaccatctgtaggcagctcagtggattgaagagctctttataggtacatcaattggtctaaatctctttaaggtggcttggctgttttctgcttcttccaggcaagctagtctatctagtctgagagtcttctctgcactttggcttgtctgagagcaactctcagcttttatttgctcacgctgggaggggcttggtaaatctggtcagtttcagggacttcctgaagctatttcgagttgtttaccttcctgcttaaggagcttcctgcaggatggaatgtcttaatcttatagcaaattgttacccagcagtcacctcagaggctagttcagaggaagctcacttgagagcacccttaggatcagtgcccacgaagtaggaatgctgtgggagtagggatggacgggaggagaagctggcctctgctcagtgtgatggcagaatcaaccaacactacagggactaggtgcaggcagtggtccacaccttcatttattcactgcagtgtcatctgtgaggggatggtatctgcacaagaccaagaccaagttctcagcacaaaggagatcaatttacctcagagggaccaagggcagggaataagagacaaagtcaggagagagaagatgagggagatggggaagtaaacaaggagaggggaagggatatttgtcctgaagggactaaggactgcctctgaatagagaggacagacgtggcccatagggaaatggcggtttataaaggtaagaagggaaaccccatgttaggatgagttaattaagtttgattgcacaggttaattaggtgagccaaaggggcctttgatcactgacttcagtactttgctagctggaccttggtggtcagcctcgctttaggaatgtaatctaatggtttttagcaacgcagagggagtggggtgtgtgtgtgtgtgagcaagtcaaggcctgctacagccacatgtgccatgctgggcctgcaggagcccttcagtgaatggagggacagtaagtacctagggaacgtgattctctgtcagtggcagcgctgcccgcaactgggacatgagatgctcttcagtctaagaaggggttgaggtggcctatgacaatgtccctcctgtgtgcttttaggttctctgagaaaaatcctcattcaactggcttaaacaaaggaaggcaccagaccagttagcacctgggctccgtaacattttcaaggcgctgtccagcttcctgatctgtcagtggaagatgtcagttttgtttcacaggctctggtcatagccaaagatggtggaacaggggtcactgtgggaaacaagaaaccatgttggtccctgtgccttttatgttgtagaaaatagttccctgtgtctttcttttttgttgtgatgatagagatgacaatatttattattttacctatttaagacttatctttcctttttcaatggatatgagtacactgtcactgccttcagacatgcaatcagagggcatcgaatcccattacacatggttgtgagccaccaagtgggtgctgggaattgaactcaggacctctggaagagcagtcggtgctcttaaccactgagccatctctccagccccattttacctatttaaaattacatgcttctatggctttaagtccattcacagtgttgtataacatttattacaattgagttttgtcactttgatccaaacctagacatagctgggaagaggggatatcagttgaggaactgttcactagactggcttgttgtgtgtccaaggggcgtttttgttgattaatgcttcatgtgggaggggcccagcccattgtgggtactgcatctgcatcccggggtagttaagaaaagagctgagcacaccttgagaagcaagccagtaaacagctgctctctgcttcagtttctgcctccaggttcctgccctgagctcctgccttagctccttacctccatgctagcctgcaagctgtaagataaagcaaaccttttcctgcccgagttgctttttagtccctgactaaatttacagccggcgcctgtgacttcctggtcctgaggctaagctctcaagggctgctcctcttcccctccaccatgtcagctagcatctgcacctttgctgtcttccttgactccatctcttcgttccaacatcaaggctttttaatttttaaacaaatctagtcactggccttttcaaatagatctagaacttaaccactcctaatcaccatttctgtttctctcctggaccacattttgtgacctagatttctgtcacagtccctacaagacctctttcccacttggtcccccttggtctccctttatctcccttggtcccatcacctgcctcatccactgtcttctcccatggttccctgatgtctccagagccttgtgttggagtttcctccaacatacttagccaaatgggtcttcactgaagccatagtacaggttagactttccccagatgcctatttcataccctgagtacatcatattgtcctctacttcattgtttttcatgtatttatgactaaggtactctgtgtttcatctacactggttggcatctgtctttcctatcagacacacgggctgcctttgttccacaagggaagtgatgtttgtctgtcgacttcactggagtctcagtgctgagggaagaacctggcatagggtagacatgtaataaatctgttggtacagcatcttacacaagagaaagctgaggctcaacacaaggaaataatctactcagggccacatagctaggaagtagccaagtggagtagttaaatgctctgtgatgttttataacattaaaaaatccatttagcaaaaagccagacgataccaatggccccactccagcctttctcccttctactgatggaagtaaggagtttgaaatgagctgggatctcctgctgaggggcatcaggagattgtctgtgggccgctggcaggacgttcagactgagtgtcattaaggaaggaagttagcaagccatctccgtgctgggcctggcctgaggagcagaggccaaggcctgtaattaaatgcagagcagctgctctaggctggcactgtgtgggggagggatctgggccacaaggggtggatttgcagactctgaaacagttctggagaacagcagtttttgatataaagactcagcacatgagcatcccgctttgacttgcccatggtccctgggatccctcctgtaatctacaccagggtggaaggacagaagtctcgcaggacccggaaggacgctctgcggctttgcaattgggctcgctgccgctttgtcaggatgagaagggtctggggttttgcggctgggttggattttgcatgttcatttccgtaagttgcttttttttttttttttggttttttcgagacagggtttctctgtgtagccctggctgtcctggaactcacgctgtagaccaggttggcctcgaactcagaaatccgcctgcctctgcctcccaagtgctgggattaaaggcgtgcgccaccaccgcccatgtgctcatgcgagctggcgaagcacacaactggtgtttcttgtattaggaagccatgctgcaggcgctctctctacacaggatgcagcagggtagagctttgagaactggagccttggctggcaggtagctagcttcttgaccagttgacaaggaggaggcagaggcacagagtagagcttgagtcctacaggctgcaggcccacttcaatggtgcaccagagttgcagtcatgggaggtcaggccatgggaggctttagggcacaaagtcctgactagggcatcgctgtcctagctatactgtgagacttgagcaggagaggcccatggaactctagtcaacagcaagatattgactcagaacaggcctaagagaggaagctctgaaggcttggttgagagagagagagagagagaggcggggggtggggtgggggggggtgggggggagaagggcccctgggtcaaaatgcctgttagcaacattccatggctcttggtgctgttatcactcttctttcctttttattttctttttttcctgacaagggctcactcggggagagtctatggaattccttctttgtcacttccattctctgatacattgttgccctcaatggcatctggctggtcaacagcactgcccacgtatgggaaagcagacctatgacaagcaaatcagccctcagaagaacccactcgtcgctctgggagccattggtgagtgaggcattgagagccagaagaggtatggcggtccagatgttattgacttagtgggagggaagggtttatggctctaaaaaagagagtggagcagtgcagagacactgaacattggccttagcatcctagctctcagacaagtcgggcgagttctctgccttacaatgctcttatctgtcaaacagtcaaagagcaatgcctcccttgtagagcatacaaactgcacagtgcagctcctggagcacggaagatgatcaataaatgggataatagttactttcatcatgaaaattttcctacaggaagaaaagcagcaattgctttgtttctcaaacagtcttgtctactctagacttggctatccaatcatatgtcaggggggaaaaaaggccttcaatcaagcagtggcaagaaaggagagtcatggaccacaagtagctaagagtaatgttagccagtgcggactccaagttaggttcctcctgggtcctccacttgctctctgggcacggtcctcaacattctgggttcttatctgtaataagacagtaggtagcccttccctcctcccttggtcgctggagagtaaaatgagttaatacacagccttgtcaagctgcttagcacgaagtcggccctctgtggcactgcctttattgccagctttatggtcgtaggtgagttacctctcccttctgtgcatttctgtcctcattttaaagcagcgataatcatagcagttagctgagaggcgtgaggataataggagttagtacttagcccttagcgctctgctcagtgtgcagtaagcaactcataaatattagctgagcccctccaaatgcaatgctggctccttggtaaagctctgaacattgagcagagaccaagccaggaggagaagggtaggaacagtctctgccacttggtggtgagctcctgtgtctgtttcatcaaccatccaactaagatcccggggtgcttaaggtcttgtcaacctgtgttgacagcagcaacaggagggggataatctgagctctagctgtggagtcactccatgggaggggacgggaggggagcccagaagggattgtctcctctctgctgctttcttctctcatcttgtgtcttgagtggctataactagaggagacacattatgtgccatttccaggcacaaatacaagtggggacaccagtgttatacacccacagtgaactagtattcacaaataaaaagactcaagctagggtgcgcgacagcctgggtgaaccttgagatcactgctgagtggcagcagacagtcacaaaggagcacatgagactgtgtgacttcatcacatcatctgtccacagcaggacaggcggagtgggcaaaaccacttgctgtgcaagccagaggacctgagttcaattcccgggacccacagtagacagagagcgctgactccctaaagttaccttctgacctccacatgtgtggcatggcacatgttcaactctgtctctacacacacacaagtgcacattaacaaataaaaatctataatctgtccaaggcagtcagatttataaagatggaaaaaaggcctaaggaatgggaaggggggcaagctaaggagtcatggggggggcataggagatggtggtgggagcctcttgaggaatattgaaaattctcaaggtcattgtattgtattatattgtacactttagaaggggagattctgtgaattataactcaataaagtccctttaaaaggaaatgaacttttcatggggaatgaaaattaaaaccaagaggaactggcgtctcaccttagttagaatgacttagcacaaagatgaagggtgcctgttggcctttccctcctcctgcccctcctcctcttcctcctgctcctgctcctccaactgctcctgctcctcctcctgctcctgctcctcctcctgctcctcctcctcctgctcctgctcctcctcctgctcctgctcctcctcctcctcctcctgctcctgctcctcctcctgctcctcctcctcctgctcctcctgctgctgctgctcctgctcctcctgctgctgctctgctgctcctgctgctcctcctgctcctcctcctcctgctcctgctcctcctcctgctcctcctgctcctcctcctcctcatcctcatcctcctcctcctgctcctcctcctcctcctcctcctgctcctcctcctgctcctgctcctcctcctcttcctcctgctcctcctcctcctcctcctgctcctcnnnnnnnnnnnnnnnnnnnnnnnnnnnnnnnnnnnnnnnnnnnnnnnnnnnnnnnnnnnnnnnnnnnnnnnnnnnnnnnnnnnnnnnnnnnnnnnnnnnnnnnnnnnnnnnnnnnnnnnnnnnnnnnnnnnnnnnnnnnnnnnnnnnnnnnnnnnnnnnnnnnnnnnnnnnnnnnnnnnnnnnnnnnnnnnnnnnnnnnnnnnnnnnnnnnnnnnnnnnnnnnnnnnnnnnnnnnnnnnnnnnnnnnnnnnnnnnnnnnnnnnnnnnnnnnnnnnnnnnnnnnnnnnnnnnnnnnnnnnnnnnnnnnnnnnnnnnnnnnnnnnnnnnnnnnnnnnnnnnnnnnnnnnnnnnnnnnnnnnnnnnnnnnnnnnnnnnnnnnnnnnnnnnnnnnnnnnnnnnnnnnnnnnnnnnnnnnnnnnnnnnnnnnnnnnnnnnnnnnnnnnnnnnnnnnnnnnnnnnnnnnnnnnnnnnnnnnnnnnnnnnnnnnnnnnnnnnnnnnnnnnnnnnnnnnnnnnnnnnnnnnnnnnnnnnnnnnnnnnnnnnnnnnnnnnnnnnnnnnnnnnnnnnnnnnnnnnnnnnnnnnnnnnnnnnnnnnnnnnnnnnnnnnnnnnnnnnnnnnnnnnnnnnnnnnnnnnnnnnnnnnnnnnnnnnnnnnnnnnnnnnnnnnnnnnnnnnnnnnnnnnnnnnnnnnnnnnnnnnnnnnnnnnnnnnnnnnnnnnnnnnnnnnnnnnnnnnnnnnnnnnnnnnnnnnnnnnnnnnnnnnnnnnnnnnnnnnnnnnnnnnnnnnnnnnnnnnnnnnnnnnnnnnnnnnnnnnnnnnnnnnnnnnnnnnnnnnnnnnnnnnnnnnnnnnnnnnnnnnnnnnnnnnnnnnnnnnnnnnnnnnnnnnnnnnnnnnnnnnnnnnnnnnnnnnnnnnnnnnnnnnnnnnnnnnnnnnnnnnnnnnnnnnnnnnnnnnnnnnnnnnnnnnnnnnnnnnnnnnnnnnnnnnnnnnnnnnnnnnnnnnnnnnnnnnnnnnnnnnnnnnnnnnnnnnnnnnnnnnnnnnnnnnnnnnnnnnnnnnnnnnnnnnnnnnnnnnnnnnnnnnnnnnnnnnnnnnnnnnnnnnnnnnnnnnnnnnnnnnnnnnnnnnnnnnnnnnnnnnnnnnnnnnnnnnnnnnnnnnnnnnnnnnnnnnnnnnnnnnnnnnnnnnnnnnnnnnnnnnnnnnnnnnnnnnnnnnnnnnnnnnnnnnnnnnnnnnnnnnnnnnnnnnnnnnnnnnnnnnnnnnnnnnnnnnnnnnnnnnnnnnnnnnnnnnnnnnnnnnnnnnnnnnnnnnnnnnnnnnnnnnnnnnnnnnnnnnnnnnnnnnnnnnnnnnnnnnnnnnnnnnnnnnnnnnnnnnnnnnnnnnnnnnnnnnnnnnnnnnnnnnnnnnnnnnnnnnnnnnnnnnnnnnnnnnnnnnnnnnnnnnnnnnnnnnnnnnnnnnnnnnnnnnnnnnnnnnnnnnnnnnnnnnnnnnnnnnnnnnnnnnnnnnnnnnnnnnnnnnnnnnnnnnnnnnnnnnnnnnnnnnnnnnnnnnnnnnnnnnnnnnnnnnnnnnnnnnnnnnnnnnnnnnnnnnnnnnnnnnnnnnnnnnnnnnnnnnnnnnnnnnnnnnnnnnnnnnnnnnnnnnnnnnnnnnnnnnnnnnnnnnnnnnnnnnnnnnnnnnnnnnnnnnnnnnnnnnnnnnnnnnnnnnnnnnnnnnnnnnnnnnnnnnnnnnnnnnnnnnnnnnnnnnnnnnnnnnnnnnnnnnnnnnnnnnnnnnnnnnnnnnnnnnnnnnnnnnnnnnnnnnnnnnnnnnnnnnnnnnnnnnnnnnnnnnnnnnnnnnnnnnnnnnnnnnnnnnnnnnnnnnnnnnnnnnnnnnnnnnnnnnnnnnnnnnnnnnnnnnnnnnnnnnnnnnnnnnnnnnnnnnnnncctcctcctgctcctgctcctcctgctcctcctcctcctcctgctcctcctcctcctgctgctcctcttgctcctgctcctcctgctcctgctcctcctcctgctcctcctgctcctcctgctcctgctcctcctcctcctgctcctcctcctgctcctccttctcttcctcctgctcctcctgctcctcctgctcctgctcctcctgctcctcctcctgctcctgctcctcctcctgctcctcctcctctttctcttcctcctgctgcttctcttgctccccctcctcctttgtaaaagggtttagtcattgaggctaaacaatatgaaagaattttttaaaaagttaaaaaaagggaattaccatgtgatccagcaagcttacgatctggtgtgtatccaaaggaaatgaaatgtttgcagaagaggcactgcactcccatgtctattgaagccctatttccaatagccaagatactgagtgaatgttcaccagtggaggactatgctacgtgagtgtgtgatagacagtactcctctgccttagtgaagaagggcatcctgtcagacgcagtgaacttgaaggctgtaacacttgtagggcatcaggcacagaaagacaaatgctgcagcatcttgtatatctgttgaaccccaaaaagtgaaactcacagaagcagggagtaaatggggtcaccaggtactgggagatgtaatgagggcgagaggtattggaacacatacacacgtgtgcacacactcatacacacacatacactcattctcatacacacatatacacaccatgcatacacattctcatatacacacacacatacatacacactctcatatacacacatgcacacactctcataaacacacatctacacacagtcacacacacacactcacacacacacacacacacacacacacacacacacacattcccattagcagaaggaatcaattaaagagatccattgcataacatggtgatatatgtgtcaacaaagtaaattgtaaattgctggtagttgttttttagtttctaccacaaaaactatgtatggagggaatgtataggtgaattagcccagtttagtcattctacaatgtacatacattttcaacacatgtgcttatatgtcatacatacgtttttgttatttaaaaaattagcaaaagaaaaaccaagagaatcaaacgagagaagctcatttgccctgaagatgccccttgaagaatggcaaggatgagataagtcagtgggagacgggaattctgcacagtagaccggatatttaaaggccaggtttttaattcactctcctatctgaacattctcatttctcccttccagagcgtgaaggaagtctccctgtaatcactccctcccacagaggctatttcccttttatgaacttaagtcaaaataatggcctgctgtcagccttgtagcatttaccttgagaagggcagcccccaaggagcagcatcttgtctgccgccaatgccgaagagctaatcttgtgttgctgctgaacaacggtgctgttatttcctgtccaacgtagcctgtctagcaactcagtgaatgtttccgagggctggagccaagtcttttgcccaaacaggcagtctgaaacagccttaaatgccgtagatcttaaaacctgataaaaacttctatgaggcatccatgtgtactgctgttctgttaacatctttcaggaaacagagccagtctagatgtccgccagcagatggctaaggagtgtgatacatacacaccgtgggatgccatgcagctaatgagcagggagagctcagggcactcacaggaaaaccaccatcatcaaacatccaaatgagccaaacttgggaagacggttgtctgtcgcgtgttttattttatatgtagagcctagatttaaaataatgtgtgtgcactgatgtgtgtgcttgtacatacacaccactcctaaaactagaaaggggatcgttaggagagtggagattttcagggatgaaggggaaggagtgggagagagagggcattcaataagaaagcagaggagactaacaggagaagcaggggcggctggagtgaggcagggtagaagagaaggtcatgaggacgtggagcaactgagaattaaatataatgacacatatggatgaagaattcatagtgaaactactttgtatcctaaactaaaaaagtgaattaaaaacaaacaaacaaaaaacaaacactaacaacatccatgggggaggcagccatgacgagtgacgtcaaggcacgctttgtcttccaggtgaaggcttccgcaattaccaccacacatttccttttgacttctctgcgaacaaatttggcttaaatttcaacccagccaactggttcattgatgtcacgtgcttcctgggactggccactgaccacaaacgggtgaccaagcagatgactgaggcctgcacggccatgactggtgatggcagtggctgaagcctgcccaatgccgtccacagtgacaactctcggtgactctctgcatccagctagcggctgttggcttacagttctcttgtttgctgcttgtaggagggggtaggaggtggggaggggatgaagtctacagggtttgggaagcttcatttgtctcagataatgtcaactgtaacaatcagtgataaaaatcagtcggcatggtttaaaagatgaagatatgggaaatggctcttgtgttattttcacaatttataacttcctgactttccactgtctgctctaaaagacattgtgtctggggctggtgaggtggctcagtggcaagaggtcaaaatacgtgctgagtttgatcctttgggacccacatagtgaaaggagagaattgagcactcaagttatcctctacatgtagaagatatgtgaaccacatgcaacacacacatgcacacacacacacaatcacttgtgctcctaaacgatcacttgtgcacacacacaatcacttgtacaaacacacatgaccacttatgcacacacacacacacacacacaggatcacttgtgtgcaaacacaataaatctaatcttaaaatagtttaatgagggtgggctagagagatggctcagcagttaagagcattgactgctcttccgaaggtcctgagttcaaatcccagcaaccacatggtagctcacaaccatctgtaatgagatcagatgccctcatctggtgtgtctgaagacagctacagtgtacttacatataataaataaatcatttaaaaatatagaaaaaatagtttaatcgatgtaattactgctcagcccactctataagtcaaatgcttatttagatgtcttattttctccttcctactaccattttaaaggcgtataatttagacatgccagacatcatattaaacacaaattaagctttcatcttaatgtttatacacctgatttgtattctaattgatctcagccactgatgcatgctactttaggtacttctactaaataagtgtattaattttccacaccaggccatcaacacttaataaccaataactcacctggagtcatcagtgcttacggatgtgtcgtgtgcatgtggccgtcattgattttgcagcaaaagataaagtgatcactatgtagcttctgaattagaacagactgggtgtgaagggcgtatggacgtccactgtgtgagaggtgagagggagaggaagtgtctgttaggttggcacctagtaggttcaagataacatcaggagggatacaggatttaaattttaaatgttaggaaaggacatgatacaccaactgggaattatgatgaagtttttcatccagcgggtgtttaacattgttatttggcctttagaaatgtgcgaaccatgagcaatttacaataaatgattaccgttcgttggtgtccttgtcccgataattgcatgttatttagggactgttctctccagctctggatgcttggtgatcactcacatttagcaaactctcgattactgatggcttcgaggccaggcattgcccatcctatctgccctttggcacagccagggggaaagccagcacatctctgtagaatggggatccttcccccaccccatggttctgtccctcatttcccatctactaataccagcacttactaattagcacttactaattggctgatgaatgggaacctgatcctacttatcaccaagaagatgacagacatctgtttcatttcagggggaagaagctcaagtagagtcctgtcctccccttaccctgatgtcatggtgaccacacagagccagcctgggatggtggagctaactcattaagcctggctctgtctaagatccactcagccctaatatacaccagcaggattaggtatgaggctatatctgacttcttcttaaggtagtgcccacccctttctggaacccgaatgatcaaaactgagagaaaaatagttgtgtctacttgggaggggacagacagaggctgaaggagtggagtacacttggtgaaatatctgtatttcatccatgcctcaaaagggatgaagcactgcttcacccaccaggaaaagctacggggtcagcagagcatccctcacagggtgctcggccacagtgccagatgccgcattgatggtgagtggcgtggctcagacacaagctggacaatggggtgtagagcaacgggccacagaccagaagcctccaggcctcttctgtcgttcactagttgtaaacgggtactgtggaagcttctctctgaagaagacgaacaactgcgcatgttgcgcctttctccccagtaacaaaatatccaagtaaacagcttaaagcagcagtttttattttgactcaaattttttccaaaagctgaacaaccgcaagtgacagaggcagaaatgaggcaggaagaggctctgataggactcaggcatcaaaggtttgtcctcggggaactatacatcctccagccaggccccacctcctcatttccataacccaatctggccccacctcctcacttccataatccaaccaggcctcacctcttcatttccataatctaaccaggtccacctcctcatttccataacccgaccaggccccacctcctcatttatataatccaccaatttctggatccactcaggagcttgaaccctgtagtccgttcatttcctccaaacccactgacagatcaccaagcctttgccacgtgagtctttggggaacacttcaccctcaaaccgtaacactgtgtatcaccccgtagtctttttctttgaaactctggctcctccccgcgcctctcattgttctcagaggacaaacctttcccgggttcagtcgtgagctaggatgcatgttcctttctttatttcagtcctgtccccagatacagggacactgaagtatagttgttccctcattgtctgaaaaatgaggaaggaaacacacgtctcactctaacctctgtgatccttttttaagcttccacagtttaaggagtcagtcaaaccccttttcttccctttcccctgcgtcacggaagcgctataaatgaactggaactttttttgtccatgttctctccgccatttccctgcagatctatgcccgtagccctaccccaccccacccccacccctgggaatattcctgacttctaaatctgcctcatcagaagcatgaggaaggaatccctggttccaggcacctgtgggcacagcgagcctggcagcaaagcagtgggtggctctgcctaagcctttagccttcattctcccttcttctgcccgccctccacggtatctctgagcccatgagtggagggggagccagtcacattttgatggtgactgtctcacagtttcaaagttttaggaaggccttgacctgagaaagggcaccctcacttctagctccggtcctggttttgaggaaaacatgccttaggccatttgtccatatcactcacaacttccagtctaccttgctgtttctacccttcggttttttctcctatacgaggcaacacgaaaatgtgattattgacagaaatgctgcagaacttgattctctgccaacaggcctgggctatccatggataaatcggcagggccccagtcgaatgggggtagggttacatttttattaccaaatgttagattcacagtcctggtctgggcagcggtgtagatggtcttacagctgaggtaaaggaacagcaaagccgggcatcggctccttcttggccccgcaactgctgcacacaaaagcgagaacagttccgtcagatttgatggtgggcgctcacttcacttcctcttcagaagtaaagggcacttagccatgtagcatgggaaagtgcttcttccaaaggtgccaagcagagagtgcatctatctgcgcagttccccaccacagagccacttgtaacatagaggaccacaatccttcaagtcagggtcttagactgagtacacattcccattacaaccaaccatgcaggggcagaggagaaccagtcaacagggctggtttggtctctgtggcttcaagatacagtttaaaaactaagggctttgacttttgctctatatgtaaattcagagaactaagtcagccttaaatactgcaaacaaaaaactactccctttctttctagattgattttatccttgtgctttgcttggatgaatgcatgtatgtgtaccatgtgcatgcctggtgctttcggaggtcagaagagggcattggatcccctggaactggagttacagatggctgtgagccaccaccctggtgtcaggaactgaacctgggtcctctgcaagagcaacaagtgcttttaaccactgtaccatctctgcagccctgtaacaggccactttgatggggtttagtactacagtacagtccctgattctggccctcatctacacaacccacagaggtggacactcttaaattactggcttcaaatagctcacagaaacacacacaaaacaaacctctttcttcatttatgagcaaaagtagaaacgtccttaggcttcttttcaggtcacaaactatgggaaaaaaataagaactgtcatcaaagcaacatccaagataatcaacctatagaaagaaaatatttattatttattagggctcacgattttcttcgtcacgacccctgattggttagtcctgaggttctgggcccatagtgacacatcatggcaagaataaatgaaactaaaaaaagtatctcatagtcgggattaaaaagggtacaaaagggccggggccccactgtcccctcaggagcatgtcctcactgagcgggaagacctcccatggcctgtcccctaatgatttcatccttctcccgtcagtaccacagagggtgccacatgcatgtgaagtacggccgtgtttggttaagaacggagtactactaaatatagttaaagcactgttaatgtagaagcaaccccgttactgttcatcttacctttaagtaaactacagtctcggtcgccagagccatctaatctgactccctgattggcagccgttcttcccttgtaccttgaccagaaagacttttagccaagcagcctcttccaggcaagtgggggccggattgctcggagcgctccacggattccccgaggaagcttccttgcaatccctaacccagctgcctaactcctgctccggaaggcactgttgaaggtgtgatctttcagacagcttgttctggactttctccatcacgagccgcagtgaactctgatgctcacttcacccaggctggagaggcagctcttcctgtgatcggcgcagaccgtcttttacatacagggagaactgtgatgcgcgctgtgcagatcatcacgcccctcttttgcgtggaggtgcatgctatgccatgatggggacaattcttgcccctgcccctcccccctccatcccacattataaaagcagtcaattcctgtcacttcttgagtcaacccagagacactctcctgttctgtcccctagagctgcagtagcaagcctgataaactgctattctcaagtggcttttcccaactatggtttatctttgtttttagcagagtgagctgaggcagtaatacatagagaccgtggaggccccagtgacagtgacatcactgcacagcgagagagcagctggagaggtccagagaatggtcgggacttggagtggagatggtgcgaatgactagggttatgaagagctgaagacaagaaactacgggctcagacactagaagaatttcagggggctatgtgctgcaagggttgtgggaaccaagggccccaacatctagggatgttcaggagctataacactagcaggcattgcctgctgctggaacctgagggctactatagctgctaagtgctggagctattgatgattataatctagagagcagtacgcttccatctcgagtatctagaaccaaagatcaaaagctttaaaaccccaaaatagaaggccctatgtctcggattggagctgtgagcctcgaagtgtgcctgccagttcaggggcttggcattgttcaagggtctggtgttagcgttctgtctaagctccactccacagttacctggcaacatataggtatgcctgagtcactgtaaaaggggctgcttgtccctccttgctcccctgctcttgctcttcccttccccctctctccctatgagcttctgatagccatgaccttactcgacacccagccgccttcaggacatccatctaccctattgtgctaatgaacgtgcttggctttttaaccacacccacccggataaagccttatacacattcctattctgaccaaccagcaaaccttttcaagtctttctgctctgctcttttgagtcccgggttgtcactgagaagcctttacatcatagcccgagagctgtgtcgtcttcatatttcctctgccagacaaagcagtccgatgtcctttagctctgcttctcacaaagtctcaggaatagacaaaacctaatggacagaagctaaaccccttgccgtagtctgacagcaacaacagcaacaaaaaccacgtagctctagtgcttgtcaggctagcctgttctagccatgttctagccatgtcactgtgggcctcctggagttttctgaactccaaccacagccacctgttggctccacctaagaaattctgttgtttccagactacttctccaaatgttttcaaagttttcctataaatcgattctacaggctttcccatgctattgctatagaagacagccacacgcccagcttctcaatacaaattttctaagcattcctcggtccagccaaactgacaaagaaagttaagcatcatagtaaatacatttaggaaatactattttgatttttcacccaagcaaaagatagggtcataaactactcccttccccgagagcttttatgcttccaaaaaaaaaaaaaaaaaaaaaccaaaaacctggaagactcttggagtaggagtgcctatgcagaagagcatcttatgtaatatactctagtggagatatagttatgaagttgattgatgattaagacataccattttgatgcctagatcactataaataacagcactttgcttttgtgcgacattgctttaactttttctgcatttccttttaaaggataaaacgagcattgatggatccaggaagtcacaatattatgtagtgacttgctccagaataaggtctgtggccttcatgcgctaggatgatttgcctgccagagtctcttactctctgtcgaagcttgactgagttcacagagcccagcgacgtgattaaaacctccctgacactccctgacagacttgtcttggctcatccgatgataacacaaatgccttctgctgtaacatccagcctgctgttttctgtgtccccaacctcacactcttctccagctctccatggaacaatgttcttggcacttggcagctctttgtaacaacttccaggccacttatcatagcatggctttctcatccaagaagagatgcagcgaaagcattcctgacttgaaaaatcaccaggagaacctctgtgaagagtgtatcagatcgcggaattcttctccacattagctgtagaaggggaaatgaaaagggaaagagaaaggagaaaggacgagggggaaaggagggagggagaaagcttcatctggaggacattcctcccctaactacatataaactttacatttgacttagctttctaaatctatatacaactacatctataaaccgatatgccttcaatttacaactcatattaaagagtcatggaggtcatgagtttttactggtgttccacacaacagggcctcagagttgggaagttcttgttacataattactggatgaatagaagatggatagttggaaggaaggaagaaagaaagaaagaaagaaagaaagaaagcaagaaagaaagaaaggaaggaaggaaggaaggaaggaagaaagaaagaaagaaagaaagaaagaaagaaagaaagaaagaaagaaagaaagaaagaaagagaaatggatggatggatgaaggaatggatggatagatgaaggaatggatagatggacagattaatggatagatagatggatagaaggatggatggatagataagaggttggatggattaatggatgaagggatggatgggtgatggatggatggggatggatggatgacaagtagatgcagtgttcagcagtgcagaaggaaactcttcagtattgctttgtctcatctcttgtttacattacgaaatgagaaatctagtaggcctggtggtacaagcctgtacccagttacttaggaagctgaagttgaaggattaaaagttcaaagccttcctgggttacacagagagttcaagtctgctctagcctgggcaacttgtgtgccgctctatctcaaaataagtagaaataaaggactcagggctggagagatgacgcagaggttacaatcctggatgctcttccagaggactcagattggttcccagcagccacatggcagcttaaaaccatctgcagttctagttctaagagatctaattcttcttctggcaaaccccagattctgaggctcactcatacacttaaaagaaaaattaatatatccttaaaatatacaattaaaaactaaataaagtgctgcagatgtagcttgggagaatttgcttagcatatgcaaggcccaggcttttaatttccaacaaaacagaaaacagacgtgaagcccaggaagcggggccccaggcttgtttcatgcacaggagtattccaagttcccaagtgggaacgaagaggaccttgaattttttggttgagcttttgttattgtgaatataggtaggcgccatacacccagaaaactattgacccagaaatccaaacttacaaaagtaaacatgcaagaagagtatttgttttatggaagcacccattgtaggtttctattcatagaaagcacgtcactgcttttaaaggtcagtgtcctgggaatgcaagagacccttgtctaccaagatcacacctgcagatggccagggctagagccccacaggtcacccataagccacgagaataagactatgtcccaagtaaagcaggttagaacagagtcactgggtggtgtatcttcaattccttcaaaccctacttttaatgatggttcccaagccctccagcctcctctctagcccaccacccagcagaggcagtgggaaagaaaggacgtgggggaagtggacctgcctggaaatggttctttggagcaaattccatccccgttgtcagagaatcagcagttcagttcacaggtcaacagtggcagctcgatctacttgtaaacacttcacagatacacccgcagcagtccagttcagtagtattgggatagcagcagtggtggcatgacctagcaggaacagccaggcctcagttgaaacagcaggagtcagcagaaggaattcagctcaccagcaaccccaggaaaagttctccgtggtgcctctcttaacatactgaagttcagcaaagatgagagaccagcaagtgttgcatagctagctctaccagtgagtcaagctcctctcacagtccgctgagtcctatttatccctccaaacatcacgtgtcctccgcgtgtcttgcctcaccacgtgagtctgacttagtaaaactccatgtgagtctgtctctgctgacatcattctgccaattggcccaagtcaccttcacatatttgcctgagaaaaacaccacccaacacaactgattttccaaagaacccttaagtttccacctcaaggtggattctttccctctgagttctcagctgaactcagcatcttggag

SEQ ID NO: 405 - DNA, 489 bp, Mus musculus
atgccagcccaggccaccgacccagccaaggttccttcggcaatgccaaggaggaaatctgtgcgggttttgagggatcgatgggcgcagcaggacatgcgaggggagcagctgagcatcttctggaggaacgtggtccccatgagtctgctgcacttaaggactgtatattctcctgtgctcgtctctaggccacgctgctcactctgctgtgggcactgcccacgtatgggaaagcagacctatgacaagcaaatcagccctcagaagaacccactcgtcgctctgggagccattggtgaaggcttccgcaattaccaccacacatttccttttgacttctctgcgaacaaatttggcttaaatttcaacccagccaactggttcattgatgtcacgtgcttcctgggactggccactgaccacaaacgggtgaccaagcagatgactgaggcctgcacggccatgactggtgatggcagtggctga

SEQ ID NO: 406 - protein, 158 aa, Mus musculus
MPAQATDPAKVPSAMPRRKSVRVLRDRWAQQDMRGEQLSIFWRNVVPMSLLHLRTVYSPVLVSRPRCSLCCGHCPRMGKQTYDKQISPQKNPLVGAIGEGFRNYHHTFPFDFSANKFQFNPANWFIDVTCFLGLATDHKRVTKQMTEACTAMTGDGSG

SEQ ID NO: 407 - DNA, 189323 bp, Homo sapiens
  misc_feature (1)...(189323): n = A,T,C or G
atctgttgatggacacttaggttgcttctaaattgtgctgcaataaacatgggagtacagatacctcttccatgtactgatttcctttcttttgggtatgtacctagcagtgagattgctgggtcatataaatatatttatattttatattttatatatttatattatataagcatacttataaacatatatacaataaatatttctggaatattctatgaatgaatgggtgaataaaccttgaatgcaatgcttcaaccacttcacatttttaattaaactattaattttgaagtaattatttattcatatacagttataagaaatcatagagaaattataccttttactcagagtcctcaatgatattattaataatttccatttccaccaacagtgtatgagggttctcttttctccatatccttaccagtatttgttattgtctgtcttttggataaaagccattttaaccgaggtgaaataatatgtcattgtaggtttgatttgcatttctctgatgataatgttcagcattgtatcatatacctgttggtcatttgtttgtcttcttttgagaaatgtctgttcagatcttttgcccattttaaaatcagtatttttttcctgtggagtttgagcttcttatatattttggttattaatcacttgccagatgggtagtttgcaaatattttctcccattctgtgggttccatattcactttattggctgtttcctatgctgtgcagaagctttttaacttgatgtgatcccatttgtccacttttgctttggttgcctgtgcttgtgggatattactcaagaaatctggctgggtacagtggctcacgcctgtaatcccagcactttgggaggccaaggtgggcagatcacctgaggtcaggagtttgagaccagcctggtcaacatggtgaaaccctggaccctactaaaaatacaaaattagtcaggtgtggtggagcacacctgtaatcccagctagtcaggaggctgaggcaggagaatcgcttgaacccaggatgcagaggttacagtaagccaagattgtgccattgcactccagcctgggtgacaagagtgaaactccatctcaaaaaaaaaaaaaaaaaaaaaaagaagtctttgtccagtccaatgtcctgcagagtttctcccaatgttttcttgtagtactttgatagtctaaagtcttagatttaagtctgtaatccattttgattttttatatagtgagagataggggtctagttttgttcttctgcatatggatatccagttttcccagcaccatttactgaagagactgtcctttttctaatgtatgcctttggcacctttgtcgaaaatgagttcactgtagatatatagatttgtttctgggttctctattctgttccattggactatgtgtctgtttttatgccagtgtcatgctgtgttggttactatggctctgtaaatcaagtaatgtgattcctccagttttattctttttgctcaggatagctttggcttttctgtgccttttgtggtttcatgtacattttaggactgtcttttctatttctgtgaagaatgtcattggtattttgatgaggattgcattgaacctgtagattgctttgggtagtatggacttttttttttttttttttttttttgagacggannnnnnnnnnnnnnnnnnnnnnnnnnnnnnnnnnnnnnnnnnnnnnnnnnnnnnnnnnnnnnnnnnnnnnnnnnnnnnnnnnnnnnnnnnnnnnnnnnnnnnnnnnnnnnnnnnnnnnnnnnnnnnnnnnnnnnnnnnnnnnnnnnnnnnnnnnnnnnnnnnnnnnnnnnnnnnnnnnnnnnnnnnnnnnnnnnnnnnnnnnnnnnnnnnnnnnnnnnnnnnnnnnnnnnnnnnnnnnnnnnnnnnnnnnnnnnnnnnnnnnnnnnnnnnnnnnnnnnnnnnnnnnnnnnnnnnnnnnnnnnnnnnnnnnnnncccaaagtgctgggattacaggcatgacccaccggcgcccggccagtatggacattttaacagtattgattcttccaatccatgtacctgcaaacccaggttttagactgccaaacctaggtcattttcacaagattgtgattttgtcctgtagacaaaatctgcatttttttgagaaatgcatagatctgagaatcattgtaaatttttaacttcaagaatggatcttttcttgctctttcctccctccctaaagcctgcattttctccacaggttcttgctctatcacccaggctggagtgcagtggtacaatcatgactcactgcagccttgacctcccaggctcaggtgatcctcccacctcagcctcccaagtagctgggattacaggtgcatgccaccacacccagctaattttttgtatttcttgtagagacaggattttgccatgttgcccgggctaatctaaaagtcttgggctcaagtgatccacccaccttggccttccaaagtgctgggattacaggtgtgagccactgtgcctggccaaaatacaaccttatctaagtgctaggtgttttgctaggctcacccccatatctaagccttttcttaggctattatccaagtgggagtctctgcaaagtcacctatcttccagggccttgtttgctgccacctcctccacgaagccctcctgatcataccagaccacatgcctcatcatgtttctctctcacacacagtttttgtaggtagcattaacatataatactttctgtcttctttctatcctctctaccagaagcaacttctactccaaggtatgcactgctggccagaatccaggaattctggctgtgatggtcttgtcctcatacatctcagagctgctagttttgtatttagaatcttctaactgttcattgacatttgaaagctgttacttgtctttctttaggaagtccccttgggcacccagctcacaatcttctccagctaaatctggatgcagcctgtgatttcaaccccctttggaggtcctgtccataatacttcatcttcctcatttccaggaactgccaaccctccactataatcctgtggcctcaccttggagcttatcgttggaaactctttcacaaccataggtctcaagtcccagatcccactcttggggcataatggccattacttcatttattttcattccctaataaacagattttctcttcaatttcttcaaaaccttggttcccttgattcctccactgtctataacatcttagcttccttctagtcatatttcctcaagtacctggatcctttgtcctcccatcaaacccaccctacaacttcaatatggatattccatcagactgctgagggatgctgtgtaaccacaactgtgcagactaagccagtttaagcttgtggcaaccattcttagttgggcccttaattaggccaggcaaccttttaaatgttcttgatcagcttcctctctcatttttctcaacagcttttggaggccttcgtcactttttcccaactctttaccaaattcccactctgcttgtccagcagacacctgatcttcccttcagagcaaacaggccatcatggcaccctcccttactttattggcccactctgtaagctcccttcatcctcatttccttccagtctccaatgaaaagctgtccctctgctctaagttagcccaaccatctgctcacctgatcccatccagccctagaaagcacacactcaactttgcttctctatccctctcctctttactgccaagcatctaggaaaattaacttacatatgcgttccatgcttgtctcctccctcttgttcttaaagtcacctctgtgcaaggtctgttcccatcactcgttgaaaagtcctcagcaaatgtcagccatgacctttgtatacagtgtgctcttcatttcccttctttcctggcctttccataacattttcgacattgcgaatcctgctctcccacactctgctgattcttccacttctctcattttcccttctcagttcacaccactggcttctttttctttgctgtgttcataaatagtgtttcactaggattctatcctgagcccttttctcttcttacctttcctggccaactgtttctactgacatggatttactatattgaaccatgactaaattgttattttcagcctagactttttgccaagctccaggcacctatatattcaaaaatccacccaaagtttcacttgaatgtctaaaacaggaattcattttcttctttaatttatttcttcagttcctatctcaaaaatgattatgattatggtgataatatttactaattccttactatgtgccaggcactgttctaatcactttatggatattgactttagttgtcacaggaatactataaggtaggtattttctcactttacaagagaggaaataaacacaaacttagtatttcagtgagtgacattgtccttcacctgaatacccagttcagagacccaaaaagaatctagatttttcttcctccttctttatgtttaatccagcatcaaatctctttgactcttccatttgagtttctctggcttgattccatcttctctatttattgttctccagaatctgtgcccttgccttaattcaggccctcatcattgctcaacagattcttaaaatagtgtcctaactgatcttcacaccttcaatcttagctctctgcacccccaatacaatcattccccactctcttccagagtggtctttctgcagtgcaaacttgatcccagtactgtgctacataaagtctttctgtggctcccctcacctacctcatagctctgtctgcacggcactcaagacacccacgtaccctcatctgctgcccactgcatggcatttcagcttcatctcctacgcttccctactttcacttcagatattccatatacctccctgaatgccaagtgcaaaaactttacttacgcacttttctctgcctggaatatcccctaccatttctttgaactattcatacttcaacagtgctgtcttacatgacagccattagccatatgtggttacaagcacttgtcgttaatctgaattaaggtgtgtcgtgttgttaagtggaaacatggaattttgagacatagtatgaaaaaagtataaaatgtatcaataattttatactgattttacattgaaaagataatattttggatacattgagttaaataaaatatattattaaagtttttttctgtttctacctttttaatgtggctacattacaattacacatgtggcttgaatttgaggctcatgatatattttaattaaacaacaatctttcaaaatccttacccagtaaacttaaccaatgaggcaaaataactgtacactgaaaactacaaaatgctgctgagaaattaaggaagacataaataagtgaaaagacatgccatgttcatggattggaagacttaatatcattaacatgaaaatactaattaaagttatatacaggtttactgcaatccctatcaaaatctcaatatcatttttggcagacctaaaaagatcctaaaactggtatggaatctcagtaagccctgaatagccaaaacaatcttgaaaaaaaaaaaaaaaaaagagaacaaagttggaggtctcaaacttcctgatttcaaaacttcctgatttcaaagctacaataattcaaacaatgtggtactggcataaagacagacatacagaccaatggagtgaaatagccgaaaaaaaaaaaaaaaactctcatatatacggtcaactgatcttcaacaggggagccaagaccattcaatggggaaaggatagtttcttcaacaaatggtgctaggaagactggatatctacacataaaagaatgaaactgggcatttatcttctacaatacacaaaaattaactcgaagtatattaaagacctaaatgtaagttttatagctaaaactataaaactcttaaaagaaaatatagaggaaaagcttcatgacactggatttggcaatgatttattggatacgacaccaaaagcacaagcacagacaatataagtaaaaatagataaactggactacatcaaaatttaaaatgtcagtgcatcaaagaacacaatcaacagagtgaaaaaggaaacctacagaatggaagaaaatatttgcaagtcatatatctgataggttaatattcagaatatgtaaagaactcctacaactcaacaaccacaacaacaaaaaccttatttaaaaatagaggacttgaatagatctttctccaaagagggtatacaaatgaccaacaagcacttgaaaagatgctcaatatcactaattattaagggagggcaataaaaactaccatgagatatcactccttacccactaggatggctattatctaaaaaacagaaaaagtatcagtggggatttggagaaattggaaccgctgggcactgttgttggaaatatgaaatggtgcagccactatggaaaacagtatgacagttcctcaaaaaattaaacatagaattaccataagatccagcaataccacttctggatatacatatatataccgaaaagaattgaaagcaggtcctgaagagatctttgtacacccatgttcccagcaacattatttccagtagccaaaaggtggcgcaacccaaatgtccactgttagatagatgaatggataaacaaaattcatatccatacaatagaatattattcagtcttaaaaggaagggaattctaacacatacaacctggatgagctttgaaaacattctaagtgaaataagccagtcacagaaagacaaatcctctattatttcacttatatgatgtatctagagtagtcaaactaattgaaacaaagtagcacagtggttgccagcatctggatggagattgaaaggggagtttaatgagcataaagtttcagttttgcaaaatgataaagttctgcagatcggttgcacagtaatgtgcatatatagttaacactactgaactgtacatttaaaaacggttacagtggtaaattttgttacatacattttatgttacatgtattttaccacaattaaatattttttaaaaatccttccccaggtatcactccccctcctccctgcttctgtgtgaattaacaactccctcctttgcacctctacattatcttgcgtataccaccattatggctcttattacatttttggtaattacgtgtttgacaggataagggttactgtcccatttgccccatcctgggacaggtgaatacttatccactcctggggtcctgactagaagttaggaaaatatactagggtctttggcaagacagagaaaagaggcagtgacccctatggcataattggctaaagaggaccgtcgttatcagcaagaatatatcttggatcttgtagatgtttcactctgaggctggacctggaaggaccatttttcttcaacaatccttttataggcaggctctgacaaacctaagtaacacttctttcctccctcaacacacaaaaacatcttctccattatgaggacagccagctgaaatgactggtcatacctggtctgacccacaggagggaaaagagaaagatgttcattcaagatggattcaagggccgggcacagtggctcacgcctgcaatcccaccactttgggaggccaaggctggcggatcacaaggtcaggagatcgagaccatcctggctaacgcagtgaaacccccgtctctactaaaaatacaaaaaaaaaaaaaaaaaaaaaaatagccgggcgtggtggcgggcacctgtagtcccagctactcgggaggctgaggcaggagaatggcgtgaacccgggaggcagatcttgcagtgagccgagatcaggcctctgcacaccagcctgggcaacagagcgagactccgtctcaaaaacaaaaacaaacaaacaaacaaaagatggattcaagatagaacagctgacctaataaggttctcaggggggacaataaggaactatttttgcttcccttagactccttgtatgtaagtttgatacctaattaaatttttttttccgataatggactgtaactttctgcccttccaaggtcatagtcaagaggttacatttgtttgctccatctttgcttctagatgggagctcctttaggggcgggaccagactttattcatccttggatcccctgtgcccactggtcctggcacatagcagatgcccaataaatgccaactaaatgactgaatgtttagaatgagggtctttacagcattgagcctttccaataacccggagagaggcttttggccgagcaactagtctaccccagagagaaaggacagtctgaactagagagccacagggagtaggaaggtctgctgggtatggggagcagagggagcatgagaagaaaacgtggttcattacatagcccaggttgaacagacagatgaaaatcgcaccctccagcttcatgttccactgtctgactggtcattatatagggccgacatttatctggtctccaggcaaattctataatttcagctccgtctgaagcaacacagtaacactgactcagtggcctagattccacaagtgccacataccttgctttagcttaaatcaggcattgttttgtctggctgctaggactggctcaggtctgctaacaataagatgcttatgcatggccctttcatgcagtcagtcttttaaatttttttgcctctcttgaaatcctggaaatgattcctaacaacggttaatctaaaaatcagctggttttggtcaatataatggcgccccttcgaactcacattcatggaatatggaagctggaaggaagagtagaaactagttctgcttctcaggtaaggaaatccgtgcccagagagttgggctgggttccagccagttaaaactagaactcagagatgctgtcccgagcccttttacttctgctgcctgcccgcaattgcggtcacacctgcttcagacacttccagctcaatcctccctccattttctgtgcaactagggtcctctctggagagctcttaagccatcagctctaggagagaagtgggcagacacaaatctttcacaggttaattttccttggaacattctgggtgatttttttgtaaagcccgattctcaatggtgttgatttcagggtagtgttcctcactgagagctaaggaggcgttgcagaagtgcgctgattagctagaattgaccataaacagagtggcgcggcggatgggcaaagggtgggcagcgaactggcccaaatcatctgtgcatcacctcacaagcaccaactgagcacttactgtgtgcctgggtaatccacagctgcctaattaagaacgagcagctgccttccaaccctcccctggcccgaggagccctactaactggcagattgagggacttctgattctcatcgtgggtctggccttaactagggtcgcgactccaagcaagtatttaaaattctccaacccaggtggcctgaggcttgagaagaaataaaaggcttctcaaagggatgacagtttcgggaagttttttttggggggggggactggaaaaataccataaaaggcattttgggggtcacacacacacaagagcagaagcgctgtgagccgccctgcaggctccctgccccgggagccaccttccacccgcccccgggcggaggcggccaactcccgcccagcgggctccccagttcggccccgaaaagccgaaaggggggcgcctttgtctataagcgccgcacgggcgctcctgattggctgtagctaagcagggctttcttccgcgctccttcggagcgctccctccagcgtcgccggccccgttccatttccacagctcctcctccccggccgcgcgcccctcccgccccgcgcgcgcctcctctttctcgcggccgagttcagcccgggcagccatatgggggatacgccagcaacagacgccggccgccaagatctgcatccctaggccacgctaagaccctggggaagagcgcaggagcccgggagaagggctggaaggaggggactggacgtgcggagaattcccccctaaaaggcagaagcccccgcccccaccctcgagctccgctcgggcagagcgcctgcctgcctgccgctgctgcgggcgcccacctcgcccagccatgccaggcccggccaccgacgcggggaagatccctttctgcgacgccaaggaagaaatccgtgccgggctcgaaagctctgagggcggcggcggcccggagaggccaggcgcgcgcgggcagcggcagaacatcgtctggaggaatgtcgtcctgatgagcttgctccacttgggggccgtgtactccctggtgctcatccccaaagccaagccactcactctgctctggggtaagtcccgccggcgccccctgcgccccggcctccgtggccaggccgcgctggggcgcgcgaggtcgccgctcgcccctcggctgcgggcggtgcgcagcgacccccggtctcccctcgcctcccgctgcgcgccgcggcccccttggcatccagttttccgtcccttgggacgggcaggtgtttctgtcccagtatttcaacttccgccccccccccgcccccaccccgccgcggtctgcctgaggaagcgcatttgccggcttcccgatggagagccgggggggacccggagtcctgcggtgccaccgctgtgcgcagaggcgcgcgaagggagaggctcggcacaggctgaatcggctcccagcgagggaggacgggcgggcgattgtgtcacctctgcggtccctggggctctcctatcccccccatcacctccgcgggtcacggaccttggggacagagatgaggacaagtaagggagttggaccggggaggagagacccggcacaggatagagtcttggtttacgcgcaccagatggaagataccggttcccctcttgcctctccaaggcccctgtccctgccccctccgcaatcttctatgcccatttgcagttctcggtgaagtttctcggtgagcaaaccgatcccatggcgagagcggtctgaccctagcacgaagctccgactgtggctgtgcagagccttctccaaaccctgttcccatttggccagtgggaacctgtggctctcctggtaccctccttccgtgcacccccactcctgccagtagggaagggagcccgggcgccgaccaccattccccttcccctgggccccagggactgcgtgcccaccctacacgaccccagtcgttgatctttgaaccacttcgcagccgccctggccgcaataactggttttggcctcctttactgaagcggcagtagccaggacaaaaggcacaggcattgatatgctgagtgagaatttgacgaggtaatccaagatgcccttccagctcccgtttccctgatctctaggggcgggcaggagaaacacaacctacttttatttccagaggggaagaggaaggaagaaaataagacctctttctacagggcttttttggcatggtgccagctgcaaatgcctaggtagataatggggccactatggttccaagccttcccttgaaatcctgcagtccctgctcttggaagtaaacccatccagaagtgggtacctcttagggggtgtggctcagggagggcatagcagagttgacggatggtgagagaggtaggatctttggggatccctaaagcctttaaagtctccccaaagctctgggaaatctcctgcttcatctttccttctctcagtgcacctcctcatttctgtgtccttttcaccatcacctttatgtgttggtttaattctccaactgactgtagactgtatgatgttcagctgttgcttcatcaacacactccgacactgccaaccaaagcccttattgcccagagttctccaacaagctcctctctcccccctgcttccagaggcagggctgggcttggtcctcagagcctggtgacctctaggggattgaggcttatctttaatagctgtggtgttcagagagtgctcagggaaaagtgagcacttaaaatattatcttacatgcctagggctcactggctccacttcttacagcctctgagccccaagaccctggcactggaccaggagccacaaggacaaggcccctctctccaagtttgccaggtcacctctgccctttccggaccgctctctgtggtgaagatagaacctttgttctgaaagatcttggcttagaggacacctcccaggccccagtgtcctctagcttccttagagaagttaacacactgaaggaatctggtttcccctttgtgactcatgtcccaaaccccattccataccttcctggataaattctgcctgtgcttcatctgctatttcctaagtcttttttttttttttgagacagagtctcgctctgtcgcccaggctggagtgcagtggtgcgatctcggctcaccgcaagctccgcctcctgggttcacaccattctcctgcttcagcctcccaagtagttgggattacaggtgcctgccaccacgcccggctaattttttgtatttttagtagagatggggtttcaccgtgttagccaggatggtctcaatctcctgacctcgtgatccacccacctcagcctcctaaactgctggaattacaggcgtgagccactgcgcccggcccgtaagtcttaattctctccccaccttcattgcctccctaaaaaaaaaaatagcagacaatggtagatattagagttttaaggtccaaaattgtgacttagaaacagtccaaacaatgggtcttatctgatgaatagctactgcctctgctgcttttttttttttttttttttttttttgtgagacagggtcttgctggagtgcagtggcacgatcatagctcactgcagtctcagtctcctgggctcaagcaatgctcccaccgcagcctcccaagtagctgggactacaggtgtgcaccaccacacctggctattttctttttcatttttttgtagagatgggggtctcaccatgttgcccaggccggtcttgaattcctgggctcaagcagtcctcccaaagtactgggattacaggcgtgagccactgtacccagtctcatgaatagcttttgagggaagaaatgagggacaatcagagaccagctaagatcagctgtgctgatggctaggctacatagtaagcagagggacgaggcagaccactgactcagggttattttcagtgaaagccctggtgccttgatccacaaatttccccccactgaaggccctttttcaccacctccctactggttatgtgtagcattagggccaagttcatgccccagtgggctgctcatgcacttcaaggacctgacttgtagaggaaataggcttagcctgtccattgcttgccaccctccacaccagatgaggttgtgctggaaacaagaggcatctatgcagtgcacccagcaggggatgtgttggatgtgcagtgtgcagagagtaatttgtgtggtggtaaaatgtcatccgtgaaagagccatcaaattgttagttcatcaagttgttagttctccttggggccagagcatgttgttttccctttttatccttttcgttttatgagtgggcaggctgtcaggacagaatgctcttggtgcccccaggtcctcagcaatgcgttcatgactttcaaggacagaaagcggccgggcatggtggctcacgcctataatcccagcagtttgggaggccgaggcgggctgatcacaaggtcaggagatcgagaccatcctcgctaacacggtgaaaccccatctctactaaaaaaaatacaaaaattagccgggcgtggtggtgggcacctgtagtcccagctactcgggaggctgaggcaggagaatggcgtgaacctgggaggtggagcttgcagggagccgagattgcgccactgcactccagcctaggcgacagagtgagactccgtctcaaaaaaaaaaaaaaaaatggacagaatgcaaactccaactagaggaaaaacctgcatctgaaggcttgagctcacaaaaatgcctgcttgagagtttctggccaaagggacagttagtcaatgccctgaatcccaagatgggtagagcagggagtgaggccttgcagttactgtgtggacgtgtgagtcctggggctgcttcccagcggagcctcccctgatggcctccagacatctggctgttggctcccagaaacatcaaggccttttctgttttttccctaaatgtcatccgagtcccctaaatgtgtcccatagtgacatcatgactcttttcctcatgagataacttcagtgacagcaccaggcatgcaaagcagtaattttccctgtttcctttgatagatcagccatccttctatcctgtcttggcgcaaacgtgaccattgttaaggcagatatagcgttctctggtgccctgctgggttcttggagcatctgtaccatcctgagtgggattcagcatatggcaaggaaactgagaagtggtggagattaacaaggcagtgtggggtgatgggatggtcagtagaagctggggcttggaaggcactggtccaccagtcacattctgaaatttgcccaaagatgagctgtcttccgttgggcatcgggtagtctgtacctggtcctgatgtcttcattgggttgtgcttcttttccatcaagtccctcaggttgttgaggacccccaagaatgcatggtcatggacttctgtcttgccccaaggttttctagagtaagcaaggctcagtagacaggcagatctgaatgtgaatccctgctcttctacttacttaccagctgaatggccttggacaaatttacatctctgaagcagttttctcacctttaaaatggatatattaatactgtttgttcctaaagttgtgagaatcaaattagatgatatgtgtaaatcactgagcacagtgcctggctcttggttggtgttaattattcactgtcattattattggtcctaatactggccccttttctttagcagaagaaaaaaaagtcttccggcagcgcaataaattccacaaagatggcacagaacttggcttcacagcctctcttgcatagaaaagatagatttggctttggaaataagggctctttctcaacgttccaaagagagatgaacacaaatcccttctgtgcttcctccctccttcatgcccttctctttcattccatcttcctcctgttttcctccaaaagatcattgttttgtagctgggatctttttgttcagctgacaactcagctggtcttgagcgttttctttgggatttttgagcacagccagttacaattgctacagaaacagggccacatcatttctttgaatctcttagagtctcagttttgacttttctccctccctcttcctttgactcatcatttaaaaaactttaatgctcaattaaactactaaaaatctaagaaaagtgaatgactcttcctttcaaacgttgtaattccaagcccattgttgttacaactcttgcatttttaacaaatgggcaagcattaagagccttacccaagcctggattgcagctagacccgaaagaatagagtgtgcttttgctggctctaatagtcccaacaagtatgaacatagattgaggttaacattattaactcaattttaaaacaaacaaactgatcaaggtcactgcagacggcactgtgaccatgaaatgagaaagagagctgcagagtagaaaccagtgcgaatcctgacattgctaattagttcaacttcagactcgtttctttacagtttgtgagcctcagtttcctcatctgtaaagtggatacaataatcttgagcagacagttatttgagaatttgggcatatgtattttctttgagacaagatcttgctctgtcacttgggttggagtgcagcagtgccatcatggctcactgcagcctcaacctcctgggttcaaagtgatcctcccacctcagcctcccaagtagccagggctagagatgtgtgccactgcacccagctgttttttgtttgttggttggttttttgtagagatgggggtctcactatgttgccagggctggtcttgaactcttgggatccagcgatcctcctgccttggcctcccaaagtgctgggattacaggcatgagccacggtgcctggatagggcatatgctaaaggacttgctaaagagtagacactcaatgctatctactattattacctcccaaggtaggggcctggtcatgaaacctgcactggcttactggtctgtctccgacttggagtacttgtgactcaaatgtaaggcacagctttttttttttctagatggagttttgttcttgttacccaggctggagtgcaagtgcagtggtgcgatctcagctcactgtaacctctgcctcctgggttcaagcgattctcctgcctcagccttcccagtagctgggattacaggcatgcactgccatgcctggccaattttgtatttttagtagagacagggtttcttcatgttggtcaggctggtctcaaactcccgacctcaggtgatccgccctcctcggcctcccaaagtgctgggattataggtgtcagccagcgtgcccggccaggcacagcttttaaatccaaatatttagtcatgaccttgctataatattttagttttcctcacctagttttgtgtgtggcataaaattataatagttgcttggaaaaagtcagtgatttgcaaaagggtgacacagccatggttttgttgttgttgttgttgttgttttaaggatctataaaagtgtctttgagtagcatttttttttcattgaacatttattttgaaattctgtagtctctggaacacagtctacccattcctctgtcccatgtttctttggaagtgccacaaccttgggtgtaacaagagtacaaccagcattaggctgtacctggaatcaaatgaatgcagtaaggagcttgcctggaagccagcacagagtaaatgttagccttccttttccatccacacgtttccttagtgtttcacttcgctcattccctctgttcagctcctcctttggagagcgagacactctagccagcccgctggataaagaaagccccatggttatcaggaagccctggtcctgggtaaaggcagtttttttttttttccaattttatttcccctggcaatggattggtggccacaacaacaggtacctgttgtgagctgttttccctcacaaatgcccattgtttgttcattacatgtgtgaatggccatgagagagatcctcacagtagtgcatgcaggcacatattcattcatccactaatctttttttttttgagatggagtcttgctctgtctcctaggctggagtgcagtggcacgatctcgggtcactgcaacctccatctcccgggttcaagcgattctcctgcctcagcctcctgagtagctgggactacaggtgcatgccaccacgcccggctaatttttttatttttagtagagatggggtttcaccgtgttggccaggatggtctcagtctcctgacctcatgatccacccaccttggcctcccaaagtgctgggattacaggcatgagccaccacacccagcccaagaatcattttttaagttccaatgattgtcagaaatggtggcacatcagaatcacttgggtggtgattaaaattgtcagaagcctgggcctttctttacctaggcctgatgaattggaatgtctaaaagagatgccctggcttttttttttctttattttatgctattcaggtgtttctaatgcacagcgggctgagaaccattattcagtttccttattcaacaatatttattacttactcattacctgccaagcgctggcaccatccttgacttcattgcacttacaggccagttggagaaataggtgcacaggtgacacccctcaagacaccatccattctcaagtgccatgggaccgagaatcagtgccagcttagggggaattgggaggctccccaaaggtaggagccaagtggagcatggcaggaggtgcagggctggtcgtggagaggctgggtgagctggcatcacaacctgagcaaaggtcctgagaaagagagacagggcagggcagctcaagaactcaattgttcagcgtggctggtgagtagagtggagagagaggaacataacgtggagagggagacgtgctggaggtctctgctcagtggtgaaaagatttagcagacctcatctggtttgtggaaagagaggctgcccagggctccctgcagccttcccactggctctcacctcctcctctcagcccgtcgcacataacaatgatttctagtgtggaggaacagtctcaagcccaatttctagaccagcacttgtcggtgggatgtgtgaagttattcaggaaagacactgggacaaacatctcattgggtgccagtgtccctgactctttagtgggcttgaagtggggctgagtgcctgcctcaggctgcatggagctgaggggaggcttggaataaagtctcagttgggcatttgatttcacagactcagactcagtcctgggggaaaaattactaacaaacaaatacactaacaacaacaacaacaaaaaacccctaaggctatcacaaactcagaccaaacccagagcctgtcctccttccccttccttcctttgacctgtactctttccactgcttctaaaaggtacatgtgtggagagggggttgttcccattccccctcattctttctttagcagctgattcccacgagcccacattccagggaagatggatctgccctccttcatatctcgctgcccatttttgcaggtgttggggctactgcagggcctgctgcttactagaaaggttggagggctctgtgggtcctggcaggctgcaggtttctctctggagacattccagagctttagaacaaacatgcagacagtcttacagctgcagttgcctgagccttaagggccttgctactcaaagtgtggtcctcagaccgccagcatcagcatcacctgggagcttgttagagaaaacaaatctcagacctcaccgaccccacggaatcactatctgcattttaacgacatctccaggtgattcatctgcacacaagttcaaccacaggctgaccatttagagaagctggacttgagtgggattttgcagtttttccttttgatggcctcctcccctttgcttcccctcctacccttctgactccttgtagcttattttagaacatgtcgggatcctgcttctcttgtcaacaaaaggctgttattaaaatctttcagccggcagcagcaatgtttaattcatggactagaaaattaattttattttcatgaatagagctgaggaaaaatagcaaggagactctgtgcatggcccttgggaatccagcttgtctatttaacagatgaactggcaacagtggggaggcctgaggggagggctgccttctacaaacttgtgtagcaaattgtattaggatgcttttggctgcaggtatcacaaaattcagcttcaaatggcttaaaagaaaaggaaaatttctaatttcactgataaaaaatcttgagatagggcacttttaggatgacccagaaatgccatcaaatagcaggtttgttttctgccatggtggcttgttgcattcagttttcctcatggttacaaggtggccgccagagttccgggcagcacatggagtcaatgtcctatggaaggagaaagaggctgcccctccctgaagtttcattttatcagagacaaaatctttcctggttacctcacagctgatcctcacagctggtgtcctcttaaatctcacttgtggccaggtacaatggctcatgcctgtaaccccaccactttgggagactgaggtgggtggatcacttgaggccaggagttccagaccagcctggccaacataacgaaaccccttctctactaaaaatacaaaaattagctgggagtgatcgtgaacacttgtaatcccagttactcgggaggctaaagcacgagaattgcttgaacccaggaggcagaggttgcagtgagccgagatcatgccgctgcactccagcctgggtgacggagcgagactgtcataaaaaagattttaaaaaaagtctcacatgtaggattgtgtcatgcgtcccttggtaaaccagtcattgggaaggggatggattactatgggtggctcagcctgatcagggttggacactttcttcatctgttgaggatactataacagagtaccacaaactgggtgacttttaaatggaagaggaagaaatttatttctgagttctggaggctgggaagtccatgaacaatgcatcggtagattggcgtctggtaaggacccacttccttattcatatatggtgccttctttctgtgtcttcacatggcaaaaggggtgaagggtctcttctctctccagccttttaaaaagtattgattgattgattgattgtctgacagggtcttgttctgtctcctaggctggagtacagtggtgcactcacagcttactctaaccacgaactcctgaactcaagggatccttctaccccagcctcccaagtagctaggactacagaggcatgctaccatacctggttaattttttacgttattatttttgtagagaatgagggtctttttatgttgtccaggctggtctcaaactcctagcctcaaatgatccttccacttcagcctcccaaagtgttgggcttacaggcatgagtcactgagtctagcccaccagccttttcttagtgccttagagggcactaatcccattcctgatggttccatcctcatgacctaattacctccccaaagccccacctcctaataccaacaccttgaaggtaaggatttcaacataggaattttggagggaagacaaacattcagaccacagcagccactgagtcacatgaggcaagggcaaaagagccaaatgaaacagaggctctggctcgaaggaagcggagggcgtggctgctgagacagccaacacctcttccaaggccttccttggtgttgcctccattccctggaaaggtctggctcctgtgttttacatttcagtgtgctcttcccagtagagcggtaggttactctgggcacagggaatttttaaacacccttgtgggagggttcctggaactgaattaaaagaaaaaaaaaaaaagggaaaaccagtgacttagaatgtgttctttaccaagattctccatggtgacatactttccccagactgatcgttttcttggttggtcattttccacatctttcaagtgacacagaatctcactgatgaagtcctaacaggatttctgttctcttgcctcagattttgcttcaaaagggagcatttataaggccagtgcatcctcacttaacctcacacagcaggtactttttatttgcacaaacaatctaggaacaaagatcttgcttaggaggagggagctaactgtgtgaaacaaaacaatagcttttggccggagtggacggaaaaccttattttaaagggcagatgtcagaaaaatgtgtagagcgggactgtggcatagccattgtgtaaaacctttcagtcaaacaaggcatgtacaatgcctacttaaggtaagtgcttgatctacgttgctcctggtggctattgggaagtttttgaagattgccttgtttttttttttttttttttaaggcaaagtctcgctcttgtcccccaggctggagtgcaatggtgtgatctcggctcactgcaacctctgccttctgggttcaagcgattctcctgcctcagcctccccagtaactgggactacagacatgcaccaccatgccgagctaatttttatatttttagtagtttcaccatgttggccaggctggtctcgaactcctgaactcaggtgatccgcccacctcggcttcccaaagtgctggcattacaagcatgagccactgcgcctggccgaagattgcctcttaaatagagaaaaaacatcaaatatcaatgagcttgaaaatgaaacaagacatgaatagagtttagaaatcaggtttaaatttattttcttcctatatcactacctattctatcaagattgtcacacacttggctatttgggctgtgttggttttagcttggttctctgaagagacagtggcttacaaatgcagcctatgacctaaattggaaaggccgtctctaatagcaccctcctccttaacatcaaaaagcatttattaagcaagtaattaatcacttacagcctgggccacccgttgtgtaagaaaacaaagaccaggtctctacccttctccctttcataactgaaaggaacagctgtaatttcccccagtaccctaaccaacttactattctttaggcaggggtagataatggaaaatattcttactttcaaacttccatgcatgaagttagaaatgaatttctttcttaaaaaaatgaatttctaaaatgtaattgtcccgtggaatagtttatcaacccacccctctaataggttcgtaagaagcttttgcagatggttacaataaagctcatctctgttctcagcctatgactcacttgagtgtccccagaaacatttgttttgccctggcgtctctgttagcaaaaggagatatttgttaggaagtgtgaataatgcctacatatctcccccttccacctctcacccccacatccattgtttggctgtgtagcaattgaagagtgggtgagtcattagcattttttagctatactcaaattactgtagactctgtagagggagaaaaaataattttctctccaccccttgtcatttttagcagggaaagaccccctgcagcaaaagacagactagcaagagaaaaacaaatcgaaatttattgacatatatacctcaggtatacatgggaggtaaccaggaaacgagtaattctcaaggaggtgactttgcattcaggcttacatacgattttcaacaaagaacagtaaatttataaggaagtgacaggacaaacgaaaaggactttgagtctggagggaaggcaaattgataaagggtggttagtaaggcttgttatgtagattcctttgatgtcttaaagctgctaggggtctaactttgtcttgcatggtcatcctttgcttttccttataaagaggggaggaagacccttttgcctttgtaaatctgtgtcctgcttttaggcaaataaggggagggcagagagctcttcttgtatctgcttcttttcaattgctttcagctcaaaataatccttatgccagagtagtgtattttggagcggcatattctggtttcctacagcatcatctggagctggggggatggggggtggtgagcgaagccactaccctgtgagtatagatgagatctgcactttacttggcagagctcccatgagaactggaagaagtcacagctattagagctaatattccctacagacagagctgggcttccattagtgtgctccactgtggctctactagttgttaaaatgttgaaatagtgaatagctgctgccttccctggtactcctggaatcgccaacaatccaggagctaaagggttattgcctggcccagctgcagggcttaaatctgcatctgttctgactggttttgattagctggtgccctgtgggttgtcagatatttttaatatcacctctgcatttgcatcctcttcttacataatccgtataatcttcagcttctatccctttcacggttctagtttaatgagaacttaaaaaaaaacagtctgttattctggcttaaagttatgtcccgaaaccatgtaaagaaaggtattacagcactgtctgaattctggggctttcactcacttgtctgaatagaaactccttttgcagtagaagcaatgtgtatctaaaatgtgattttattttctggtttacaattgctgttgtatacgatttcctccccccaaaaagaattgatattaattttatcatcagagaaaaataacaccataaagataaaattgcgaagctatttctttttggtgttaggggttgggaatatgatgtagaagatggcactgcagatttaggtgtactcgtcactcacaattcattttcccatgaggctgtatattgtgtctaggttctcgggctagcctggggtcagcgtcactcaaaccatcacctgaagcgttgtataggtaatttttttaaattatagaaagtgtgaaacatatacaaaggtaaagagaactgttaccgctgcctcacatgcacctggggattttttttctttgaaaccattttactgtgatgtgtaatttcaagctcatagaacagttgttaagaatagtatcaggatctcccgtagactctatccagattcgccagctgacatcttgcctcatttgctttatcatttcctctgtgtatgtatatacgttatatacgtgtgtatgtatagaatctatatatttttttctgaaccatttaagaataaattggagacattctgtccttttatctctaaatattttagtgtatattttctgagaacaagaatataaccacagcacagttatcaaaatctggacatttctttctttcttttaaaaaatctttttcttttttttaattttaatttttttcctttttttttttttgagacagagtttcactcttgttgcccaggctggagtgcaatggtgcgatctcggctcactgcaacctccgcctcctaggttcaagcgattctcctgcctcagcctgccaagtagctgggattacaggcatgcgctgccacgcccagctaattttgttattttcgtagagatggggtttctccatgttggtcaggctggtctcgacctccgacctcaggtgatccgcccacctcggcctcccaaagtgctgggattacaggtgtgagccaccgcgcctggccaatttttttcctttttaaatctggccttcctgagtaaaaaatctggaaatttacttttgatattctctactgcacagtggaaagtctaatgtcatcaggcatctttgccatgtcctctttagctatttttttccccctttggattagattgaagcaaattccaggcaattgtatctgtaaattactaagtatcaagtattggcagaggtcattctggctacattgtccatggaaaactttgggggcaacctttttcctactaactctccctagtccttgggaaaaacagctgtgagaggctggagatgggtggaaacagagaagcaggagtcagtcatgagtgagttgtactgaagtgcacagtgtggtctatggccgtctgcatcggagtcatctgagttgcatgttgaatatgtagatttcagggctccatccagacctacagaattagtatctctgggggccagacccaggaatctgcattttatcaagtgttgctggtggttcttatagccagggggttggagacattcaggccccgaagcaggtggcctgggagtgatgctgtgtccccatcaggtgaacatcacccttctcccacctcagtattgttgtgtggctctccttagagtgactgaaattccagcccagattccttagggttgacaacaggtgcaattttaggcatgtgaatagccgtgggtgtgttccctccacaggaatccacacgttggtgtaaagtgctttcagcacatattttcttctaacacagggctgacaccttgagggaatgggagtttcacaggagcagggagagtattaggacctggaatactttataggggtggagtaacttgttttcttgggggaggatgggggtggggatgggaatagatacttggattgtcccttagatgtgtggggaaaagctgttaggaagtaggaggtgaaaaaggaccctggagaaagcctcaaataagtagctttgggcacaaaccttaacctgcaccttgggagaggaacaggaaaccttcttttctaggattggtgtgaggactaaatcaggggcagcagctgcttcccaggaaggaccagccctgctatgggagtagttattacccccagaaccggacaagcacactgatgctgtcattccactgtatttctggatttccgctgtatttcaggatttctgctgtatgtctgtattctagtaaatttgttaattctaaatatggaggttcatggagctcttctctaaggtcccttcttatctctggagacttttataatcacctcatttggagaggagcagacacttccctcgatcagtcatgcccctttttcaggcaggccggagacacagtgcagttcttcatgggactaaattgtctttaggggcatcctagatttagtcttctctgtgacccaagataggagggtcctttgtaagtgtttctgagccactgacaaatgggcggaaagacagccaggctctagatgttaaatgcaactgagaggtggggaggacttaatcctcacctgcatcctgtcaacagtggccacatgacataggtgattttgctcacccacagggtgatgagggctgatgaccaccctcatctaggacagtaatctgtcttagtctgttttgtgctgctatgtcagaatactgggtaacttcaaatgaacagaaattcattttccataatactggaaggtgggaagtccaagactgaggggctggtatttggtgagggccttcttgttgcatcatcctattatgcaagggcaatgagagggtgagagagagcaagagggagcccacctcatccttttatagttagtccactcctacagtaatggcattaattccttcataagggtagtggcccagtaacccaaacacctcccattaggcctgcttcccaacactgtggcactgggaatcaagtttccaacacatgaacttagggagacacattcaaaccacagcataacccaagtggatatttccattccttctgctgttgaatctttcccctcccttctcttggaaaggagatgtactttccaagtccttttttctttctttctttttttttttgagacagagtctcactctgtcagccaggctagagtgcagtggcgtgatcccagctcactgcaacctctgcctcccgggttcaagctattctcctgcctcagcctccctagtagctgggactacaggagcacgccgccacgcctgactaattattttgtattttagtagagatagggtttcaccatgttgcccaggctggtctcgaactcctgagctcaggcaatctgcctgcctcggcctcccaaagtgctaggattacaggcatgagccaccacgcccggccctcaagtccttttttcttttagtgtgaatgattctcaagccctagctggtgcttgtttattttgaggcttctccagccctcctctggggggccctgctgcgtttctctccctttcaattatgtgagtgtgaggaggctggtgggggccttctagacctagccagggcccacctctaactgttggtgtcttcatagggaagaggaaatacaaagcactgtgaaagcaaagccgccccttggccctgtgcccggacctcccctgacgctgtggaagcagcaggccccggagaagcagccgtccaggctggccccctggggcctcctggggtggccaggtgtttcttcagtctgaaggttgaagggagagattttggactcagataaatttttgctgaatagctgaagtgctaattaatctcccaagtctccctttggccagggccatttctggtggatattaattgggcttatgagacagatgaagtattttaaggagcaaaagaagttctccaggcactgttgtgataatgctgaatgtgcaaattggtgtttttagtctctgttcagatttgagagcagtgagggagccctttttgggatgtgcttttctgcacctgcttggagactggcaggctgagagatttaggtgtctgattaaattccattttccacacatttgtggacatgggcctagtgtgtgctaagtgctaagaatacacaggtaagcaagctatcattcctactcacgagatctagaaggggagatggacctaggccagttataatgcagtgtgaggaatgccagcagagaagtaggcctggggtgcaggtgtgactagaggagagtggtcaaggacacctgcatggtgggggtgacaccaagttacctttgaataggtgaatgggagttctccaggcagaaacaccagggaaaatgcattcccaacagctgtaacagcacatgctaggcatggaatgtagaactgtgcaagaaaactggctacagatgttcctaaacatttatgtgctttctgtgcatcaggcatgggcctaagtgcttcctgtattataactcttttaatccacatagtaactctatgaagtaattatagggccacagtatccttgctgtagttaggaacagcaacaataactttgagaacaaaagttattttataactaatttagagagaaaacttgacccagtgaatccatttggtggcaaaactgacctatttagtctgaatagtcatattgtgtttgatgatggactcactgtgggcattattgtagtgcaaatgcactatacaaaaatctgaaaaattgtgaaccttgaagcacatctgaccccaaggttttgggtaaggaatgacagcctcgtcctggtgtcatccacattttgcttttgaggaaacaaagagacagggaggagtgatttgcccaaggtcacagagctgttaaggggccgtcagggtttgcatgaggttgttctggttcctgagccctgcctagcatccttaggcaacacagtcctgaaggttctgacttcctacagaggagtgatttgggcactccatgtgtgggcagctctgggacagcattgcccactgatgcatgcctggtggctgagccctgacaactttcagcaacacaaatttactatttcctgcagattagaaacctgacctaggtttcactggactaaaatcaaagtgtcgacattcaggaggccctcgtgggtaatctgtttccttgcctttttcacctggtagaggctgcatgctgtccttggctgatgggcccttcctccatcttcaaagccagcaagagcacactgagtccttctcacatgacatcacgctggcctcctcctctgcttctcttccacttgtaaggactctcattattacattaagcacacccacatagttgaggatacttttgctagtttaagattagctagttggcagctgatcgcagtgactcacgcctgtaatcccagcgctttgggaggccgaggcgggtggatcacctgaggtcgggagttcgagaccagcctgaccaacatggagaaaccccgtctctactaaaaatacaaaattagccaggcgtggtggcgcatgcctgtaatcccagctacttgggagctgaggcaggagaatcgcttgaacctgggaggcagagattgccatgagctgagattgtacggctgcactctagcctgggcaacaagagcgaaactccatctcaaaaaaaaaaaaaaagattagctagttggcaaacttaattccacctgtgagcttaattaccttctgctctgtaatgtaatacattcacagataccagtatgtggacatctctgggagctgttattctgcttaccatacccagacactgaggaaaactaacctgcattggttccttcagttatcataggtactacctggacagaaacgcccagttatttaaaggctttctttgaggagagcttgttcttgtgaaggggacatcaaagggtcatcagagtggcaagtttgctgaccttgtcctcccctccctggggatggtctggccagctcacaggttgaggcccactggccaggaatagcccctagagcatgcggcccttgtagggaccttccaaaggacaaatccttccaaagaattgcagcccagccacacctggctcaggcttctaatctgtagaactgtaaataatacatgtttgttgctgtaagttactaactttgtgacagttcattacagtagcaataggtgtcagtgtacgagcaccctccttgggccaggtccctggggtgacatcttagcaaaatgtgactggaggcagggtgggttctggaggctgttgacctattgacttgtcctctaagttccctcccctcacccccaatcccccaacaggccctggtgtgtgttgttcccttccctgtgttcatgtgttttcattgttcaactcccacttatgagtgagaacgtgtggtgtttggttttctgttcctgtgttagtctgctgagggtaataacttccagcttcatccatgtccctgtaaaggacatgatctcattcctttttatggctgcataatattccatggtacatatataccacattttctttatccagtctattattgatgggcatttgggttggttccatgactttgctatttgtaaatagggggctagggttttgaggggggaaatgtctcaagggggcagcgtcagctttcaaagggggagtgttgctcggtgaagagactttattgcttagttgcatgaatttggggcttctgttttgttttggttttaaacactggccgagaaaacatcacttactaagactatatagaatcctggccccacaggaagccccatggttgggaatggggaatgcagggaggcgaccaagatactttcccagaagcaggaccagctacataatttatagggcccagtacaaaatgaaaatatagcacctgttcaatgattattaagaatttcaagatggtgatagcagtgcatttaaccacgcatgaggccctcctaaggatggggccctgtgtcaccaaccatcacacacctattaagctgtctttgaccagaaatagtataccctgtgtgtatcctcagcactctctgatgtcatgaatgttttcagcacctgtttcccagggaattgactaaaccataggccttagccctgaggactcactttcttatcacaaaacttgtcttgattgcactggatatctgatgctgtttgaaagatactttgctcaattcttggcgagaaaacacattccagggttgggaagggagagtaggccgaggaggggaaacttgacactttctcagagactttctggctgtgtgacctcagacaagtaacttagattctcgccatctcagttcttcatctgtacaatggagatcatgttgctgaccccaatgtgatgtcatggggctaattaattaaggtgctcagagagagggccactgtctggcatgtaggagctaaaaggagagctctccggctcctcatccatccagttttctgcccagaactagtggtcagaagtctgcagaagagcatgggcgcagcatgtagttcagcacagcttcccagatgagttttgttttgtttttgtttttcagcagaatgcatgttattaaaatctctaagctacaggtttagcttcagaaacacatataacctatgcagcaaagtcagtcccaacaatctactaccaaatggatttctcagattaacataaatatgtatctctagttaactttcttatttctgaattctagaacacataaaccataccattgttacatagacaaaataaggcatagcctttctccatactttatggaacttcttcttcctcttgtgagactcccacaagtttctagaaatgcctctggtgtcttggacatttctgctccatagagaaatgcaccagagacagatgctcgttggaagaggctggctcaccacaggtcaattccaagcaggaggttgaggatctgcatgtgaatcctcggatgctttgaagctgtccaggtcatgcctttcctaggaaagcctccagcagggatatgaacacctctaagtcagttcctaatgtgctcctcactcaaccatgttcagtttttccctgctctcctagacagtcttcacctatttttaggatgctaacttaaactcggtcaggtcaaattgacacaacattcacagatgccgaaatgatctttttttcacatgcaaactggggaggccaaggatatgattgcaaaagagttaaggtttaatattcatggataagctctcttccccatgaaaacactatgtggcactttacaccagagcacttggtctaacagacacacaaactccccaccgtatctggcacagatacgctccacatgctatattacgtataatttccatttttgttttctccagagaatagtttttcttcagtccttaaggactcagcttcttacatgggctttggtggaggttgtggggcagcacgtgcagatgtaaatcgggatgaaggtatttgattctttgtcctttcggccttcatgagatgaagtcctgactaccttgctgtggatggcacaattcacacagtgatgtagcttcacacttagaaagcacataggcgtcgaagatgcttgcttcagaaatgtctctgaaagctgcagcctctatgtttcaaatgatgaacttttttttttttctttttgacagggtctctgtcacccaggctggagtgcagtggcatgatcacagctcaccgcagcctcaacctcccaggctcaagtgatccaccagcctcagtctcctgagtagctgggactacaggcatgtgctaccatgcctggctaatttttaaattttttctagacggtctcactgtgttgcccaggctggtcttaaactcctggcctcaagtgatccttgtatctcagcctcccaaactgctggaattatagacatgagccaccacacctggccacaaacttcttaatagcctggtccttgaacatgcatcaggtgcagttcatgcagcaaataggttgcacgtggcatggcccttttgggcatgaccgtcgtttcttctttctctgtcatcttggaagtgaggacttgagccccagatgttcttactcccccactttcctttatctgccctcaacatgcatacacctcacctacacctatgccgatgctttcctaggccatacccaagagccattgaacaagccattgaactgagcttccatagctccagccctgctcagaatccatgcctacaagcagctcccaaccagggcgtgagtgaaataaggagtgaacaggagagggaagcaactgtggtccagtgaatctgggggatatccacaaactcatcctgaccaatgcttgccacctctttcccagcagctgttctctagcaagaggcagaagcaatggctttgcttctgtccaccctgtgctggctgagctggaggtgctaattagcagtgaagtggcaggctgtgggggagaggaagggagccaacggtctgaactccctggcctagagaatctggaacatgccagaggaaagactggccgctgcagagagtgggtccttggtgagctgagggcagtcaggcagggcaggattagttccagggaatgggtttaaggacttctcccctgttggtgcctctaaagctttgctgatggtcaaattccaaattcctccatcagtctcaaagctcttattagtcactttaattggaatcctgggaagacagagtgggtggaagagaagcgggcagggtgggagagaaacagaaccaagagactgggtctatgtaacagttttcttcaggcagtaaattcctcttacatgctgggaggagcaaagggtgggggaagagggaaggtcacttttctcccagggagaagtggtttgtgggtttctgtgctcaaaacctggggctactctttcttttcgaggaattttatcttacattttataaattaagaagtacttgttcattgttgacagcctagaaaacacaaggaagcaaaagcaaaagcaaaaaagttacttgtatctccccattttagagatactattattaacattttgggctatagcctttcagccttttttctctatgcacaatttgtctcactgtctgcaattatactataaccttgttttgttagctgttttttcatgcgttaatgcgtcgtagacatcttttcatgtccatagatgtggatcatggatttttttttaatggcagtatcgtattccaacgtttagatgtacttaacccccctattgttgaaaatttaggttgtttttcgttgttgttgcagtgttgatgttatcaggctacatccttgtagcttcatcctcatgcacatccttaataatttcctcagaataaatttctagatgcatttccataggatgtatttctatgtgcttttttttttttttgagatggagtctcattttattgcccaggctggagtgcagtggcatgatcttggatcactgcaacctctgctgcctgggttcaagcaattcttctgcctcagcctcccgagtagctgggattacaggcatgcgccaccatgccaggctaatttttgtatttttagtaagacgaggtttcaccatattggctaggctggtctcaaactcctgacctcaagtgatccacccgcctcagcctcccaaagtgctgggatgagccaccacgcccggcctctatgtgcattttcaaggctttataccagtgctctcaaccaggactgagccctcacccccaagaggcatttggcaatgtctagaaatgtgtttgaatgtcacaactggagggggagattgccgctagcatctagtggatagaaactccccacatcaaggaattatcaagtccaaaatgttaatagtgccatggttgagaaactttgcttagacatgtgggtattttaattctttgtaatatgtgtggggctggagattctaagccttggaagaacacgaggtgggggtactcagtttagctggctgaagctcagccaaaaccaacccaatctcatcctcccctccacttgcagaaggacttgggtggccctgctgatttggagtagcgaaatgactgatgtgtgctacttggagcctgtccctgcatctaggagacaaagagaggcaggatgccctggaaggaggtgcagaagtgagagagaggcagagagagaaggaatggggaggatgtgtggtgtggtgctgaacaatataatccttgttgcaattaaaatccttgttgcaactatgtcgtctttagggacttgaaggccacttcccagcactgaggacccaggcagggaggacacatgcaattgcagaatgcgggaggagggagtgaccagaaagactctattgtacccctcgaagctggcatagggagcatgaagtcctgtgtcctggggtgctggccagggcctgcaggatcaggaatgaaaaacatcagtgctccccacaccatgcattgcagttctatgagatctgaaatgttgccctatccattaagtctccttctcaagtaaacctatgactcattgaactagccactttatttgttcatctttggaatgcatcacaatcattcattcataacccatataattactgagcacctactagatgccaggcactatgagaggcaatgaataaaatagaaacactttctgctgtcatggaggaaacagtccctgacagttcatcaagcagcagaaattctatgaagaggacatacagggttcaggggagcacagcgggggagcaccccacctagggcgcatggggtcctacaagaggtgcttctgctcttgtcacggggaacctttctgcctccatgtgagaaagcccaggccagccagtagagagagaggcccagccatccctgctgagactagacatgtatgaggccatcctagaccatccagccatagcgagaccatttcagatgggaagacccaccctgacaacccatagaattgtcacaaatggtgaattgttgttgcttcaagccactgagttagggatatgtttgtaaacaatcaaagctaaccagcacaagtcatgtggctgctcaagagttattgacagaacggtggggtgctataattggccagacctgggtcaaatgcccacttatatgcccaagagactctactctgtaactgaagacatgttgggaaagcttacctggcagatccaaaggatacttgtcactgtctgatgtagtgacgcatggacaaaaatggcctcagcatcttccagtctgttctttctcctgtattctcagtcttggttagtagcaccaccttccatctgattgctaaagccaaaaatctctgtcattctggactcctttctttccctcaactcacacatttattcaatcactaccttctgctgaaatcgccatcaaaattttttttattatatccctggatattctttgcccttcgagactcagcctgggctttacctgaccaggaaactttcctgaaaccccaagttgggctaaataactctcttgaatgcatatctgtaccttacttaacacattctatggctgcttttgatcatgagtgtggctccctcactggactggaagctccctgagggtagggactgttcacaagatgtggttgggaatgatcatgcaacagatgtgtgtggaactgaaccaaatttctctgacacagttttcacctttttttattaacttagatttcagaaaaaaggaatgaactcaaagccttttgtccctgaaggatttaaggggaagctggtcggtagtggcctgccagggttaatgaagggattcaggaggcaggtggagaggcaggcatgggaccatgtggtctgtggctgtagatttgaacactacaacctccccagcctccccaaactgtgtgattttaagcaaaatatttacttctttgagtcaccttctcctatctgcaagaatacagtaactgtatttttctagtagggttgctgtgaaagttgaacaaagataacataggcatagcgtcctacaccgttggtgggtccttaatgaaattagtttctttcttttcttcttgaaatacccccttgtcttgcagcaggttccctcagaatcagagcctgagagaacactttgagtataagtagtttgcttgggaggtgatccctgaaaggagtgagaagtgagatggagatgagaaagaacccagggtatgttagtaaaccagctaccagtcagctcattggctcgtgcctgtaatcccaacactttaggaggctgaggcaggaggattgcttgaacccaggagtatgagaccagtctgggcaatatggcaaaacctagtctctacaaaaaatacaaaaacattagccaggcatggtggtgcgcacctgtagttccagctactcaggaggctgaggtgggaggatcacctgagctcaggcaggttgaggctgcagtgagcagtgattgtgccactgcactccaggctgggtgacagagtgagatcctgtctcaaaaaacaaaaaacaacaaacaaacaaaaaaacaataaaccagctattactgtgggctactggggccatctgtctggggccatctgggccgttgtgtagattagaacatgcctcagaggacgagagaataggaggcatttatccacccaactctgtccaccattggctcatggatgctgttagggcattaacaacccagctctctgttttgtttcctggactgggaaaagttctcaggcagagaatcagaagagcttgtggtaagaagccattggcacagataggaacggtaagagccaaggggacatgtgcagagccctggcagccttggctacactgcctttttgctgaaatgatattcttcattcccatacttattatttcttatacttaacaaatatttccctgaataaagaggatttgaaataaaatacaagtgggctgttttctcttatcactgtgaatggatgaaatccctagaaatgcaactgcttgcttactgtactctgaaagtatagtaagagcagcagcagaactgtcagcagtggttaagcggatgatcagctgcaactcatcaacccttagggctttcaggtactcctgctctgatgatcacagctatcaaagagaagggagatgggaaagggaaaaatacatgggggaaaatgtcatgaatattctcttataaattggggtgtgacccgcatgttctcactcataagtgggaactgaacaatgaggacacttggacacaggaaggggaacatcacacaccggggcctatcgtggggtgtggggaggggggcaggatagcattaggagatatacctaatgtaaatgacgagttaatgggtgcagcacaccaacatggcacatgtatacatatgtaacaaacctgcacgttgtgcacacgtaccctagaacttaaaatataataaaaaataaaaaataaataaattgaggtgtgacaggaagtttacagaaagggtgtgggaggggaaaaacaaatgcatttcagttaggtatttttctgagcattttttttttgtttctgtaagtttttattttgatatagttttaaacttataaaaaagttgcaagaatagtacaaggaactctcttatacccgaaaagttcctttatctagattaaccatctatttacagttgacccccttcctccctctcactctgtagtacctaggtataaatacatatttttaagccattcagagtaagtcagagacattgggaccctttaccattaaatacttccagatgtatttcctgagagcaagaatgttcttttatataatcatattcagttatttctgagcatttttaaccactttgcagtattttcaagtgactctcaactacaggaaattctttaccaaaaaagaaaaaaatgcatcaatatagactgaatcagtacaattgtcaagttttccccagttcgatactgaaaggcaggttaaggcttacagactaccaaaattttattgatttttgtatcaatttattaaaaaaatctctaatcctctgtaaattggtgaaacattatggactctggaaaacactacctacttggctaatttctttttcccctaatagtctactgcaatgtgatggccccttattaatttattaaccatgagagtcctattaaaggacagagtattatagctggaggggatcttagggattcctctagccccactttatagttaagcaaactgaggatcacaaaggcattgccctcacaatctcagggcagtggctgggaatggagctcagagatcttcactctagactcagaagacccttcaaggagaaccagtctaatgtgcttgaggggagaccatgggggctcctagggacctgcgaagagccagagtgggagatggtgagttgaggagaatgacacctcagcctccaacctccagcccccgttagacagtcctcttttcttctctgtttcatatgttaaacataaggttttctgtgaaaagggggccttactacttaaaaaaaaaaaaaaagtcttaggtttcaaggcagtctcagtattacctgaaaaattgatgcagagctgggctcagtcctgagccttccaccttcacactacacctctcataatctgcctgcacctcttctttcaaaggaaaaatcaatgctctgggggacaagaggcaaaactcgtttaaaaaattaatcctatcaaaggatgatttcatttttctaaagcccccctctaccattttcattcttctttgactcgcacctttactttatgctcagcaagacgccacacatacctccactgatgctttccagaaccaggacactaatcttactctcgctagatgatcagtgttcgtataattttaattgcaaataatgcatttcattacagataattcatataactcttgctctgatttgtaataccaagatcatcaactttgccttacctctgcccttcactaactcacttaataaaagatgaggtcttattttcattaccttattcttcctaatttttggtcagacttttttttaacttactagaatattgttccttattttgaaaattattatcctattagttattttaggccaatgttatttttcctctgtcaggcaacagtgttttcaatttatcagatcactcctgtaaataatggggtttagtgccaaacagacttggatttctatttctgccataagccagcaaatgtcccttaataagtcttgagtctcagttccctcatctataagtgggaatgataattgtggtatttattttatgggattgctttgattactaaattgtaattcatgtggagtacttagaatgagtatctgatatgtaatgaatatttgctagttattatttttatataggagaaatttttggctaatttaagttagctaaataaatgagacaggtgtgatctttaaaatttagttgtttttttcttgtaagtttgacacttgagtcatatagaataattaaaattattattattttccttcaaaaagaggacaagtgggagtacatttatgcctcatgctgtgggtagcccagtagaaccagagggtcctctgtagcatgcatgtgaacttgtcagcctgatcaaagtgtcattattatcttgtgatgtgggtttttagtgtggcattcctttccatgtatctttagtttttaagtatttgtcaaaaaatatagaggaaaagaaaatgtatcaaagacttttaaataaaagaagttaagagaaaaaaggaaaaagccagatgtatgacagaaagatgtagaaacactttctagcaaaattctctggagacaatttaggcttctgcttccagccaagatggagtaacagggcctgggtttgtcattctgtctgaaacaactaaaaaactagacaaaatatgtgaaagatgggttttcagatgttggacatcaggcggaacaggacggagatctccaagaaaggagatgcaaacaaggtgagcctacaattgccctgatagacttcctagagagagttttcaggctgcaatgccaagcagagtgcagccatgtccttgagtcgaggagacagagctagaagtctggggaggccaaaatggctagagttcacaaagaagagttccagagagaagagagctgcagagagaggtggagaagagagctgcagcagatagagtgagctgcaagaagagacagagagagagagagagacagagggaaaatgctgtggagatgtgcagacggtctccttcaagtattttagctgagtactactcagtgcatgcatgtgagaaaactgcccaatgtcagggaaagaaccattcaaaaggaacagagggaacaaccccacaggtctgggaaaactgtattcccaccagccggaatggaaaacctcataattcatggggcattggatagagtactcagaaggatattgcctcagtatttgggtaaaattatctctagaattggccaggcacggtggatcatgcctgtaatcccagcactttgggaggtcgaggtgggcggatcacctgaggttaggagtttgagaccagcctggccagcatggtgaaacgccatctctactaaaaatacaaaaattagctgggtgtgctggcgcatgcttgtagtcccagctactctggaggccgaaaaaacttttaaaataagccttgaaagaatcaaactatttccaagtaacttaactggattccagaacaaagctcaacaatctttataggaacacaaaaaatatgcagcactcaaccatgcaaaattcacaatgtctgatatccaataaaaaattacaaggtatgcaaagaagcaggaagatgcaacccatgttgaagagaaaaagcaatcaatagaaacagagtcggaaatgacacttatgaaagaattagtggacaagaccactaaagcaattgggataattatattttatgtgttaagaaagtagaggagaaattgagcatgaaaagtagagacatggaagttgttgaaaaagacccaaattaaacttctagagatggaaaatacaatatctgagatgaaaatacattggataggatttatttacacactgcaaaaaaataaattagtgaatttgaaaacaaagcaatagaaattatctataaaaagtacacggagggaaaaacactggaaaaagaaggaaagaacagagcatcagtgagctgtgggacagcgtcagatggcttaatatgagtgtaatggagtccacagaatggtggtgggaaaggaaaaatatttgaagaaacactggctaaaatattttcaaatttgatttaaaaaattccacttattcaagaagctcaacaaactataaatacaagaaatatgaagaaaaccacaccaatgtacacaagaataaaattgcttaaagccagtgataaagagaaaatcttaaattagccagagagaaaagaacagtatagttggccctctgtattcatgggttctgcatccatggattcagccaactgcagatcaaaaatatttggtggggggcatgcacagtggctcatccctgtaatcccagcactttgggaggccaaggcaggcggatcacttgaggccaggagtatgagaccagtctggccgacatggtgaaaccccgcctctactaaaaatacaaaaattagccaggtatgatggcggtgcacacctgtagtcccagctactcaggaggctgaggcacgagaatcacttgaacctgggaggcagaggttgcagtgagccaagatcacactgctgcactccagcttgggtgacagagcaagactctgtctcaaaaaaaaaaaaggaaaaataacaatgaaacaataaataatacaaaaagcaatacagtataacaattatttatatagcatttacattgtgttaggtattataagtaatcaagggatgatttaaagtatatggcagaatgtatgtaggttatatgcaaatactatgccattttatctaaggtatttgggtatccttatggagtcctggaaccaattcactgtggataccaagggaagactatgtatactatagacagaggaaaaaaacaaggatgatgacagcagacttcttgttggaaacaatgcaagccagaaggcagtggagtaatatctttaatgcactgaaagaaaaaattcctatcaactgagaattctatatccaacaaaaatatcttccaaaactgaggataaaatccttttcagacatacaaaaattaaaaaaattcatttccagtagacatgcactacaacaaacattaaaggaagtccttcaattaaaagaaaaatctaccaactggaaatcttgatcaaaataaaggattaaacagcaacagaaatggtaaatagtagataaatataaaataaattttcgtattttaaaaatatcttagccgggcatggtggctcatgactgtattcccagcactttgggaggccaaggtgggtggatcacctgagatcaggagtttgagactagcctgaccaacatggtgaaacactgtctcttctaaaaatacaaaaattagccagccctggtggcacatgcctgtaattccagctacttgggaggctgaggcaggagaatcgcttgaacccaggaggtggaggttgcagtgagctaagattgcaccgttgcactgtagcatgggcaacaagaatgaaactccatctcaaaaaaaaaaaaagaaagaaaagaaaatatttaaaagatcgtgtttaaagcaaaaatagtagcagtgtattttgaggtttttagatataaaatatttgaaataatttcacaaaggccaagaagggggaaatgaagtaggttgttgtaagattcttatatgatacatgaagtactataatattacttgaaggtagatgataataagttaaagatacatactatgaaccctaaagcaaccactaaaaacaaagagttatcattaataagccaataaaggcaataaaatggaatcatgaaaaatgctcaactaattcacagaaagcagaaaaggatgaagatatgaaaaagaacaattagacaaaaagaaaatatgtagcaaaatgatagatttaaacagccatattaataatagcaccaaatgtaaatgatctaaatcagggctgtccaatacaacttcctgtgatgatgcaactgttctttttatctgtgttcttttctacctagtcacatgtggctcttgagcacttgaaatgtggctcgtgaactgaatttttaattttattaaattaatttaaatttacatagttgtaggaggctagtgatgtaatggacagtagagttctaataccccagttaaaaggcagagattgtcagattggtttaaaaagtgaggcccaatgatatgctgcaaaagaaactctctttaaacatgaagacacaaacattaaaaataggaggatggaaaaagatacatcacgcaacatcaatcaaagaaggctggagtggctctattaatatcaaagtagatatcaagaggacataaccactcatgtggagataaaaacttcatgcagtcatccttgggattatattgttgctgctgggggcagctgaggaaaaaagggaattgtattggtttgctagggctgctataacaaaataccacagactagatgggttaaataaagagatgtgtctcacagttctggaggctggacgtccaaggtcaagatgtgggaaggctggcttgctcggaagcctctccttggcttgcagatgtctgccctcttcctgccgcttcacgtggtctttcctctgttcctgcacacccctgggtttctcctctgggtgtccacattttctctgggtgtccacatttctcctcttatgatgccagtcagattgggtgacagtccaccttaacacctaattttaacttaatcacttttttttgagacagagtctcgctttgtcacccaggctggagtgcagtggcacgatctccgctcactgcaacctctgcctcccggattcaagtgattctcctgccttagcctcctgagtagctgggactacaggtgtgcaccaccacacctggctaatttttgtatttttagtagagatgggtttcaccatgttggccaggctggtctcgaactcctgacctcaggtggtccacctgcctcagcctcccaaagtgctgggattacagatgtgagtcaccatgcctggccacgtaatcacttcttaaaaggccctatctccaaatacaaaacagtcacattctgaggtactgaggttaggcttcagcatatgagttgggtgggaacacggttcagcccacaacagatagggacattgtctatcacagctgtcctccccaggaacagtgccttggggctcccgtggtgtgctgtaattattgggcagcaggctgtgcctctctgaccttaggatgacagtgaggcatggagagccctacagagggggaccaggaaggcgatggggctgtgctccaccgctcaggagagttgtggaggaaagtagaatggggaggaaggaaatctgtgtccacccagaatcctgagttgcttctactgtctttgttgaaacttctgacaacacgttcatgcctctcagatatatcctttttgttaattaaagtgtcactatatttttttccttttgaattaatgaaagagaaactccaaataaacaatgttgtttcttcagatacccaggagaaccactgcctgcaaacacggacccttcctcaaacccaccagctcgctccacccacaacaagtggcctcttattgtcatggcaatatttgtttttatctaacgtggaggtactagttctggcttcactttgccgaatgttaggagactggacctaagtcatcaatttagcccctagaggctggatgcaatggctcacgcctgtaatcccagcactttgggaggccgaggcaggtggatcacctaaggttgggagttcgaggccaacctggccaacatggtgaaacctcgtctttactaaaaatacaaaaatacctggggtgtgcctgcaatcccacctacttgggaggctgaggcaggagaatcgcttgaacccgggaggtggaggttgcagtgagccaaggtcacaccactgcacaccagcctgggcaacagagtgagactccatctaaaaaaaaaattagccccttgagtgtaaggtctctcctctcctctccccctcccctcctctccccctcccctcccttcccctcccctctcctcttcttttgagacagggtctcactctcacccaggctggagtgcagtggcgtgatcttggctcactgcagcctctactccctgggctcaagcgatcctctcacttctgtcccccatgtagctgggaccacaggcacctaccactactcctggctactttttgtatttttttgtagagatggggtcttgccatgttgcccaggctagtctcaaactcctgagctcaagcagtctgccctccttggcctcccaaagtgctgggattacaggcatgagccactacgcccggccatggagtgtaaggtttctaggtgaggtttgaaatttggaagagagattagaaacgaggctggggctatattctcactcataggtgggaattgaacaatgagatcacatggacacaggaaggggaatatcacactctggggactgttgtggggtggggagaggggggagggatagcatcgggagatatacctaatgctagatgacgagttagtgggtgcagtgcaccagcatggcacatgtatacatatgtaactaacctgcacaatgtgcacatgtaccctaaaacttaaagtataataataataaaaaaaaaagaaacgaggctgggagaaggtgctgtgggaatggaggcttcagggcccctgagctacatgagctgtaaaagaagttagggtgagtctatagagcaatctaaaacagatggatttcctgaaatcaccactgtctccatggaaacagctcagctggctctatcagttgctataaagtgttctctccttggtgtggatggaatcttcgtgttagtggaggaagaggacccaggacagaacatattggactaagcttagaagggagaagacaagatttgggttagctattagaggcttagaaagattctcccaagtgttgaggagatgtcagacgttgcctgctctaatgatttgtatgagaatagtggcagcagttcctgaagttggaaggctttggtacctttcttcctgctgctagactttgataaccagaggacacctgccaacctgtaattgattcatttgatgaaatatttatagagtacctagcattggattctgtcaaaagcatccatcatgctggtgaaatacatgcccatccctgtgaatgtccattccttgtttcttgtgatagatttgccacaaataaaggctaatattctgaattctcccaatggcaagctgcttattttcacccacactcttgttatgtgtgtgctatgctcagggcactgtgttaggtgttgaagttataaaaaggaatgaaccaggcacaggcccttccttgggaagctgacggtctagatagggggatgaattgtggtgcggcaagaatgaattgccatacaaggtggcgtatgccccaaattaatggtccagacaatgagctccacaggaatccaaaagggcagccttgtttccagggatgggggaggttctaatggggatcaggcttgaatgggcttgactgagggcaggacttgggtaagatggagagtggtagggtcttgaaaacaagtgagttagagaccagcctgggcaacatggtgaaaccctgtctctacaaaaaaatacaaaaattagccggatgtggtggtgcgtgtgtagaaccagctactcgggaggctgaggtgggagagtcacttgaacctgagaggcaaagattgcagtagccgagattgtgccactgcatttcagcctgggcaacagagagagatttcgcctcaagacaaaataaaacgggtgagaaggagagtggcaggagaagaagtgcaatgacaggagtgagtgtgggtggctgttcaggggaaaggagcagacttattcaggggaaaggagaagaagggttcagggcatggatggtggaaaatcaaatcagcaagggagggtaggggctcaggttgtcaggactgtgaaggttaacacagggagtttagacaatcctttaggcagtggaggactgagaaaagttttagagcaaaggaggcgtggggtttcttgcaaaataatgctgtaggatgcttaatctggtagctgtgcataggttggattgagggtaggcactagagacagggagatggaatgggaaattgcttcaggggttatggaggttgaaggagtggaaagaaagtgatgggtagaatggatgggcaccatagatgctgggaaggaacagactgggactgactggctccagcacaagaggcagagggagcacatgaggtttgagattggatcaataggaaaggaattattacctttaagagaagttatgcctaccaggtatcaaaccctgtgttaagcaaaaggataagaaggttcttgcccttaggtaactcataatctctaggagaagacaaacatgattatagatgctagggtggaaggacttactttgtacaatgaaggcccaaaggaaggagtggagggtaggtaggagcatttgccaggaaaaggtttacaagagataacttttttttttttttttttttttttttaagacggggttcttgctatgttgcctaggctggacaggaacacctgaaatcaagtggtctgcctgccttagctcctgagcagctgggactaagtgctgctgcgcccagctgaaatgatcctgagcagagtgttgagggagcttgtctgagggggaagtgtaagtgaagggtcatgcttgacttcaaagttggtttagggtgaagcagaacatctgactgccaagctcccgttggttccatttgttgttacggagggccgcttgtgaagctccctggggcaggagctctaggaagaaagagaggaggtgcgctccctgcccttggggaactgcccacatggtggggaaaaagacggccttcctccagccttcaagatatgcagtgctgaggccctgcatcccgccagctgccactgtggctgccgggaacaagggagcaagcagaatgaactcaattccctgctgtcatggaggccacatgcttgtgaagaactcactcagatagaaggcacagtcaggctcagtcgcaaaagacaggttgagggaagtgctggggctgtagaggaaaggaaccgtgatgcgttctgacccgagatggccgggagctgaagaggggtgaccagggacccgcgcagcagttgccggtgtcagcggggcgctggggcggaggcttgagtcagggtgtgcctcaggattgtaaggggatgtgcttgttgtttcgcaggattgtaggggatgtgcttgttgtttcgcgggggaggcgcctctgctgctgtgacagctgaagccaggcatgagtgaccctttgtgtcgtgtgctgtcagtggagtgaggctgtcagtccttctttcctgagctccgcgggtgccggcccatcttacagtgtccagctgaacactgatgggacccggtaaggaaggcccgccctcccggcccatgctcacagagcctgtgtccctcacccgcaccaaaatcctgtcccgctgacccaaagcttatttcctagcattacagagtggggtctctgagcaggaaatgggtgttctgggtcatattacgtccctcaaattcatatgtttaagtcttaacatatgaatgttaagtttcttccccagtttctcagaatatggccttaatgggaaatagggtctttatgaggaaatgaaattaaaatgatgtcatgagggtggacccacagagtctcgctctgtggctcaggctggagtgcaggggcaccatcacagctcactgtagccttgaactcctagactcaagtggtcctcctgcctcccaagtatctgggactacaggtgtgcaccaccatgcctggctactttttttttgtttttggagagacagggatcttgatatattgcccagtctggtgttcaactcctggcctcaagtgatcttcccatcttggcctcccaaagtgttgggattacagatgtgagacactgcaccccactggttgtagtgttctgtgggcctccccctctcccaggaggtgaacagcttgctctggattcactgtcatcctctgaacgtctccagagtcctccagattgtttctacttattcctcacagagatgcactcactaacccagtctcttggaaatggggtgcaatcaccccaccagctgatctgttttctgttgtttacttttttgacttctccagagcagccaaatgaacatcatcttcaagataatcttggcgtagccgttaatggattctgcactgcaaaagtgtttgaagccagtggctgtactttaaaaaaatgcatcctgttggtatttttcatgtgttaggactctcttttcctgaagtttatatagggcttaggatgttccaggtacaaagctaaggaccatatgttattttgttcattcttcacaatacctctgatggaggtactaaaatcatccccattttgcagacgaggctctacaagataagtgatttgaccaaggtcacatggccagtaagtgcgggagccgggatatgtgcccagcactttcactccagagtccttaaccacctcacccacaataatagatttgggtttgaataccagtgcagtcacttactagctgtgtggcttcaggcagtataattcccgtctctggattttggtttcctcagctgtaaaatgcgaatagaaagacctccctcacgggggcaattcaattcagttgaattgaatgctaggtactgagggtctaaagagatgagccccacccttaaggcccacagggtctcattgtgtttgggtgagtgtgaaatgcacagggctatgggaacccagggtgaagagccctcctgggttcggggtcctgggaagccatctgaaggagatgatgactggatcaagacctaaaggacttttccacagaagaaccacacagacaaaggcatagaactttgcaacagcaggatggagatgaattgcaactcagggtaaccagagagtgacgggaaaggagatgggagaggagagactgaaagcgaggatggagagagggtggggaaggctccttatgtgtcacactaagaagtttgggttttccctctgtggaaggtgaggtgccatggaagggttttgagaatgggagtgggatcacatgtagtggctcacgcctataatcccagcactttgagaggtcaaggtgggaggattacttgagcccaggaggcagaggctgtggtgagccaagattgcgccacaacactccagcctgggtgacagagggagatcctctctcaacaacaacaacagtttggtttcatgtcttgatatgcagtgtgggtggctctatggaggatggatttgaggggggcaagactacagacaaggagaccaaggagggagatgttgtgttggttctagtgagagatggtgagggcggctacaagtaggaaagagcatggaatggagaggactttgaacttgacaggtcctgataattgcatggacggggggaggggggtgggggaggaacagtcttagctaatgctgcctcagcttcccgagtaactgggattacaggtgcacaccaccacacctggctaattttgtatttttagtagagatggggtttcaccatgttggccaggctggtcttgaactcctgacctcaagtgatccacctgcctcagcctcccaaagtgctgggattacaggcgtgagccaccttgcccagcctaaagaggttttatagataagaaagttgaggcatagagaggctaagtgacttggctgaatggcacatggctagcaagtaaccaactgggactcacagccgtgtagtttaactccagcgcctgctctcatcatcactgtgccatgcctgtcctgactggtccaggagggcaggagagggggtctcgatgacccaccatccccaccactgctgccaccagcaggaattttacttgggtgaccgagtgggtgatggtgccattgactgatgattctagaagggagtggagagagatgctggtttccatattacacctgcttagtgtgatgtgcctgtggacacccagaggaggaaggcatctcaggctgtgcccttcctcctggagcctcttgtcactgagccacagggcctctacaccaacactaaatcactatactgctttccatttagatgacaatttgatttaaacaaattctggtggtgcagggtcaaaatttttcataatctgaagtgatttttctctgtttccagtccactgactggatggcagattaaaatgtgagggtttgacaaaaagataatggagccgtgccagcctttagtgtttcaggcataaaattaaattcaacatggtatcatgcatttgaagacttgtcatcataaggctggccagacaaatatgctttagagggtttggttttgagaatgagtaggagaaataaaatatgaaatatgataatagtggagactagacgtattttgaaaaacattatctgatggtgttaagccatcctttttgagcgcattgtttaatgctgccttcttttctgcctgtttgaccaagggactctgaagtgttggacaggttccactactgaaatatgcaaatttaacattccctctccccacatctacaccacccctttctttctttcttttctgttttttgagacagtcttgctctgtcgcccaggctggagtgcagtggtgtgatctcagctcactgcaacctccgcctcccaggttcaaatgattcccctgcctcagcctcccaagtagctggaattacaggcgtgtgccaccatgcctagttaatttttgtatttttagtagacactgggttttgccatgttggccaggctggtctcaaactcctggcctcaggtgatctgcctgcctcagcctcccaaagtgctgggattacaggcatgagccaccatgcctggcccctttctttcatctctcctaattttttcgacattctcctacccattttctcctttcctgggccttcaatttgtgcccacctccacccccatcctcaccccccatcttcttgttagctgcatagtttggtctggctatagactttccaagttctgaaggtaaaactgacatcaagttcttcccatctggtctactgagtgcaccctgcaaccttagcctaggcactttggcaccttctgttttagcggctgtctctgtccatggtgggcttggtgtcttgttgcttctgttcctctgagtgaagtgttcaaagcctcagactcctgaggctcagctctgtgccctggccttcgaggcttgtcacttctgccgatataagaagtgaaatataggtcagcctcacagatcccagtgttaaaaataaaagcttcatccccaggctctgcaggtctgtagattggcatgggttcccccactttccagcaaccactcttctaaattgcttcttggagcttagtactgatgccatccgctatgcaagagggaacctgaaaatagaagaggagctgagatcgtctcccttggcaaatgccattccaaaatgtgaagattgcctgaatggaaattgtaaatagcagcactgagcaggtttcctccctgtcgggttaggagggtgggctgctggtgaggggagggtgggtcctggggggagcctggaaggagtccctctccctcttaggaccacccagacccctcctgtggcagccaagtgaccacgcactgagattcctaagtattttgatgaaaggacttctcctccctctctctgctttcccattcttagtccttgcatttgagctttctcagaagatttagctgcttttctgtgatatgaaaactgaggaggttgaaaagcagggcctttgaatttatttttagtatctgcacatttctctcttcctgcattctctcactttcttctctcccttctcctttctcttctgatttcccgctttctctccctgcactgtcattctcttttgcccttcttaactcctgcaaaacggggagataagttttcctccacataagaagccagggcctctgagaagcttgtctttgaacagatgcctcagccttgcccctttctcaggtctcatttttcgggcgagtctgtgcttgacaagagactgcgttatcttgtgggaggaccctaaggagccagggtacttgacatttaaagcttttcataaacagtgtcttcagtgcttggcaaaccttgaaccctcccagctggcagcaacgaggctttctcatcaggactggctcagcctcggatgtgacattttcccagggcctcaaggaaatggaatacgccctgtctgccttttaatccctctcagttggattttcatagacttctgtcaggggggtatgtgctggctgcttttcctataaactggagtcaggggaaaaggggaagatggctgaggggggaggcaaatatggatgcatttaatacacatttggcaggtcaagcagaaatatcattggttacatagttttttgatgctatcctccaggccaaattaaatgacttctttgggagtagagaagggcttaaaaacagtgatttgggtgacaccctatgaacattctaacctgaaacccttccccgcaggtgactcagcccacaaagagccacactcctggcagatgtgggaaatggacactatcactgtcagagtccacccgcgtgactctggggcgcactgctttgtgcctttaaattcagccctgccactggcttatgtcatgaccttgggctactcaggctgtctgcacaatgagccagttggacaggagcagtgccactcaactctggccatacacagaaccccccacccccaccccagggagcttttaacacacatagccatctagagaatgtggattaatttggtctcaggtgaggcttgggtggctgtaaaagctccccaggtaactctcacatgaagtaggtgagacatgctccctagacacatgtctctcaaactggaatgtgcacaggaatcacataggatcttgctaaaatgcagactccagtcctgtggttttcagtggggctggggattcttctcttcccatgtgctcctgggcaaactgatggtgtgggtccccagaacacactctgcacagccaaagtctggatggtctttaaggtccctgcagttccttactgagttttcttggtgaggagagggcagggaattaagtaaaagatatattttaatggtagcaaagaggacctcccttttatcactggggtaaagtcatgtcatttttgggaaaatgtgatgcagtatttggtgggtaggattcaatttgtatccattttcaacactggagtaagtttatttagggggaaaaagggaaacagatgtagctgtgtgtgtgaagaatggggaagagagagaagcgcgaaagaactgagtggatgtgtgtgtgctcacagggcgaggattccatgcaaacaaatacataggcttctccaggtccagttttggtgaggggacaggaaaaggggcagatattgttcagctgggatttaaggtgaagatcatgctccctggaacaacccaaaggctggaagattccatctcctcagccccatctctttctggtgctaagcagccatttgttccaattatccttgaattatagtgacagcttttggtttatgcaggccttcaaatcatcctaacctagtagaagaagtaaaatgatgcctttattgacaagaacatttcagctggctggttttaaaagactctcttcttcccacctattcccacgtccctgtgcttccacctcactaagagccacagacaccattttggagtgtcaagatcttgcctgattttgcatatatatatatatatataattttttaaaattcaaggtcaaccttgagagatattgcttgtattctgccttctgttttccctaatccttatagaactacaaattcccatacatgagcagattttcctggtttaaaattatatttaactaaagttaaatacttcaggccttgtgatggtgattctcctgcccacagacttatggggatttcttttgctttaaagcaggtctttaacagggcagtatttcttgctaaaatccacaatccagggttttgtcactgttctatttttagaaattcttccaatttgtagtctaaaggagaggaatgtttttctaacaaagatattttccaatctagagaaaagaggctgggcgtggtggctcacgcctgtaatcccagcactttgggaggcggaaactggcagatcacaaggtcaggagatcaagaccagcctggccaacatggtgaaaccccatctcttctaaaaatacaaaaatcagcttggcgtagtggcgcgtgcctgtaatcccagctactcggtaggctgaggcaggagaattgcttgaaccagggagtcaaaggttgcagtgcgcggagattgcaccagtgcactccagcctggtgacagaacaagactccgtctcaaaaaaataactaactaactaaataaaagtaaaagattcaaaagattttaaagttattaatccttgtgctctgaaacagacatttataactttaaaacagcatatatagggaccttacctccctgactgatgtacataggatttggcttttctcagtcctaagagatttaaagatttagtgaaacataaagaacatattttaagcaatatcaatatgcaggcccaatgtaaatgtccccatgaatgtcgaatgcaagtagttagtcctcaaactcctcttctcttagccgggtatggtggtgcatgcctgtagtcctagctactaaggaggctgatgtgggaggattgcttgaggccaggagttagaggctgcagtgagctatgatcacgccactgcactccagcctgagcgacagagtgagactctgtctctaaaatacaagttaaatgaaaaactcctgttctgtgtcacacatttgttgattttgctcatttatttattccaccgatacttattatgggcttattgtatgctttatgatgggtttacacagctctttgtgaagccctgaagataccatggaaaacaaaaacagaccttgttctcatgaaatttgaagactggggaggaagacatagtcacagaggttaatatgtaagtgctgtgagaggagggaacacggatctaagagcatataaccaagaaaccagcctagcctgggctgacttgctgaatgtttcactagttggggaactctgggaaaggtaagttctttggcatttgctgcccaaggtttagaggaactctgtgctagagagcccttggcaaacaacttcactttggccttaaacatgagattcactacctgtaaaatggacttctgagccctccctacctgtccacctagcagaccgtttcgtcagagcttcctcttctccaacagtgctttcttttaaacagacataatgaactgccttttggtttcatgacttttttttttttttgctacaagcagctctcttgtggctggcaaaagtaaagccatattctcgaggactcaaaagactctccatggcttccctggatcttgaagaacattttttctccaagtaattttattagcctgggtggacacttgcagtcagtgtcaccattacattcttaatctttacaaagtgtgcttatttgcttctaattttgaatgtctttttattccctttacttcttgcatgtgtgaagaagtaattgttacacagatgttttggagatagtgtttggtcctgtgttactcctgcagggtgtaggtagctcctccttgttctcagtctgtcgactcagctactttaaacacagaggatggggagatggatctcaaagttatcaatgtggaagaccatgtctgtaagtgccccggccctcccaatggccatcccatgccaactctggctctcagccaccttacttgataatattaatgaaagcaaatatttttgtgggcagactgtgtgcgatccattgagttgtgtactttatggactattttgtgtaatccccactacaattgttcacagtaaatcctcttaatattcccacttttccagataaggaaatcaaggcacagggaagtaacttgctacagttatacagctaataaacgtagagctgggatttgaacccatgaagtctgattccagagttcctacccttagccactatacttaacattgcctctgaaataaatataatatgtgcttggggtataaagcccagtcatttcagataaataactcccaaatcagcatgagactaaagttgacagctttaaacagcatatagttctttaatgacttctaaagcaatgatttctaatgtgttagtatcacaactgtccttcaacatgaatctgtgaaatagttggatgatttagagtgaagttgtataatgttggtatttgagactatttctctgagtctagtttcacgatatggtttctgtccaccaagtgggatgtgtgtttttgtaatatgaagacactgagctgtttctaagaaggaaacattgcctgtttggcccaacttgtgttgttatttacttttctatttatgtaaatgttttactttcttaaatagtaaaggagtgaaggatgtgccatcccaaaatatcccaaattggtatattcattattttgatctaaaaacattggagaaattgtagttttaagagaagcctagctggcctgtattttcctgcctgtagcaagccataaagattcttttggaaggggtgctttttccctaccagggtgagagactattccttatcaccccggactgggatttggtgttgcaacaggcctgaataaatagactttctgaagtaaccactatattccactagctttacaccctccatatatctcctagcgactccctagagtttactctctatccagagccccttgtcatttcttcacaaatttatcattctttgtctcagaagtataaaactagcttgccttggccacttctttgaactttgctgtcttgtgaagagcctcatgtacaagtaaaactaataaaaacttgtatgcttttctcgttaacctgccctgtgtcaggctggttcctagacctagtcgaattgcccccataagagctcaggggaggcggaggctatcttttcctcccacacagtagactgtaagctgcttgaaaatggtgtcatttagtgactcatgcactgtagagaagaatacttattggtgatggtggtgacgaagatagagccactgctgtctctttcccctggccttttccactgaagttcagagtacattactggatgccccactaaactggaccagttctgcagtctactgataaatgcagcaaattgcattctttgtttctccccattttgttttcttcttcccctaacctcggtaaactcacttgtaccatttcttgggcctcagagtaggttaggaccgtccatagtgggtaaccatctgcagacttaagaacatactctttaattccacttttctggagtaataaagatgctttgcaacttttttgcccttgtgcctcagggattgcagcagatgtgttaagtctcagctgggcaggtgttaagactaaacaccattgcccattgattatttaaacttaacgtttaaattcctggcatgcttggcttggctaagtagaaatagacacagctgaatgtgacgtcctcatccagctggtccaaagaaacactgggtagaaataatgaaggttcttttgagtgtcccctccccctcctctcccccgtgccctgtgcttgctcaaagtcaaggcatgcctaggcctgagtctatcaattctcccaggggcaagtgtttccctcttgtttctggacaatggatgggcccttttcatcgtttccctttccctgctttgactctgtctagattctacttcccatttaagacttgaaattaattatttctcttttaggttaaaatgggctcaaggaactgattaaattcctcccagccctaagtcctctgctcttctgtgggactactgcttcatacagcaacatgaacaaaagctttcacttaaatccccaagtaattcatttttttcctcagcagtaatcttcctgccttccacaattgattgaatttgtcctttttgagaatagctcaactgtggtctcaaagatcagctcttcctctctctcttcctgattccataggtctgaattgcagcctttctgtggctgctggtttccttgttttaaccctactattccaagcttttgccccctatggttcttgttttctcctagtgccagtggcaggaatgaagtaccatgggaaatccttttatagaaagagaggtgcaaagacagttggccaatggcgtattgatggctgcctggtctgctgatcgtaatccataatgtttgcaattataggaagccttgcaagggctggcataacaaaaatgacagctggtatctatttgatcacttactgtgtgccagccacaattttaaataccttaataaacagctcatttaatcttcacaaaatcctgtgaggaagctacggttatcacccccattttatataagagaaacgtaagtgaggtttggagaagttaagtagttaatatgtggtagagctggaatttagacccaatgggtcttgttctaaaacctttgtagcagtgggtaagagaaagggatgagctttggagccagggagtctgtgtgagctctggctctaacatttattaactgtgagactcaggcaggctttaaccttcccaagtgccagtttcctcatttgcatttctaatgaatatcatctatccctcagagtgattgtaataagcatggttataaagtgcttagcacagtgcctggtacatagtaggtgctcaatatacatatttatagtaatattgaaatgggagagttccctttccccctcgccgggagtgtgacaggagtgatggacagcaagatggatggggagccagaagcaggggatggagtgggaaggtcgtctttcttggggggcaggttgcccagacttttctctaactgccccccaaccgaactccccttggtgcctgtgtcattccactgttgctggtctgtgggtgtgttccccgttcctcctctccccctgacgcccttgtgtctgcgtccacttaaggtctcgggtttatatggcaacaggattgggggtgtggtaggccagaggggtcttggaaaatgcaacccttgagtgtaaaagtgggagtgcctattctcgcttgggtccatgggcgcaggaccaagggtggagcccttgccagggaccccgctcttctctactcagcacctcccttgctctttcccgtatcaatgttagttctgcttggatattgactctttccatttactctatcatgtcttcttcaaatgtcttcaaaacttttggtctcttgcctttaccttgtcagtcaccttttgtttgtccagacttctgtggaatagagaaaaatatatgaaggaagggcttgtggtatggaatgcaataatcaattggtacagctgatatgcttcaagaaattaagacaagaacctgattgatctgaagagagaaaattcaggtttaactagagcataaaaatatgtcatcgtggtctcagatgaaagccaaagagagaaaaaagggcaaagtgtacatcagacaatgagaattctctccaggaaagacacatttatggagtctcatctcatcaaaaacacttttcctcttaattggctgaaagccactcctcagcctaagagagctctagcctggtcatctgggatgtccttttgagtattttcctctggttcccattttcctgcaatctggtattgcttccatagttttctaattcagtgataatggaaacgattcagtcccccactttctctccggtactgctcagcatgtgtgactccagttgccataggatctcagttctggtattttggactgtgggtaacagtttcataaagcaatttttaagaaaaatgaaaactcatatagcacttattgtgagccaggcactgctctatgccctttatagatattaagtcatttaatttttagaacaacctagtagacaggtactatactttttgccattttgcaaacaaagaaactgaagcatagagagattcaataacttgcccaaggtgatatggccagtatttggcaaagtgagaatttgactctacttagcccgcatttagtgtctagcctcttaaccaccactctgtactgcctcttacctacctcagtgatatgcagtattatctgatactttccatttgagtccatactccatacttttaattttaaaaatggtatctgggtgtgattcatgaaatgatctcaccactttataatgggtaccaacacaaagtttaaaaatcattgggcaggggtgggaggagagaggattgggaagaatagctaatgggtgctggtcttaatacttaggtgatgatctgtgcagcaaaccaccatggcacacattttaactatgtaacaaacctgcacatcctgcacatgtacccctgaacttaaagtcgggaaaaaacaaacaaacattgggttagaccctctctgttgtgagatggacacatcagcctgcctttgcctggtgcctgaaacattccattcatgtctctccttgttctgagccgtgctcacccagcaagtcactgcttaggatttggcctcccgctgaggtctgcctgcagggaaataatgtattggttacgtggacttttgagtctccccatgaattagaaaaccatctctctggtttaggctgtgaggctagataatgtgaatctgtccccaagaaatgggttcttgagaaatgtagtcaccggatcagacatcagtgccagcgaggctgaggactgtgaggaccttgaagatttttgtcaaggtccaccctgtgacatcttttgttggatagcttgcaagatttcttcctggggtggtgaatcctagccctgaggactgactgtgggaacatgatttaaatgactacagcacttagcactttttccatagccagaaatagggctcaatacccctgttttttctccctgtcctcatttactcacgtatctttctacagaaaagaaaatgatgttactttcccacctcagctttattatactgcatgaataaatgcaacacatcacctccaaataattgattgaaatgcaatccctttccctctcgctccacccagtctctctcctaagatggtatctagtggggccatgtcttcatgcattatgcatctctatgattatgcaataacttctcgaagactagcaagtgatacctaaattcttcaagcatgttattgatgctaaataattaattacatcttttatttataaaaatttacttgctggaagttcagacataagttctgccaacccatcttctctattagatttcaacttcccggcatgaagtctgaaaactcacctacagatttcagtctttgaaagcccttaggcaggcagccagcatgaagttgggcattccagacaagtgagactggctttaagccaacagatacctgtactgacctcttcccacggtcgtggggatacagcttgccaaggccttaagtgcctggggaaacctatttccaactttaatgcattagtaactgctgtgtcctaaatgatgagcagttagggactttttgtacctgagtaaatgtaatcaggtgattggagaagttgttaaaccctcctagtttgtatgagtgggaggataatataagtaaaaagaaatatgggtaaccgtctggggaacagactgcatgatcaaaacattttgttttgtcttttaaaacatatttgggagaaattgtaaacagacaaaataaatgtaactatcatggtcaacaaatacaattattgatgtaatcaagagataacttttttcagccaggcggcatggctcacacctgtaatcccagcaatttgggaggctgaggcaggcggatctgttgagcttagaactttgagaccagcctgggcaacatggagagaccccatctttactaaaaatagaaaaattatccaggtgtggtggtgcgtgcctgtagtcccagctactcaggaggctgaagtggaaagatggcttgaacctgggagggttgcagtgagccgagattgtgccactgcaacccagcgtgggtcatagagccagaccttgtctcaacagtgacaacaacaacaaagaagttagtggccgggtgtggtcatgcctgtaatctcagcactttgggagaccaaggcgggggggattgcttgaggctaggagttcaagactagcctgggcaacatagtgagaccctgtctctacataaaaattaaaaattagccaggcatggtggcacgtgcctgtagtcccagctacttgggaggctgaggtgggagggtcgctcaagcctgggaggtagaagttgcggtgagcccgtgattgcacgactgcactccagcctgggtggcatatctaaaaaaaattaaaaaatatatatatataacttttttcctgttgcccttttatactttaataggctgaagtgcagtggcataatcacagttcactgcagccttgacctcctgggctcaagagatcctcctgcctcaccctcctgagtagctgggactacaggtatgagccactataccccactaatttttgttttttattttttgtagatacgggcatctcactgtgttgcccaggctggtcttgaattcctgacttcaagcagtcctccctcctcggcctcccaaagtgctgggattgcaggtgtgagccactgagcctggctcaactcatttttaggaaatagactatcctcctgtcactctaagttacaagctctgtctcaattcagaaattagaatgaccagcccaagctgataatcgaacctttgaacttgatttaatgtttatcatcccctttctcatctcaggcctggatccaactgggagtctcagtgggaagggctgggggctaggtgggagcctctctgtagcttctctctgtctacgcgtctttctctccttacacattctcagtgtgctagctagtttctgaatccccaggactgggtgggtaattggggagttagggataagggaattggaaaggttgctttccactccctgagcctggccagtgtttgacatgttggacattgtggtgggctcttcagagacccgcatcattggtgagctctctcctgtaattgtctggacatataaagatgcattgtttttttggagacagaatctcactggagtgcagtggcacaatctcagctcacggcaacctccacctctcaggttcaagcgattctcatgcctcagccacctgagtagctgggattacaggcatgagccaccatgcccagctaatttttgtatttttagtagaaacggagttttgccatgttggccagtctggtcttgaactcctggcctcaagtgatccacccacctcggcctcccaaagtgctgggattacaggtgtgaggcaccatgcccggccagaaagatgcatctttatttcaggtgttatctggggatttatttattctaagaccccagcaatcctgtgcccacctctagtttcttgctgctggggtctctctgcctctccagtaggtggccctgtgagacaggacccggtcagacctcacaccagctctctcttctgagtggccacgtttggtccccagggcacactctactcaggaaaacccagaaaggcagactagctcctgcatgcccctctagcctgctgtcatggcccactctgggtgtcacaggcatgcctctgggacctgaatgtctgctggttccagctgtagtgaaactactttaaagctccccaagtggtccacacaagctgcctgactgggcttggaatgaagaagatacaactcttgcccatctttcttttttttttttttttgagacggactctcttctgtcatccaggctggagtgcagtggtgcgatctcggctcactgcaagctccacctcccggtttcacgccattttcctgcctcagcctcctgagtcgctgggactacaggcatgcccatctttctttgggggattttaagggggacactacagctcattaacagctcccccaacaaaagctcttcacctatctgcccactccccccccccgcccactctggccccttttcatatccttgatctggaggaggcatccaagagtgacggagccaggtctcaataatttcctttgtgaattctgtgtaagggggtctgtttcacagtcatgtaggtatctgatatctatcatattggtgcctcaattaaaatggaggcagaaagagccctattctaatatctcattccataaacaatagagacaaaggcaaaagtgtgtgttttagttctctattgctgcctaccagccagaaatggagtggtttaaaacaacatcgatagactatttctcatgattctttgctggctggtcagttcctctgctggtctcacctgggctggctcatgcagctgccgtcactcacacagctggtggttggcactgactgttggttgggcgccttggttttctttctcatggcttctcattccctggtaggtgacaatggtttcctttcagaacaagcatggcagtgtttcgagggaccaaagtgcaagctccaaggcctctcaaggcccaggctctgaaagtcacacagcatcactttcatacattctattgaccaaacaaaaccacaagaccagcctagatataagaagtgggaaaagaggctgggcgcagtggttcatgcctgtaatcccagcactttgggagctgaggcgggcagattgcttgggcccaggagtttgagaccagcctaggcaacatggcaaaactctgtctctacgaaaaaaaaaaaaaaaaattagctggcacacgcctgtagtcccagctacttgggaggctgaggtgggaggatcacttgggcctggggcctagaaggcagaggctgcagtgagctgtgattgcaccactgcactccagcctgggtgacagagcgagaccctgtctcaaaagaaaaaaaaaaaaagaattgggaaaagagactccaccttagtcttagtctttcaccctcccctatagtttctaacacagaattctgcctctgtcagttctggttctagactttttctgagcagatttggggtaaaggattaggggaagaattaaaagttatctctacattggtttacattttgcttacatttggaagggtagaaggaagagaaaagaaagattcagaagttgagaggagggaggagagaaagtagagccaactgtggcggaccttggaaaagcactgcaggggatagaccacacattgggaactgggagtccttggtttagagaatagggttccaggccaggcaggtgctttcattaatgaagttatcggtaagtcaatatgtctgtctgagttggatgaatgataccctccaaagcttattgtgaaaatgaacttcactatagattggattcccccttggggcctggctaaagccacactatgagatgttagcctgatactggctccataatacccaaacccagcctgagatcctccccgtccacctgccccagtggacaaaccttgcactcccatcctttctcccctctgacttttgtgctcctagggaaggtgatcaacagcaaggcgaggtgctgggtgctggcaaaacaacctcgccttcaggttccaggtttctggaagaggtgaatgacagaagagggaatcaagttgattatttcctccatgtctccgctctactttgggcgctacattcaaagctcaggtttttcattttaaaaataattgctaaagtccttagggggtagatgctttatgtgtgcttatctcgagtttaagttgaaaggacctgtgtttcccatcagatgcccccagcaggaatggcattggaggctggtgatatttgaagggcaggtcagattgctgagacatgaagtggctgggctggtgttgagccgacacaggtgagcaggctcaggctgcagattgttgaagcagataagcaagcggtggggatggagaggggtcgggacctgcactcgccttagattttaaacacatcaagtccatggaagaatttattttctactttcagagaacagatatatgcctctctttaagagaatatgctgtgctaaaaaaattatcaagttttcatcgtggcttttcacgatcagcatggctaagcagaagcctgtccagctgcgtctaactctacgtgcttcctaaattaccctgtaatcctcttgtcctcttccaagccttggccgatctgaatcatagtgcatttctttcagcacacacatggcaatagatacttcagagcatcgttggggtgagttttgtgtgcgtgaatgcctgtgccctggcctgggccaccaccgcacacaaccagcaggcggagtgtggctctaccagccacgacctccctccagggcagtgcggggaggccaccggcagggggtgctgcacccacactgctggcaccagtacgtgggcattaccaggcttcataaattgctggaaatttaaagctggaggggatgttagaaaccgtatcatccactggtttccattcgctcgtgaggaacccatgatcccgagagttgagtttgtggtggaaatggagctaaaatagagccctctccacttccaggccaggacctccacctttcacatccccactgccttcccctggcatgactacaaatgtcttaccagtgttgagagggaaatgatttgcatgtagaagaatcagcaaggacaagaacaggtacttagtgctatttgcctgggaaatcgcagattgaggctttttgcatttggccccaaagtcacagtcaacccgcaactagtaggggtaagattattattttttagtgattatatttaaaaatagcacacttggggaaaaaattacagtttgctacaaatcatcaaaacatttgcccatcctctgagaggccatatgttgtagtgtcagtccccacctctgttattactagctgggtgatcttggccaaatttctaaactccattttgcctcatctgtaaaatggggttggtgaagattaaatgagataagacataggcagtgctttttagggtcacagcgtatcctaagtactcaacaagtgccaactgtaataataatgggagccatttggcatctataacttggaactgctatgtagttgtatctactacagtggagaaatgttccctctcaccagttggatatgtagctgttgggtgtagcttctctatggtctaccaggatcctctccagagaccatagttgtggccaggagttggctaaggtgaaggagtgaagagtaggtatggaagggtggaaggaatgggtgagtggcttttagtctaagctggcaagtaagaaagaattgagaaagagaggaagtgtgctgggatgtgttcttccccaactggggatctttcttatcggcaaaaaaataaataatcaaaagccatgaaacagacagtgataactttttttttaaatggagtctcactctgttgccaggctggagtgcagtggcacgatctcggctcactgcaacgtctgcctcctgggttcaagcgattttcctgcctcagtctcccgagtagctgggaccacagatgcacgccaccacacccagctaattttgtatttttagtagcgacagggtttcaccatgttggccaggatggtcagtctccgtctcttgacctcgtgatccgcccgcctaggcctcccaaagtgctgggactacaggcatgagccactgggcccggccgtgataactttttttcaggtagaaatcttttggttctttttttatcaagtattttgtgtgatgcttacagaatacatttattaagtattttgtacagctcttattttttgttgttgttttacaatttgggtgatgcgtgcaaaaagtagatatagttctagatagtggattttttttttttttagctaattagattgacctcaggtccaatctgtaaagtgtttcaaatacttaagttttgtttagatttctttaatcttatccatgaccttttttgccccccagccttcctacctcattgtgccattgatagcaacttgactttggtttcttctcttttcagagtttgatccagtggttgtaaaatgctttcagatcacgacatgaaactctgccttaatagaaaggcacaatataaatcagagatggccagaaaggcaagcatgaaaatagtatccctgatttttttccagtagcacatgatataacattgaataattgctgggtatatttgacaaattgggatacagttcattagggagctggggaacttaaaaatcaggctgtcttcaggaaaatttatgaggggattacagtgtgcagccaccagaaaatggggcagcaggaaccttggctgaattgatgatctgcctgagtgggagctgcatccattgagcaaaactttctttagtcaaagtgacttagagggaaaattgtgataaatagaatgaatgaaaaaaattaacatccagaatatctagagaatggaattaaatccacaagtgcaatactatttctactgcattaacagtcaaaaaaaaatctgaacatgttcacacaagaggcattacaactagaaaacaaatccttggaagaggactcagcctccttagtaattataagaagttaaaacacaaaaccatgcaatgccgttaaactggcaaattataattacaaaatcaaagtctggcaaggcttttgagaaagttataccctcatacaaacataaattagtacaatatttctggaaagcaacatggcgaagtgtagtaaaccatggaacatcatatcctttgagctagtatatgtttgagactacatcctggagaaacaaagaaagaaaaataggaaaaaaaaccctaaaaattattttaaaaaattaaaaacaaactatggtctggcacggtggcttacacctgtaatcccaacactttgaaaggctgaggtgggaggatcacttgagcccaagagttcgagactagcctgggcaacatggcaagaccccgtgtctacaaaatttttttaaaaaattagctgggcatggtggcatgcatctgtagttccagctactcaggaggttaaggtgggaagatctcttgagcccagaaggtcgaggccacagtgagttgagggcatcactgcactccagcctgggcaacagagcaagaccctgtctcagaaaaaaagaaaccccaaaagtatgttgtaaaatgaaatataatattactattaagaatgatttttttttttgaggcaaagtctcactcttgtcccccagactggagtgcaatggcgcgatctgggctcactgcaacctctgcctcctgggttcaagtgattctcctgcctcagcctcctgagtagctgggattacaggcagctgccaccacgcctggctaatttttgtatttttagtagagacaggtttcaccatgttggccaggctggtctcgaactcctgacctcggctgatccacctgcctcagcctctcaaagtgctgggattacagatgtgagccactgcgcctggctgagaataatggttttttttttgttttgttttgttttttcttagacagggtcttgctctgtcacccaggctggatgcagtgacacaatcttgtctcactgcaactcctgcctcctgggctcaagtgatcgtcccacctcagcctccagagtagctgggactacaggcacatgccaccacaccctgctaattttttaatactttttgtagagatggtgtttcgctatgttgcccaggctggtctcgaactcctgggatcaagtgatctgcccaccttggtctcctaaagtgctggaattgcaggcctgagccactgtgcgtggccaagaataataaatttgtgtgttataaaaacaaatagaaaggctgatataaaatacagtaagtcctcacttaacatcattgacaagttcttggaaactgtgactttaagtgaaacgatggataatgaaaccagtttaaccacgggctaattgatatgaatacagaactaaattcctacgacatatttctagtcaaggaaacatcaccacatttctagattaagacccaaaacacttctattaaaaatggaaataactgtgagctatacatgcatttcggtaataaaaacaagtaagataattttttacccagtctttggtgaatcggtgagtgacagcagtcatgtggtgggtaagtcaaggaataagtgtttgcaatgagaaaattgtcaggagcccccccttccaccatgcagttgaaaaacgagcagtaacgaatgtggcggctccttgagcgctttcgcactgcgtcgtttattgtcgtgtatctgtaggattattcactactttacaaatttttattttactgtaatttgtatccatttattacccaacccgcttattgcacttcagggtgggaggtagccagagcctatccccagcaactcaaggcacaaggtggtacccaaccttggacaggacaccatcccaccatagggcccacacattcacacacacacagtcattcagatctggaccgtgtagacacgccaatcaacctaatgtacaacacacatctttgggatgtgggaggaaaccagagtacccagagaaaacccatacagacatggggagaacttgcaaaccgcacagacagtggcctcggctgggaatcaattttcaaaaatctcatcaacattgtaacaaaaccatgttgatcaaaatgacacttttttgaggacctgctataatgctaaatgaaaaattgttgagctcaggctgggcgtggtggctcacacctgtaatcccagcactttgggaggctgaggtgggcagattgcctgagctcaggagttcgagaccagcctgggcaacatgatgaaaccccatctctactaaaaaaagtacaaaaaattagctgggcatggtggcacacacctgtaatcccagcactctgggaggctgaggcacaagaattgcttgagcccgggaggcagaggttgcagtgagccgagaacgtgccactgcactccagcctgggcaataaagtgagaccctgtctcaaaaaaaaaaaaaaaattgagctcaactttataaatattgactataggcttgttttaaaaaaaaagcccaagcaacaatacagctaaaaagagataatttgttacatggcaggatgagaagttaatttgatttttctgttgctttgatgttttgtatttatctctcattacaaaattggttaaaagcacaattttaaagactgcaatatatattgttaaacatcaaggacagaaaaaaggtaaacccttacatctcctttatgtggtttctcacagctgtgcagatctgaaacacaagctagaatagcacaaaaactgcatctcggagctgcacaaatttcctcgattatacgtagaggaaaagtgtgattaccaagagctttgagtggatgtcggagaaagtcatgttgggttaactgtctggttggctcatccgatgacagagctttacctacttggatctgatgctgggattgttttgtttggtttgggtttctttggaagtgagggaggccagtatgggatacaggaaagagggaaagcattgactcctttccactagtaagcatttgcctccttcatcaagccagtgccacatttctgcatccttcggcttccttcttctggtctgatccttcttgccccataagcttggcattctctgatggttatttttgctgtgttatctacctctaacagcaacagtaatcttaataaaatatagtctcacatttcctccaagtagctagacgttcttaaggctttagacacagccttcattgtatgtaatagtggccatttttctttttgtccttgcacctgtgtaagcagggcactaaatcttgtaggtctcaccctgatttgcctctttgcagcagcaaggacacctgagtctctgtactttgacatagatttctgcttacatcgggcagttctgagtcagagggtggtgggcctgagtcaccaccatctgctttcatcaaccatgttcccgagacccagagtggggagattcccatggccccattcaggcacgtacagaggcttcatgagcatgtgcttccctagcagaggcgagaatggcgcagggacccttgtgaatttttactggagaaattgttacggaattctcaggctcttgtttccaaattctttcttccctctcttctctttcccatatttttctttttccccctccacacattagaaggcttcaagataataaggtaatatttattggggacatgatgtgtatcaggcacacttatgcatattaacctatttaatcttcacaaccaccctatgaggtaggtgggcacagctattatcctcattttacagccaatgaaataggcagagagggtaacttctccaagctcactacatgggagaagcaagcttcacacccaagcagttggcccagagtgcaggctgtgggccactgtgctctgtgcatcgtaacagggcaccagagctagcttgcctgtgctctggggagggggctgatgtgaaagagaccaaagctagagtgaagagtgaggtgtgggagtgcatgctggtggtgtgtggggcgtgtgcgtggagagcctgacctgttttcctgtcgtcctgtcatttactctgtgagtacgcccagttacttaacctctttgcttctcagttccctagttcataaaattccaggaatatgaatagcgcttaacccctcatagggttgttgtgatgattaactgtgttaataaagtccctaggacagtggctggtccatgaatgttagccattatcatcagcatcatcattaatttgggaaccactccacctcctctttctactagactggtagtgacaaaaataacatttctagcaagttccaggtggtgccaatgcttcctgcctgggaatcacactttgagaaccactgaggtggaggatctggaagttcttcctttcttagcaccccacattccgtttctttccctgagctctgtccctgggttattttcactttctgtctttagtacccagagtggccagcttgcatggctatcaataaccagtgaaaggagcttccccagaacctctcattgactcctttcaatgaatactgtaatttgtattcatttattacccaacccgcttattctacctcagggtgggaggtagccggagcctgtccccagcaactcaaggcacaaggtggtaaccaaccttggacaggacgcctgctttcagcaggatctgatgtgatgggtaggcctgtttccacgagagggagatgcaagcaagtgaaaagacagaagttagcaagtgttgaatgcgtagtatgcacagaaacacacctgagtgagtgcatccatgaataaagacagcagatgattttgaaagtaataggaggccaggcgtggtggctcgtgcctgtaatccaagcactttgggaggccaaggtaggcggatcacttgaggtcgggagttcgagacaggtttggcctacttggtgaaaccctgtctaaaaacatacaaaaattagccagacgagtagctgtagtctgagctactcgggaggctgaggcaggagaatcgcttgaactcgggaggcagaggttgcagtgagctgagatcacaccactgcactccagcctgggtgacagagcaagactccgtctcaaaaaagaaaaaaaaatgtaatagaaaagtagagaaaagaatcttcctccctgaaagataatgacctttgagcaaagatggaggtaatggaggaaagtggggagaagagagaaaggggccctaattgtcacattcatggttggaattgtgaggttgtaagaagcaaaggcagcaggcaccctgatcttaatcagacagatgacagcttgcctttcacaaagtaaaaggtaatagtgtataaatgagagaaaagtaggagttccagtcactttactacctctggggacggaagggaatggggagcaggtctggggttcagtatttgtgtgactgctgacttcagaggtctgaattctctgcagctcacttgctgcctcagtgggtggggtgtgatgggacttcccatccagggccctaaactctagaatccatcctcataagaactgcgctgcctctgagcacctgggcaagctctgtgtgggatgcagatactctgcgaaataagggttctgcttcttttaggctgcaagagcagaactgggatgtgaattccagcccagggcattttgcaccctggatctggtttatgctcttacttgctgcaactatgatggtggctgtttccccggggtctcccagcccaagtctggtcctggagtggctcacagcaagtctcattgccccgaggcaggaaggctgcagagaaagttacccttggagtagggagagaggagaggaagccagtgctctcttcaagtggtctgctctgtgttcacaggcccgatgggctccccaaggctgtcctagccaggctggatctgtgccaggccttgacccagcagctgtgttccgtaccttggattcctgacaaaagcaaaataattgctgcttccagctacaaccagctggctaccaggagaagtcaccagggagagttctgctgtatcctctctgcccctacccccagctttccgttctcaagaatgacactttgttgttcctttgtatgtcagtcccagattggaaatgaaaaaaggaattgaaaaaaactaaaatatcataatggggtggtacatttccgaatggttgttgatgggtctgggggtttcctgtgtaccccaagcaggaagtttcgacttgttttgagactgtcagctcttgattggagacttccctggaagaagcagtcgttcaagagagtgagctctttgtgtttatagaagacgaaaaaatacagctgggcgctgtggctcacgcctgtaatcccagcactttgggaggccgaggcaagcggattacgaggtcaggagaccgagaccatcttggctaacatggtgaaaccccgtctctactaaaatacaaaaaattagccgggcgtggtggtgggtgcctgtagtcccagctactcgggaggctgaggcaggagaatggtgtgaacccgggaggcagagcatgcagtgagccaagatcccgccactgcactccagcctgggcaacagagtgagactccttctaaaaaaaaaaaaaaaaaaagaagggaaaaaaatacatatattttcctttgggaggccaaggtgggcggatcatgatgtcaggagatcaagaccatcttggctaacacggtgaaaccccgtttctactaaaaatacaaaaaattagccaggcatagtggcatgcgcctgtaatcccagctacctgggaggctgaggcaggagaattgcttgaacccgggaagcggaggttgcagggagccaagatcgtgccactggactccagctgggtgacagagcgagactctgcctcaaaaaatatatatattatacatttatatatagtatatataactatatatataaatgtataatatattatatgtttttaaatattatatataatataatatatgtattatataaaaatatataatacatatattttcccccttattctcctaggttcctcagctggggtcctgtaaattagattgacaaaagacagattagcaagagaaacataaacaagtttattaacatgcacatcacaaatacacatgggggcactcagagatgagtaactcaaagggatggttacaccttggcttatatagcatcttaaaagaatagtaaagttttagagagatgacaaagacaaaggaaaaggactttgagtttctaaggcagcaagttgtgggaaggtaaatagtgggggagctaatggaagataagtgctaattgggaaggttggttgtatagactcctctggtgccctctccgggctggtaagggtctagagttatctctggtgattcacttctgtccttcctggtagagaggggaggagagacacatttacagatttatgttctgcttttaggtaaatagggggagggcagagagctcttttgtatctgctgctgtgtaattgccttcagctcaaaataatctttatcctaaaaaggcatattttggagtagcatgttctgctcccttcatgttcaagaagatatgtttaaaattctttctcttaaacatatctctttccccccttccgtcaattcaaaaaatatttactattccactgacaaacttgtatttggttagacctatgggatgcagagctgtgtgctgggagatgccggggggagggtgaaatccagagctgagtgctgctctcaggaagcttatagttgagcttatcagtcaaggtgtaaacacaagaaagcatcgctgactataatcctcaccagcccaacctctagctccaggccagcctccctcctcctccagaagtccttggccctcctcaccaccataggtacagcccctccttccttctggggaaacccttcccgacccttccatcccaaaatgaatcgtctgccttctcagcaacctacttgtcttcacggactttgtagtttaccacaaacccttggaatgcctcttggtgacttggagtctttaattttggtgttgccatttcagcttttggaggctcaaagaagacttcttcaacttgtgaggtggattggtgaggttggccacacacagaacttctgttctttctccaaacacttctatacctttctccctctcctctgcctggaaaattcccattcctttttaaaaatcgaggtcagaaatcacatcttctttgcagccctccagactccttcagagagacaaagtcaccacagcctgtagcccttcattctcctataattggctggtgggttcttcctgcccactgcacagacaaaatcaatccactgagacaacggcattgcagtagagaaagagtttaattgacatgagcgtagcccacatgggagaatcagaattgtcattcacattggtctccctgaaggcttggagattagggtttttatgggcaatttggtgagcagtggtcgggggctagggaatgggtgctgctgttggttaaggatgaaatcacaggggagtggaaaatggtccttttgcactgagtctgcctctgggtggggccacaggatcagttgagtcatgagtagcgagtctgaatggggttagtctgaaagatatttcaaaaaaccaatcttaggttctacaatagtgatgttatctataggagcaattggggaagtcagcaatcttgtgacctctggccacatgactcctgagcagtaagggattgtagaaactatgcctatcttatcagaattgaggcccctctcataatcctaaccttgtgacctttcactagttttacaaaggcaatttagttttgggaagggctattatcatctttgctttaaggtaaaactagaaactaaattcctcccaaacttagcttggcctacacgtagccaggaatgaccaagggtagcttggaggtcagaagcaagatggaatcagctatgtcagaattctcttactgtcataactttgcaaaggcagtttcactcctttatgacatctttatttttatttttaaattatttattattattatttttagagacagggtttcactctgtcacccaggctaacctatagactaacttaagacaggaaaaacatacagaggagacaagagctggtcttgctcattaaaaggctcaagactagaggtggggcatggtggctcatgcctgtaatcccaacactttgggagggccgaggcgggcagatcacttgaggtcaggagttccagaccagcctggccaacatggtgaaaccccgtctctactaataatacaaaaattagctgggtgtgatggtgcgtacctgtaatcccagctactcggtaggctgaggcatgagaatcgcttgaatccaagaggaggaggttgcagtgaaccgagatcgcggtcactgcactccagtctgggcgacagagtgagacactgtctcaaaaaacaaaaatgaaacaaaaagtctcaaggccagaaaggggagaccaagagaagctagactttcctagagtcaaggaaaccagttgtaagggatttacctatgaagtcagaacagttttgactgcctgtcaatgggggtgtccaaggagaaagaccattgcttctgaaaagactaaaagagaaccaaagcatggagcagcagctgtctctgggagacaaaaggaagaatcttcacggaggctgggactgatggatggaccataacctctgatttggtgatacaactccaggagtgggacctgtatactcatagagggtgaggatgagtgtgtttctgaatgtttgaaatatgtttaactccacaagggtagaccagggtacacacctttaaggagcatacatactcttagtatagtgttctatgcagatggcatcccttagtgaccttttccagagacaatgcaggtggtgcagttgtacaggaccaaggccttgtccactgcatatcattgttacacccgaatccccttacatcctaaagtcaagtttagggtttcatttgaacctgagtggaggagaaatgaattcagaatctgatggggaaacctctccttacttagatatgaacccaggaacctcaagatgtgagatggggtggacttttctgtagcacacctctatattatcctgtcatgattatttaaaaaagaagcttcattccattagagctggaacagcccccactctgcaggatgagcttgggcagcaattgacaggtgcccttcagaacttagaaaatgtagaggagaaaggagatgtgtctccttttcttgaccaattaggacagctttgtgacagctccaggggaaaggaacaggacgaagagggctgtgtatgagatgggagcatgccaagaagcataggctttatccagtccagcgcgtctcacactgcacactgtggcctcacagggggtgtagaacacttcagtttggatcgtgaccaacatttaaagcataataaaatagaaagtgtcagtgcattgagtttagtaagaattaaatattgtttatgaaaattgtatatcagtcatatttgtgtgtgttctagattgcaacgtgtattatattacttagtgcaggtctctatttaaaaaaaaaaaaacagctgctttcttaacaagcagagtgaaaataactagtcttttaatctcagtgtccggcaaactcaagtttgcccagttgataaagtcccgattaaccttgctgtaaaaatccaaggtaattgttttttttttttttttttgagacagagtttcgctgttgttgcccaggctggagtgcaatggcacaatcatggctcaccacaacctccatctcccgggttcaagcgattctcctgcctcagcctcccgagtagctgggattacaggcacgagccaccacgcccggctaattttgtatttttagtagagatggggtttctccatgttggtcaggctgtctcgaactcctgacctcaggtgatctgcctgctttggcctcccaaagtgctgggattacaggtgtgagccaccatgcctgacccaaggttattgtttaggaacaaacatggtgggagcaaaaagttgttgggtgttcctctgtttaagagccttctggaaggatgaagtctccactgggctgacacagagcctctgcggcctctgaggcctgtcagtggagacccttcaggcggtttttcctcacttaggttccatgactcaccttgtcagttgaaatcctgcttcctatgggattgggccaaaatcaaatgcatctttcccagagctttcttttcttttttctttttttttctttttttgaaacagagttcactcccatcacccaggctgcagtgcagtggcatggtctcggctcactgcaacctctgcctcccaggtttaagtgatcttcccacctcagccttctgggtagctgggactacaggcacataccaccaggcccagctaatttttgtattttttgtagaggtagggtttcatcatgttgcccaggctagcctcgaactcctggtctcaaatgatctgcccacctcagcttcccagagtgctaggattacaggcatgagccaccacgcccggtccaggctttattttctaaaggaatcacgttttagaatgtccatgggtgagctaatgctgtgacagtaacatatggaagaaaaagtacactcatgctacccatagctgtcatttttgtttgtttggtgagacaagtggaaggtgctggtatagtactgtgagtggttgatagtgaaatgaaaataaaactcaagtatggcttttaccctctgaaagttagcgtggacggtggtgacagagtgatagctttctttgggcttgaactgaattcacattcaaagtttgattatcaccatcaggagcctgtacccatgagccccattagcccttaggaaagcctaacaccatctagatttcacatcagctggaaaggtttatttctgaagttcaggggagttatttattaaagcaacaaaatattccgaggatatagattatgggaaaactccttactctggaactattctgacttggtttttcttttttgttgtatttggccttcagaaaacccttcctgaattcttcctggttatcatccaggttgataaccttgttggtctttaagtgtgcaatttgaaatataatcaacatatgtctaccattttctttgcatgggagagagtgaaaattgtttcttattaatagttacctttattatgttcattaggaaaaacaaaatgccatgttccatttgctctcagaggcagtggaggacaggccctggggcctaaatgtctaggttcgtatcttcctgctgccactagcaagccccactgctcacaggcacaacgacagcagttttcagggtatctatcacctgtctaccacttaccaagcacttgacatttctcatctttagtcctaaaaacagttcttccagctttgttttgttcttcccatttttcagatgaggaaacagactcagaaagcattagggaagagctaatcacggccaccatgtatatctttttatattattcttttaatttgatattgcctttcccacttactctagggcctacttatttgtgggcaggaagaggaggtatgcatgtatttaagtttaatcagtttggtattagaaagtctgtacaaagcaaggtctgttttatttatttattttttctaaagatgggggtctcaccatgttgcccaggctggtctcaaactcctgggctccagcaatcctcctgcctcagcctcccaaattgctgggattacaggtgtgagccaccatgcctggcctaaagcaaggtttagcccgtactttctcatgctggccatctatgttctggttctaacgtttgtgtggttggtgttaatgttagacctaaaaagagaaagatgaaattcggtatttgttatcaactgtcaaagacacttgttttccccagacttttattatgtacattttcaaacatacagaattttaaagaataatacagtaaacacccatatatctaccactagattcaataattattaacatttgccatatttgctttatttacctataactttttttctcagccatttgaaagtaagttgcagatgttgtggccatttacacctaaatgattccatacacatcccctaaaaataaggatattatcataacctaatctaatatcttgtccagattcagatttcatgtgtcctcagactatcttttataattgttttttgttttgagctaggagctagtcaggctttcacattgtatttgattgttatttgttttcattgtctttggaacagaccctcacccttgacattgactttttgttttagttttctgtagaatgtcccacatttttgtgtgattgtttctaccttccctctgttttctgtaaactgcgaggtgagtcttaccggcatggttgaagttaagcatatttggcaagaatgcctgaagggtgatgctgtgtgcttcctattcatcatcagaaggtgtcaattgcctgcttgttccactttaaagttttttaatttttaagctttatcacgcttatcaaacatatcagaaagcaaataatcagcgcatcttatggtaatcgacaaaactgaacaaggtaattttatttacagaaaaaattttagcaaaaaagtatatagtacagtcaattgaaatgcatgttcattcttcttaggtatacaagaaagtagaaaataaaagttctctgctgcccaataagaaaaaacaagtcttttaaaagacttgaatggaaatcagacatttagggatttgtgaaaagaacttcttggtgcggatccacatctacatttagaattccacttagttatttttaaaaataaataaacgtcacaaacaagacatcacaaagaacagagagcccctagtgccaaaaattgccaggaccaatatgctattgaaacaactggtagaaatgttacagacacctcttcactatgtaatgttcctgtagttctgaggtgaaggtaaaccagcaggagagaatccttttttttttttttttttttgagacagagtttcgctcttgtcacccgggctggagtgcaatggcgcgatctcggctcaccacaacctctgcctcccaggttcaagcgattctcctgcctcagcctcctgagtagctgagattacgggcacctgccactatgcccggctagtttttgtaatttttgtatttgtagtggagacggggtttcactacgttggcgaagctggtcttgaacttctgacctcaggtgatttgtccgcctcggcctcccaaagtgctgggattacatgcgtgagctactgagcccagccgagaatacttttttttttttgagatggagtttggctcttgtcacccatgctggagtgcagtggtgcaatttcggctcactgcaacctccgcctcccgggttcaagtgattctcttgcctcagctcctcagtagctgggattagaggcacctgccaccacacctggctaatttttgcatttttagtagacacctagtgtttcaccacgttggccaggctggtctcgaacccctgacctcaggtgatcctcctgccttggtctcccaaagtgctgggattacaggagtgagctaccatgcccagctgggaatactttttgtaagtagctttggattaagtgatctttcacattttttctaactataccatcttatcaaaaacataacaattacttattactgagtaaaaatagtagtagcttttaatattcacaaccaaccactctagtgctgacataggaggctacaaacttaaaattttttgatcataactagatgatcaagatggagccctttttgggggtaaaaattccttctactccatatttgacactgttaagaggatataaaggaaagttaaattatttaagatttttcacaaaagatttaagaatgaaagaataaatcctgctggaaaagaatatgacagccataccatctgcaaagtaaatcttctacagaggtgcagcttgactctttttatagtaataaataaacactgcttagttccataaggcactgtcactgcagctagtgcacactagtgccacccactgtccccagtgtgcaacaggaagggtggaggtgcgttccagtgttactgatgctaagcttcatctcttggttaagtggtggcttccagatgcttccgttgtaagattctattttcccctttgcagttaggaagcaatttaagaggtgatacttctcccaaatcctttcatctaatgattttagcatttgtattagtttgctcctataacaatgtactacggatggggtggcttaagcaatagagatgtgttgtcacacagttccagaggctagaagttcaagatgcaggtgtggggagcttcctctgagggctgtgagggaaggatttgttccaggcctctctccttcgcttatagatggttggcttctccctatgtctcttcacattgttttccttttgtgtatatctgtgtctaaatttcctcttcctatgaggacatcaatcacactggactagtcaacccttgcctgcccatgacctcattttaacttgattacctctgtaaacaccctacctccacgtcaagtcacattctggggcactgggggttaggacgtcaacttttgaattttggggggacacaattgtgattcttgcctgaatctgttatttattggggtctttaggtttctgtgaaacagattctgagatgcagatttgtgtgctggcatatctagtactgtgcttagaaacatctgtgggggaataagaagcagaattggacagagagagaagctgaattgcagtgcagttacaacagaggcctcagcctatatgctacagggagctgcgaaacggggcagtcctttgaggttttttgtttgtttgtttgtttgtttttgtttttgttttaagatggggtctcactctgtcacctagaccggaatgcagtgccatggtcacagctcactggagcctcaaaatcctgggctcaagagatcctcctacctcagcctctctgagtagctggaactacaggcatgtgccaccaccacacccagcttttttatttttaatcactttgtagagatgggggtcttgccgttttgcccaggttggcctagaactcctggacccaagagatcccctcacctcggcgtcctgaagtgctgggattacaggcatgagtgactgtgcctggcccggacagccctttggagatgttccaaattgaggcaaaaggccaaattttgtacccctttatctactaagcattgaatgcaggctgctgccagggaggaggcaagccttgggctgtgcagcttcccaggtagggcaatgcctgaggaaagactcagttgtgagctgttaggcaccaacaatcccagtagttggggaatgagtacctggacctacagagggttggggcagtgctcaacagcatcagacacaattggggattgcagaagggtgatttccccctctaacctgcatttattattaataatttctgaaattattaatttctgaaaagaagatctttccttcatcaactaggaatggattatagttctaaaaagacaggataaatgctgctttctcttttgtcttttttttttttttttttttttatttttgccttttttgagacagcatctctctctgtcacccaggctggagttcatgattacaactcactgcagcctcgacctcctgggctcaagtgatccttccacctcagcttcccgagtagctgggactacaggcgtacatcaccacacccaactaatttttaaaaaaatttttctgtagagatggtgtctcactatgttgcccaagctggtcttgaaccggggcacaaacagtcctccctcctaggcctcccaaagtgctaggattacaggcatgagccactgtgcctggccgtttctcttttaattaccaattttccaagtcatgaatgatgtaattcatttatactcagggttgcattatgacttttgcctttgtaggccccttctccataaaaatatattaaaaatcattttacaactaccagcctggccaacctggtgaaaccccatctctactaaaaatgcaaaaattagctgggcgtggtggtgtgcgcctgtaatcctagctactcaggaggctgaggcatgagaatcgcttaaacccaggaggctgaagttgcagtgaactgagattgcacccctgcactccagcctgggtgacagagcgagaccctgtctcaaaaagaagaaaatcatggccgggcgcggtggctcatgcctgtaatcccagcactttgggaggccgaggcgggtggatcacaaggtcaagagatcaagaccatcctggccaacatggtgaagccccgtctctactaaatatacaaaaaattagctgggcgtggtagcgggcccctgtagtcccagctactcgggaggctgaggcaggagaatggcgtgaacctgggaggcggaatttgcagtgagccgagattgcgccactgcactccggcctgggcgacagagcgacgctccgtctcaaaaaaaaaaaaagaaaatcatattttacaactgtattggtataaagacaactataatcgaggctagactcatgattatgtacttattactatattctctttttatctttttgaagaaaacatattgtgggctgtgagcactgtgcctactgtgtctagtgggtaagttagccctggtaatgtcctagattgaggccaggcaggtaataaatgaagagggttgattcagagtgcatgtactactgtatggggtaaacaggggtgtcatgtggagctgtctcagtggaaggggtatgtagttcctggaaaaagttgccatgcaagaaagagaggtggcctgacattgccagatctttccatgtttcaggagaagccagaaaaagagattttaaaatttgaaattccctatttttaattgttggatcagttttttaaaaaatctgtgggttggttgtggcctgggggctgccagtttgagaactcggctagcagcgagccccctgaaatggaggctgcccactctgatactccgcaccctggaggaaacgggcatgtggaaggtgctcgtacgtgcttgagaaggaatgaatgaataattgtattttgataagtcaactcattaaaattaggttggaatttatgcataagaaccaagtgaaggtcagaaaaccaagccttgtaatatgctgcaaagaaaaaaaaaagtctgtcttggggttattcacagcaacttaaagcgatttggcaagaataaaaatgtgtgaagaaacctcttgaaactggagtttgtgaactaggtcaggctgccttaatgatgcagtccctaactagagaactgaagggggtttcatggtatcttgaaagaatattgcattattaaatttcatcttttttttctatttaagccagaaacattgtgataacaacaaccttgaaaaaaatgtgttttgtaactttttggtggggggagcagcaagtacacctcgctgccaaatattcttcatgtttgtccttggcctgtggctgccagatagaggaacgtttggtcagaatccactgggttcacaccgatcaccatggtgagggagggtctgagtcagaaaaaaggacgagaggaggatgaagaaatcaggacggagagatgaggacggagagaaacagctcctcccaagaggctttcctggacttttcactttaatttccagctcttttggctcagaaataaaagcaacagtgatgcctagggcctctctccatagaatgttcccaaagatgtccctccagagcacagcactcagccctctgagggtctggttattgtggtctttatgcttcattgctgcaaaggtgcctgccagctcttctgtgaaaccttggattcctggacttcaaccagcaactgtctttattcccttagagagattgctttttttttttttaaaaaaaaaaggtgataatgacccataactactcagttcagatgatgacagcagaaattattcttttttttttttcacttgcctgaaattgaccacttttggtactgtttttaatttttatcttccttcagagggaccaactttttattttattttattttatttttgagagggaatctcactctgtcgcccaggctggagtgcagtggtaccacctcggctcactgcaacctctgcctcctgggttcaagcaattctcgtgcttcaccctcccaagtatctgggattacaggcatgtaccatcacacctggctaatttttgtatttttagtagagatggggtttcaccatgtttgccaggctggtctcgaactcctgacctcaagtgatctgcctgccttggcctccgaaagtgctgggattacaggcgtgagccactgcaccaggccaaaggaccaacgattttgatattagtttcctatttataggcagagatattaatgagcatgcatatacctatagtgatataaaatgtatgcacatcttcctctaacacacacaaacttactgcccaagataaaataaaaactgaataattaatgaaaaggaaattcagtgggtccatagcacagtaaattactcactttgttctcaattttccctaatggtgatttcgatagttgcataacatggagagagagaggttgtgatgggagttatcctgaatcagaagcaatgaatgtgtttgctcttccccatttcacctcagagaacctgagcagtctgaggacccggttcaaaaaaaaagtctgtgttgggatctgggtcatcttttccctagagcctctgcttcctggtcacccagcctcaaccttgcaatgtctgcctagtaataaaaataatggtgtttgcagtaatatttattgaaatattgttatatgctaaataccctatacagtgatccttcagtatgtatagggggttggttccaggaaccctccatggatactaaaattcacagatgcttgagtcccttatatgaaatggcatagtatttgcatataacctttgcacatcctcccatatattttaaatcatctctagattacttataatacccaaaacaatgtaaatgctatgtaagtagttgttacagtatattgtttagggaataatgacaggaaaaaagggcctgtacatatttagtgcagacataaccatccattttgcttcctcaagtattttctttctttctttcttttgtttattgagactgagtctagctctgttgcccaggctggagtgcagtggtacgatctcggctcattgcaccctctgcctctcaggtacaagtgattctcctgcctcagcctcctgagtagctgggattacaggcgtacgccaccatgcctggctaattttcataattttagtagagacagggtttcaccatgttggccaggctggtctcgaactcctgacctcaagtgatccgcccacctcggcctcccaaagtgctggaattacagacatgagccaccacgcccaggcttcttccgcaaatattttcagcccacagttgaatccacaggtgaatccacagttgaatccacaaatgtggcacccatggataaggagggctgactgtatgtattttcacttaagtcccccaacaacactttgatgtagtcttttgtttgtttgtttgtttacagataagagaactgagactaagagacagtaagtcggtatcaccccagctaggaaatggcagaggggcagttccagattccctgtgagctccctcccttctgtgtggaaggagctgacattctccgtgagttcttccagggagctttgattcccatgcctagtaaatgatctccccgacacccggaagagaagctttgtgttatttgagggaaaggaagaggcttcgaagaagagaggaagaagccacaggggaaatcatggaacgctctcaggctgaactagtttatgctatcgaatagttttttctcaagggcttgccttggtatcattgtactgaacaaatattagcagatcaaaaaaatgataacattgactttttttggtaaaatattacacaattgacagctccaaatatagctctccttatacttgagtgtggccacaagtaccagttgccaaacattttcaaaagtggactggaagcagaacagccttagtctttgtcattttctttctcctcccttccccaaaccattcagtttagtcatcttgttttacatgctgttggtcaagagctaggctgtcagcatcatcctatgacagctaagagttcttaactttctggtcatcaagtttttcctcttatcaatgcatctcttttccttcacgagacctcatttcccacaccaaggcatgaggtataagccagagttatgacccctgtcttgtcagtatgaggttctagaatatatgtgtgtattttaaagctcctcagaaaattatgatacaggtagcctggcgccagaatggtgtttgggacacccttattttttttttattaatgaggaaattgaggcccagagtgatgagtaacttgtcaagggccttccagttcctaatctaggctctggatgctgaaaataacccagatagaagccagaggaagcccatcggttcagcacaggccggcctcctggggcacagagcagcatgagaagggagggtgtgtgtctgccaggggtgcatggagaatactcagcccaacgtcttccatttccgctcattatcactcatcttccacagccttcagatctatcgttctaaatctgatcacatgatttttttttttttttcagacggagtcttgctctgtcacccaggctgcagtacagtggcatgatcttagtgcactgcaacctctgcctcctgggttcaagcaattctcgtgcctcagcctcccaagtagctgggattacaggcgtgtgccaccacacccggctaatttttgcatttttagtagaggcggggtttcatcatgttggccaggctggtctcgaactcctgacctcaagagatctgcctgcctcagcctcccaaagtgctgggataacaggtgtgagccactgcgcctagcctcacatgaaattctttatggtatcctgttgttctcaagatcagttctatctctctagctacatacaggttgagtatcccttatccaaactgcttgggttcagaagtgttttagattttatattttttcagattttggaatatttgccatatacttactggttgaacatccctgcttcaaaaatctgaaatccaaaatgctccaatgagcatttcctttgagcatcatgtgggtgctcagaaaatctcaaattttagaacatttcagattttcagattagggatgctcaacctatatgagtcccttccagacctggctccttgcctgttttactcccttcattttacccccacagccccctgccctggagccaaaccaaaccacttgctcctgcttgaacacacacagccttcacacctccatgccttgctagcagcagtccctccttcatgagctcatgcttcaggtgctcctgtatacctgggtctctccttcagagtccctgtcacccagtaatgatttgttcaatgtttacctagagactgcccatgagtaaagggactacacctatcttgtctggacctggataagagcagttttgattgggggcagctatgaggggagaaagaccaaaacctgattgagtgggtttaagagagaatggaaagagaactgcaaccagtgattagaggcaatattcagtaagtttcactgtaaaggggaatagggaaatggaataggatccaggtggggaagtggggtcaagagaggtttttaaattttgctttttaacataagagaagtaacagcatggctgtaggctgtgggaataatgtaagtatgtggggcggtgttgatgatacagacaggcagacaggaatttctgagtaatgtatgggtaggatgagtggatatgatgcacaagggaagggccagacttaaagagagagtggcttggccatgtgcagtcatgtagcgatcatagagtacccaggctcagatgctggatggtaggtagaggtggcggagcctggggaagttctgatattcttactgaaatcagaagcaaagttatcaggtgagtagggcagggaggtgtcaggggtgaggtgatcggagcaggtatgaggtcaatgtctaggagagagggaccgcatatggatcggggaaatataatatggttgctgggtaatagtaaagcccaattgaggttagtggtcatgattttaaagtgagaccaatcaacatggttgagtatttttctctggttgagttagttgcacagatgccagctgagaatacatggaaagacagacagacacaatccctgccctcctggagatgatgtttcagtaagggcagatagcactggaccagtaattccttatttaataacaacgtgacaattgctgtattggttaacacagagggcaacagagtatctaacaggagtgcctgtctgaagtgagccatgtatatactgaatgaagtcctggaacgatccaaaatcttgccttcttttttgtttgaattacaaactgtgtggtgcagtagcagagtagtaacaacgtatgctataattttgtgtttcttagtgatctgctatgactttcatgcttattgctatataagctgtaaatcaaccaggaaaagtagcagttgcccagtatgttacaaccgtgtaaatggacctaacccaaggcaggaaggacacttgaggaaaataagcaatatgtataaaaggcatgaaatgtatcctctctctctcctgttctatccccttgtcatttaatcttcctagatgtgggcagttgcttaaagattcatgctgtgggatgagagaacatatctttctgcagctcatatgcggcacagtagacgatggcttagtggagggaggtagatggcagagaggagctgccggttattgtaagtataatagaatttagaaggttttaatagtaagaagaaaccctttgcttctcagcttgcagtctccaacacccttgaaaatgttctgattttgaaagaattgttgaaatagtacctacgtggaaatcacctctgaatcttgaaccttgtatacccagacttttcaagggaagatgtaagatttaactgaggttctttgtggtgctattccatgagataagtagccgtagaggtccttgccctgtcactggcagccctttatcagacacacacacatgtgcgcatgcacacacatacacacacattcattctctctgtctctctgatctggctggtcagagaaacactcagggactctgggccagcagcatcagcacctgccacaagctctttagaaatacaagttgaggccaggtgtggtggctcacgcctgtaatcccagcacttttggaggccaaggcgggcagctcacaaggtcagaagttcgagactagcctggccaacatggtgaaacccagtctctactaaaaatacaaaaattagccaggcgtgatggcacacgcctgtaatcccagctactcaggaggctggggcaagagaatggcttgaacccgggaggcagaggttgcaataagccgagatcacgccattgcactccagcctgggcggagcctgggcgacagagcgagacttcatctcaaaaaaaaaaaataaaataaaaataaaatatatatatatatatatatatatatatatatatatatatatatatatatatatgttagttggtccctccccagacctattgagtcagaatctcttgggctggggtcctgcaactgcactttactaagatcccctgccttagattgtatcctggctctatcactgtcaagttttcttcatctataagatggagatcataatggcacctaccccctacacttgtggtgagtattaaatgagttactgtgtataaagtgcttaaagagggcctggcacatagaaagctctcagtcaatggtagctcttattattatagggcacatgaaaatgtgagaatcagtgatactattgatctcacaccatagtcctttgtttccagcttatttatgaaataatatcagaaataaattactcctgctcctagagctccccatgaaactagagaggtgcgaagaatcaaggacaggtgcagtcaaacccagagaatgaacaaggcttggtttcaagaagagctttcctaagaatttagcgattctctaccttgtcactattgacatgtttgacatttagggctggatttttttttttttttaagacaaggtcttactttatcacccaggctggagaacagtggtgagatcctggctcactgcagcctccacctcctgggcttaagtgatcttcctacctaagccccacaagtagctggaactacaggcacgtgctaccacgcttggctaactttttgtagatacagtgttttgccttgtcatccaggctggtctcaaattcctgagctcaggtaatccacctgccttggccttccaaagtgctgggattataggcatgagccaccgcgccatcctggatattctgtacataggcagcttccgtgcattgtgggatgctgagcagcatacctggcttccacccactagatgccagtaacacccttcaagttttgggttgcaacacccaataatgtctcaaaacattgccaaatgtagggggtcacagtggggaggggaggcaaaatctctgcctcctcatcagaaccacaagtttatagtgatgaaaagtgtgggtgtcttcagagtgggttatcgggggggggatcttttcagaaacagagcatggcattcatgcatggggcaataatatgtgccggtgcttactgcttgccaggcacggttccaattttgcatgcagtaccccttttaatctttacaacaaacccaggaggcaggtactattttccgtactttacacatgaagaaaccaagctttagagaaattgtcacagtgataagtgatttatcagggattcaatcccagggccattttagccatgatgctgtattgctgagcactacatatatgcacttctctctctctctctctgtctcgttttctctttgtcttgttttctctctctctcattttctctctccctctctccttctctctctctccctccctccctccctctctccctctccaacaatggggctataggcctttgcctatctatcttcagaacctgggaaggtctagagaggagaaacagtcactaattggccagagcccagaactgactttcaaaacacttgaactgactggaaaagcagacatcaaagtacagtgccttcttccatgttccccctcctcaacccaggggtcaccctctcccaagaagccttcaccctctgttggcttccccctcctctcctcagttctctggggaaaaacagctccccactgcacaccctgagccacagcccagcacccagatatcaaagactctgcagctgagagcctagggggcagctctcaccatcaaagggagctggtggggaggtggggcgggtggagtgtgaacaggactctgagttcacatgaaaggatgacattgtctcctgatccgagggtcactttgcatttactgaggccccatggagagtcagcatctggtggtgggttgcagagagcactgctctctggatcttatctctctgtttgtaaatcgagaaggtggggccacatggtgtctaagagagggtgtaccttatgaggcaggagtttctcagccctggttttgcatcagaatcatctgccgagagagagatgcctgctgtctggcccccatttctgatgcagtcagatgtttaagatctcaggtgactgtaatgcacagccagggtggagaaccactgcacttgcctgaaagagcttgaggttggactgatctggtgttggaattctggctttatcacttagaggtcccaaggcatttatttaatgtctctgggtctcagttttgcaaatctgtaaaatggaaatgatgatatctacctcataggagtaaaacaggaaaattaggtacattggtaaagtgacagcccagggcaggccgtcagtgagtcttcactcccttctcgctttctgttaggcagggatgttcctcacctgttgatggacacttggattatttctgccttctggctattgtgaataatactgctatgaacatggatatataagtatctgtttgagtcctatcactgctctcaattcttttgggtaaacatctagaagtggaattgctggaacaaatgataagtttatgtttgatgtttccttccatccatggatcctcttttccaacctgagggctttgcatctgtgagtccctctgcctgatcttgcctcctctggaccttgctcagttgacttcttatcttttaagtgttagcctaaattcttgtttcttctgcaaagccttctttggccccccaaactaaattatccactttttgatctctcttatattattctgttcatttgctctgtagcactttccatactttgtcattatatagcaagtaacttacttttcaaactcctgttaaactcccagttctgagctcagtggctggtacataatagcagctcaatgaaactgtctcataaagtctcataaactggcactcatgtttatgacaagccgaggctgaatgggatgcagaatgatggtgtaggtattacaggcaagggagtaacttggaagggcattaaggaaaaccagaattttgactttcagcttttgttttgagctggctaaaaggacctgattcattcaagttcctcctgctagaatgaactctgcttccagggcacaggcaatcagcaggggcatttagatgtgggctcttcctgccttagattgtaccctggctctatcactgtcaagttttcttcatctgtaagatggagatcataatggcacctaccccctacacttgtggtgagtattaaatgagttactatgtataaagtacttaaagagggcctggcacatagaaagctctcagtcaatattatttattaatgttcactctgatgctatagagatacagattataagcgagggttagagagctcggccaagtgcttccttctgtcgagcactcagggatggctcttgaagggggctgtccatctctttctctgatcaggtccaggattaagggagttttaacttttgctttttaacattcctctaggactgttctctgtcatatagtcaggagggggtcactacagtcattatcaaaacaatgtaccaaatagggaaatcaggacagataggaggttgtgccttccacacagaagccaaaggagctctggactctgtctcttcccatccctggctgctagatcttgggcttgtggtgcaagcatgggcaacaaggtacttctgccttggaatcctgggtggtcttgatagcttcaggcataggtgtagggtcaaacagaggctcttcttgacctctgtggaagattcaagggtccaagttatgacacatgtctggtggtggcaagtatctaggggtggtgatgcctgtgggagcatcctaggccaatggttggtttttgattgctttgttctgttttgggacgggtctattttattttacagtaagaaaatatatataataacaaaatccaatgggaattcagtaattgtttctttaaataatggatttttgagctataactcatactgtacaactcacctatttaatgtatacaagtcatttgtttttagtatatttgcagaattgtgcaactggccctaaaatacattttaaaacatttttattcatagaacccattagcagccactgccttcttcccctttcctccaccccctaccccatgcaacaccagcctgtttactttccctatagatgataaactattctacaatcaggatttaagatgtaccttccttccatgaatgaaaggttcctgcttatgttttgtattcaagttatctattgttgcataacaaattacccccaatttagtagtgtaaaacaaaacatatttattttcttacagtttttgtgggacaggagtccaggtacagcttagctggatcctctgccccaagatctcccacggggctgcagtgtgttggtcagggctacaatcttgcctgaaggctcaactgaggaaggatctgcttccaagctcactcatgtagttgttggtaggatttggttccttgagggctgttggactgggggcctcatttccttactggctgttggctggaggaatcctcaattctttgccacatgggcctccccaacatggcagcttgctttatcaaagccagctcaagagagaatctgctagcaaaacagaagtcacaatcttttgtaaactaatcatggaactgatattccctcaatattgctatattctcttggttagaagcaagttactaatagggaagagactacacaaggccatgcatgccagaaggtggggagcacatggaccatcttggaggtggcatagtagcctgtcctgcaggaccgtccgtgagttctctaggctgctccatatattttttaattcctgcttttgtttttgtttttggcttgagctaaccagaatcaatgactcttgtttgcatccagactgccatacttgtttgttgcttataattctgtcattttgtgattctggtttctattgatttagcacctttctctgtgaggtatgagctacttggtaaagtatttggcattacccattactccttttatctcctcaaagtcacaagttctttgtctgaatatttcattacctcagatgcagctagtaagcatccaactgaacacttgtttgaatatgagtctccacaaggatcatagaagagaaattaagaacagagaattagcactgtcaaaataggaaaactgaatcctgttaatgggacagcccatgaatccttacattcagcccaggctttttgtggtttttcctcatttgggtcatgaccagagggttggtttcctcccaagagcttcagcagaatttaagcgtcagaaatccagtgcaagctagattaagcaagaaaatgaagtctgttggctctggtaactaggacacactgtgcaggctcccaggatcaaaagaagaatgacagagctcctaggtcagcaaccagtggctcaaggcaggtttagctcttgtgggcatcttcattgtcttcatgtctcactttcttggcctcaagatttgctattgtaatcaggttttctcagcttggtaatatgtaatctttggtaaaccccagcttaggctttgagccagaagagggaaaaggattggctcaggtgtttattctcatgtctgggaagacagggcagtatactaggccagggccaggtcacatggccaaattccagttgttagaaggaccatgggaaaccgacagccactactgcacagtacaggcgctgctgtgaaccactgttggtgccatagggatagacagacaaccatgcaagtgatccctaaattattggagattcccaaaaggacaagacaatgtctgtggtaaaggtctgactgggaaatgtggattagagtgatccttttttagccaatgtttttcatggagtcttggaattaattttattgcacccaaggtccagcctactggcagaatagaatcacattgaatttttccattctagattttacttgttccctgactacttgctagttgaaaaaaaaaatgttaatagagataagaaggccagggatgacaaggaaaatgactgtccatttcatggactcatgaccaaggttaaattacaataacaaaggaggccagagctttttatttactgcagctttctgtgatttgtgggcagattgttgtttgtgttttgcttttaacctttcaagtaaggaatgatttgtcatgttcatgaaaaccacatgtattcagggaccgtttattcttagagttaagggtaaatcttgtttttagaaccaaataaatatagattgagatcaagatcagtcaaacacttctggaagatgtaatattgtgctctctttaaatatgtttattgataccaataatgggcactgccacttagaaatatgctcttcacataacactcaccctgtcatgtgtgccaattaagaggtgaggtagagctcaatctctgccctgccgagagtgtatgtgtgaaattgaattgcaaatgtacattgacatggttgtgactttgcatcaagactggcaagaaacattagcaaataaaagatttgctgtagggaaggatattcaaaggtcaaagtttgctgaagaaagttctctgcttatgcatggtactgggatgctacaaatcaataaaaaggctgcctcctctcaagttattgattcttcatgttgcagctttctcccctgacaccatttcacgtgtgtccctgttcaggagagaaaaagcatggggggtgtttgaaagctcagggaccattgttgacgttgtccctgcttgtgtcttgcagcctacttctgcttcctcctggccgctctgggtgtgacagctggtgcccatcgcttgtggagccacaggtcctaccgggccaagctgcctctgaggatatttctggctgtcgccaactccatggctttccaggtgaggatggagggtcctctctgtgttgggagacccagtgcagatggcagtatgggaggaggggaaagatgggctgacacccctccacccctgtcctagactcagtgttcaggccccaagcacgcccagtctgtcccaagtttttatctctttgtagcttttagatacagtaaaatgtcccctgggggggttttgtgccctaaggcatgctgaactactgaggggaaaggagactcctctatccagagcccatgctgtgaacataccctgaaagcctcaacatttgtccagccctaaccaggggccaagttctgtgataagcacactggtatgcatatagtatttgatccgcatagtagccctgtgagctagatgttacatgtgtcccattttacagatgaggagaatgaggttcagtgaggttaaagaacctgcccaaatcatatgcctaaaaagcagtacattcagggctaggcaaatgcaggccagcctgactccaagtcattgctcttacaacacctagtcccgaggttgccctgcgaggtcatggtggaaagactattccatctgaagtttgaagacgcagggattttactctgatgggtgctagctgtgaatcacttcctcaacttcagtttcttaatctgtaaaaataagaacaaaacttcattctcagggttgttataaaatcaatgaaaactgcagggagctataaaaatgtaagagacggtcatcactgcactaggattgggccatattctttaagactatcccagtcctagaccattccccacctccttgggtactttccttgggtacttttggtttggtcatggatctctgttttcccaattcctaatctgagtgagaacaacttgttttcaaaacttctgcccacattatgagtgtagatgattctgggccccgtgcattttcactcattgggaaggaatggtgattgcgaaaagtgctctagagtccagggagacgggtgacccaggagcttccctgtggccctcagacacacagctcatgtggccacctctgccatgggccttccactcctacgagacaacctgatgcggaatatttcactaagtgctcttgtagctcagaattcatttccttattttaggcatctcttacacagtttgacttttcataaggtaaataggatataacacaataggtcaattaggaaacacaattggtggtgtgtatatatactgcttgtaattcaagcacatcaggtattagtactgaggtcctaggaaataagctattaagcataagggagcagttggcagcttcctggttccatgttcatttgttcaccactggcagtgtgaactatgctgcactttattttgacttcagccatcttatttcagtgttgtgctttcaaaataataattgacttaggtcttagatgacgttgaggacctaacttgataattttcatttcttgtgttcaagcaatcctttctttatagcctccaatgacacactcatgtagttataaaacatttctattattggactttttttcaaagataaataacttgtagctgaagcctaaaactctgattttttttctcatgaaactacttgtttataactcaaaatttgaaaacctaagttttcttaacaaaacaccacataacagaatattagactgtgattttaaatttattttagggagaaagtacactgtagatggaagtacccaggtcctagaataaattctttgctctgccatttgctagatgtgagcctttctgcaagtatcagttcctttatctgcaaggggaggataataatatttgcctcacagagttgctaggaagataaaataatgaataaaaagtaccaagcttatagtagcaatcggtgaatattgttctccccttctcttttatgagaattgatatattgtttaattggtttctgtatgctaatgtctgtcatatagaaaacaattaatgattgttaggtaaataaaaaaataaatgaacagctttaaaatgtagttttagaaaccatcaaatttgaactatgcatactttttcaaggcccacatttgtagtggatttttaaaattcattcaacgaatacttattgagcacctactatgtggcagacactgagaaggcacagtgagaataacaatgagcaaagagtcacaagcttcgccttcatggagcttttctgtctagtaggatattagaatccccaaagtttcccagtggaaatttcagtgtttcatggacctggggttttataacaatgtcacttagacctaggtggaaggtacctctctaagatcagattagggccagtttccataacatgcagaactgtgtcagtgggagagaactagaacagaactagaactagtcagtgtctagaacaatttatttaaaccacttaaccctatgaggagaacaacctggggaaatgaaaaaatgctatgatctgccagtgtaggatggtgacttacaaccctgacttaatgcagtcattgatttagtttccctttgataatccatgggtttttaaagatagtttcaaagattctctctcttctctccttcaccggaatggtcatgccattggccaaaatggacaagtcatgccatagctgtctctgtttgggatcagcagggtttttgctagatgctacaaacaagaccttgagcattaagaacagtattcttaacgttgagacttaaacattttaaactccttttctttttcttctatagaagatgtatgtatggggctgagaggcaatagtaggaaaggtggagatacttttagtctaaaaaaatgatgatgggctgggcgtggtggctcatacctgtaatcccagcactttgggaggccgaggcgagtggatcacctgagatcaggagttcgagagcagcctggccaacatggcaaaaccccgtctctactaaaaatacgaaaattagctgggcatggtggtgcatgcctatagtcccagctatttgagaggctgagacaggagaatcacttgaattcgggaggcagaggttgcagtgagatgagatcacaccactgcactccagcctgggcgacagagtgagactccatctcacaaaaaaaaaaaaaaaaaaaaaaaaaaaagatgatgatggggcaggaatgcctgataaggagctataaaatcctctgtcccctctgaacctgaacgcttgtattcagcaaagatctcctgagttcctctatggtctatcctccttccttgccagtagggtgaagtcaacctaaagactgcttgcaacttccttataatttgctccaagtcaaagatggacccaggtgagagatgcctgttctccaagagttaagttttcacaaggaagagccaggattcagatttgtgctgtcacgctcatgcatctgcttctgctggctacatctgggtctctcacagacccagtccaaccaaaagcacctactagatgcttcagcccactccctcgtggctcatatttccttatcaagtcatggtaatgaggcattggattgagagctggaagagaactaaagggatttagcttaaattctcatattctacagaggagtaaacagagaataccagtgacttctcgaagttcacacagctaattagtggatagacagactgaaaccccactgtcctgattcaggccacccactggatattcttatgtgctgtcctacagcatgatttctaaacaacatagagtttagtcttttttttttttaatcctctctgacagtctgtcttttaattggtatatttagaccattcacacttaaagtaattattgatatagttggactaatatctaccaagttaccaattattgatatagttggatcaatatctaccaagtttctgttttccatttgctgctctttttcttactttttatttgtgtattctactctttttctatttttatgtggttttaatggaccattttgtataagtctattttctgtcctctcttaacatatgaattatacttctttttaaaaatttttatggattgccctagaatttgcaatatacatttacaactaatcgaaacccactttcaaataacactgtaccacttcataatagtacctgcagtagcacaaggaccttctaacagtgtattcccaatttctccctcctgtcttttacgacattgttgtcattcattttacgtatccataagctataatcactaaacaaattgttactattcttattttgaacaaattgttatgtgttagattaagaataagaataataaaagtttctattttaccttcacttatgtagatccaggtttctgatataatttttcttctctctgaagaactctttttaccattttttgcaaggcaagtatactggtgacaaattccctcaattttggtttgtctgagaatgtcttttttttttttttttttttttttttttttagagacagggtctcactccgtcacccaggctggagtgcagtggagcaatcatggctcactgcagccttgaactcctgggcttaagcgcccctcccacctcagcctccctagtagctaggactataggcacatagcaccacacccagcttgagaaagtccttatttctacttcattttcgaagagtaattttgctgagtacagaattctaggtgggtggatttttctctttcaacacttaaatattttatttcactctcttcttgcttgctggtttctgaagagaaacctggtataattcttctcctcactcctttataggtaaggagggattttttccactctggattctttcaagattttctctttgtctttgattttctgcagtttgaatatgatgatacctaagtattagctgggcatggtgtaaaccctaagtgtagggttttttggtatgtatcctgcttggagttttctgagtgtcctggatctatggtttggtgcttgtcattaattcggaaaattctcagccattattacttaaatattttctttttcttttttatcttttttgagatggagtcccactctgttgcacatgctgtaatgcagtggtgtgatctcgactcactgcaacctccgcctcccaggttcaagagattctcatgcctaagccacccgagtagctgggattacaggtgcgcgccaccaaacccagcttgtttttgcatttttagtaaagataaggtttcaccgtgttggtcaggctggtctcaaactcctggcctcaagtgatccacctgccttggccttccaaagtgctgggattgggccaggtgtggtggcccatgcctataatcccagcactttgggaggccgaggcaggcggattacgaggtcaagagatcgagaccatcctggccaacatggtgaaaccccgtgtctactaaaaatacaaaaattagccaggcgtggtggcgtgcacctgtagtcccagctacttgggaggctgaggcaggagaatcgcttgaacctgggacgtggaggttgcagtaagctgagattgtgccactgcacttcagcctggtgacagtgggagactccatctcaaaaaaataaaataaaataacaaagtgctgggattacaggcatgagacattgggccattgcactccagcctggggaacaaggctgaaactgtctcaaaaaaaaaaaaaaacaaaaaacaaaaaacaaaattagccaggcatggtggcgtgtgcctgtagtcccagctgcttgggaggctgagacatgagaatcgcttgaacctgggaggtggaggttgcagtgagttgagattgtgccactgcactccagcctgggtgacagagcgagtctctgtctcaaaaaaaaaaagtcattgataatgcccctacaaagtaggtactattattttcctcatttgataggcgagaaaacagaaaagtggttatgtaacctatccaaggacattcggatttatgtgacagaagaggggtttaaatgtaagcatctggactccagaagtcaccctcttactgctgtgctgtaatgcagtagtcctcagcctttatggcactagggaccagtttcatggaaggcaatttttccatagatggcagggtggggggatggttttaagatgattcaaatacataacattcatcattagattctcataccagtccgtggcccgggggttgcggacccctgctctagtgcctctcccagtgtccaaatgcacatttatcctttcattcagcaaacacatgtgttaagcattgttctaggcacaggagaacaagacagacaaggtccctgtcctcataacgtgtatattacagtaggagagacagcaaatgaacatgtgagcaaatgaacaaacaaatgtattcagagagagaaggatataaagaattaaacagagtaacatcacatagaggcccaagatggggcatctttacaaagtgtggtcagagaagaccttgctgaggaggtggcattagtgctgagacctgaaggagaggagggtagaggaagagcatccagagggaggagtcaaagcaaaaccaggaatgaggatgctgtgtccaaggagcagaaagatggccagcgtggctggtccatgtgagtgcaaggccagagtgggggatgggggccacatcagtgcaaggctctgtcaggcagagttcagatattgttctacatatcacaggaaggcactgccaggtcttaggcagggagtgacatggcctcatgcgtttccatggcttgagtaagcctcagaacacagtcaggagaccccaaagagtttgtgcctgtttcaggataatagaccatcccccaaggctgggtctctggggggtgtgcatgtcaaggagggagacttgtgtgcgaggcagcaccctcaagtacagctcatgctgttagcagcagcatgcagtggcggttgtgtagaagagaacaaaacaccagaactttagtgcagctcaggaatccttaaccttatgtggctctctgtgggttctaagtctcccttcagaaatcctgtttcagtgttgccacctttcctagccatgagcctaagcttcagatgcacaacttttcttctgcacatcagaaacaggtttgccttcttcctttcaagatgggtgggtgttgttggttttctcctccatgtaaacaggcagcagcagaagtggtcctgacccagatgccctgacagcttttcctggtgtgattttggaaggtgagatttgcacatcatgcctcacattatcttcttccacagcatttcaccatccagggcacatttggaacatttggaagtcatgagaaaagagcaaatagcttggtcgtctctaagcagtgaagacggtgatttatcaattcattaaagcattgtcattccatgcatgctgcattgtaaccccttccgttatgcggaatactccgacaaagtggtgcaggtgggaggtggcctagcaggtgagcgagagagcaagaaagagagagagaaaggaaaccaggaaactctccagaggctgctgcgtggggtacggcattttctttctgcacttacctggcaggattaattatactttctaccaacaaaaatgaacctattaaggtagaaaataaaatttccccacccctaagatgccttacttgcttatttgttggggatctaggtcagtgaaagtaggtgagatgagagaaatcatctaagaaaatgaacctcaaggggatgaaaatgtgacagtctgagcaagagggtaattagacagatgaacagaccaaccaacagggctagtctgtttctcacagcaccatctccagatacggtgggaactctttaatgcagatcttacctgctttgtacagtggatatatttctaaccactttaaggcgattagatttttgtaaaccaaaaaaaccgcaatactttaaagagtttttatttgaagaaatagttggtagagataatttttgtaaacaaataactatcagattttatgttaatttagcccggcatctgtattggaagaaagacactgttttgaaggtgaattccgcatgcagtcctgtcaattgggaatctatttggaaacatattttcaagctttgtgtttcatcctgtcttcttttcctaaagatctttagaagtgctgcacacagtgaacctccttaatcatgtattttctcgcaacctttctttttcttagaaccacagaaggttagagctgggatcacaggaggttagaattggggaaccttagaagccacgagtctaattcttttctaacagctgaataaactaaggcccaaatgtctgagcttattttgtttattttcccaaaccatctccaaaaatgtttatggacattgaagaagactgtattgcaatgcaattccttgacaagtcatttctccctgtacctgtcaccagccatgtgggatgagacagcacattgtcattgcatattctttattccattgctagcctgccagacactcttatgctgctgctttctaggtttcccaacccactgattatattgcattttggatgatttctcccccagctgccttcatttgcatttttctgaaatcaaatctcattgtgataatttctattcatatttctaacctctttggatccatctgtgttattcctctttcctcaatgatgtctgcagcacctcctaatttagtaccaatcagaaatgttattaacaaaatgtgtaagccttgttcccagacattaatgaagatacgaaatgaaacagatctaacagacacagtgaggccttctgttagtggcctcttccccacccctttattagatattgaattgtttttcatcattggtccttgtttatcaaagtccaggcttttcaatcatcctgttccaattcccattaatgccagccagcgctctcgtcacgggattatctcaggaatgctgcctcaatgccttatcacgctccaaagatacaatgtctacaggagtcattgaatcagcagttttaattaatgataatatttattgagtttcagatgccaaatggaaatttctagctttgcttttaaaaactctttcagaaggcagaagcatttgattatttttaccttcttccatttgaatatttcatagcttttcatgtaaatctgctgtttaattaccactacatttaaaagtgcataagccactatgtgcttatgaagaacacaagtaatatctaagaagtggcccttggatgaggagcttacaatctgatagagctggctagacttgtgtgcaataaagactcttataaaaagacaatgtggagttaaattgctcaaaagtgtcacactgacttttagggctgcagaaatttgaatatgggctaggatcattggacaaagcctactgcagaaggggagatttgagctgcacatgaagaggatttgtctaggcaaagaagaagaggagggtagggaaaacatctgagcaaaggtagggagagaggaatgattagaacatactgtataaggtcacagcatagttagaaaatcacccagattgaagaagtaagctgacagggtatagtgtgttacaaatctggctacccatgtgacatctcttattggatgtcctaacttaggcttcgcaaactcagcatgccccaaatcaaagttgtgactctaccttctcaccgaaactgttcttctgttcttctcctagctttcccaccagaagtctgggtatcatccatgatttctccatttccctagttatccctcaccaatttttaagccagtcccttcagttctatcactaaattacatcttgaatctgcacacttctcatttttaccaccttttagttcaagatcaacttttttcctaggctactgcaaaagcctcctgaactggtcttctgattcaatgcttgcccctctctatattgtagccagagagagcttattggaaattaaacgactctccagctaaataaataaataaatatttcagtggcttagcattgtatttggaatgaaatccaacctcactgttatgttctatggggccctgcgtgatcagggccttgcacaccagtcctctgtgtccaccccaagttggtgtacttcagtgtaattctgacactaaccacccggggttaacatcagatcccacaagttaaaggctgagtgctccacatggctgtccccacttcagacgcctgctgcaagggctgcagaacagtagtggggtccccaggctacctgtacttctgaatgaccagtgataagtttgggggtttccacaatctccttaggtttgataattcactagaacaacatgcagaactcaggaaagtcctatacttacgattacagttaacccttgaacagaatgggtttgaactgcgcagcttcacttaaatgcatggattttcttctgcctccaccacctctgagacagcaagatcagcccctcctcctctcagcctactcaatgcaaagaagacaaggatgaagacctttatgatgatccacttccacttaatgaatagtaaatatattttctcttcttatgattttctttttttttctggatctgcagagttattgattcaaagttgccacatggtgggggtacaaacattcgtcagtcactgtgcatgcaattggtgacattttaatttggaggcaattaccaccacagatatcttctttcattaaaaaataaaataaaattttcaaagcctcttacaggccaaaggtctaagaacaagatcctcactgaaatactcaagagttttcctgaggaaaactcaggaggtggaaacagctttgaacattttcccactggccacagcaaataatgctaaagtcataaagctttggcactgacagcgtcaacatctgcatgggaagtggcccctccgcccagcagaagggaacatgatgcctgtgggaaccgtgggcaagcatctgagaactccagggcctggagtcagcacagggctgctaagcacggtgtgggcttgtgttaaactgaaaaggtggggagtggggatttggagtgaccagtggttcccaccagtcagaggcagcagactcagaactgtgggacccaacatgcctgggtggacagtgtacagaggacggtggcagaggcgcctgcggctaggctgctgcccatgctctggaggttgcctcggacccaagagcccaggacagcagtagcagagtgtgagatgggccatcccagcagccagaccctgcatagggtgccacgcaccctgccctccgcattccctcttgtgactggaggccacctctgtatcctggacgatgggcatcaaagctgtgtccggccggtgtgtgcaatatccagagtaaaaggactcttcccaaatggagtcctcttcagggaggtggcagggctgtgtctatacagcctctgccctcagccccctcagccttcccatgcacccaggaggacctctgtgtccgtctgggggaccccagcactcagaaccagaggctctggctggaacacccctgagcttgctctggacaatgcccagccaggctcggacatgggcttgcctctcaccccaggggtgttccaacacagagccccttagaacataataatgaggttggatttcattccaaatatagtgctaagccactgatttatttatttatttatttattttgctgtagagtaatttccaataagctctctctggctacaatagagaggggcaagcattgaatcaggaagaccagttcaggaggcttttgcagtagcctagaaaaaagttgatcttgaactagaaaaggtggtaaaaatgagaagtgtgcagattcaagatataatttagtggtaggactgaagggattggcttaaacattggtgagggataattagggaaatagggacaggcaatgagagatgtcacaccagcatcttccaggaagaggccagcctagaagctaggcatccagaccccactgctgggcaaggtcaaaggcaccggagctgagtatcaggaggcactcattctgcagacccttgagatgccaactctggccagaaaacccagagcacaggtgccactgcatccctacaatcgggagcagagcaaacccggccctgccctctgtgcctacctcactggttagaagaggccacccccatccaaccagggtgtctgatcagggtcacactgagtccaaagtctctgctcccaggacttgcagggtctcctgatacctggtctcctcctcgcttccccagccccagcctcaaggcttgcctgggtccccctggcgcgtggatcctacttatccccagcttcagcctctccctcagggaagccagcttgtgggccaaggcagacctgagaggttggggccaggatttgaataagattggagaaggttcctgagggctgctgttcctcagcggactggagtttgccttctggtgtgtttatgaacacatctcaggttcaggctgggtggtttttgagaggaagtgggaaaagacacttgccttttccatcaccttaaaatcaccggggacccagcccttgagtgtgaaattcactgtggcaccccccagcagtggtgagccaagtgtcggcctggctgccctgagagccccacgcagccgctgatggagaacctgacacgggataccgcctctccgctcaggggctgcgatgcctgctcccgacgtagggagaacaggcgccagctggcagtcacacatctttttcctccgtggccagctcagaagtgctttggccatggtggggtgtgttgtgtggggtgctggcttctcagggtggtgggtgaagggcacccctgccccaggatggccaggtccaccagcacttgcagcaggcgcagaccaagaactgcatgggcagctttcagcaggaagtaggtggtcccgagggcactgcccttgtcctcatgagtgctctggatgctcatgtcctcaggacccatggcagtggttgcagtagagctggggcaggtccatcatggcgtcggtcagcatggccaggaagcccagagtctccacaaacaggccccaatcgatggacgagtcctgatctaacctaccatgccggcaaaggccaagacacactccacatagcccaggaaactgctccagtgccaggagtggtgaagatccaaggattttatgcttagctcctttgccatgtagatctcagggcagagtttcaccatcagcaacatggacaacatgattatgctctgctacaagagaggtgactcaaaatgccttccaaaccagaagaatgtctgtaaaatattaggcaccagtaacaccagacacacctagctagagaagccatcggtagtctgagtcctctggatgtgactgcactgcgggatctacagcaccacccctccaaagaccatggccccagcttccctttaggaaaccagctggtgcaagggcatcagaagcccatctaggtctctgcttctatccggaacatttgtgttgccctgttgggcagctgacacccacctctctaatcacatggctggtctttctggtgatctgctcccatcctgaggctatctaggggcccatgaaagtcacctctaggataagagttgtggaatttcctatcaggaaattccaagggtttttaaacctctgtgccaagaaccaggcacaaagaccagatatattctttattatagcataatgtgtcttagacctcatctcataccaggcttgtcctagcaccatgctacctacacaatggccttttcttagttcctcgattgttccaagtccttccctctacctgagacaattcccctctccctcccacacttccacctccaactcctctcaacctgaagatgacccagttaagaatggccttgctggccaggcgcagtggctcacagctgtaatcccaacacttggggaagccaaggcaggtggatcacctgaggtcaggagttggagaccagcctggccaacatgatgaaaccccgtctctactaaaaatacaaaaattagctgggtgtggtggtgagtgcctgtaatcccagctactcgggaggctgaggcaggaaaatcacttgaacctgggaggcagaggttgcagtgagccaagatcgcaccactgcactccagcttggatgacaagagtgagactccatctcaaaaacaaaacaaaacaaaacaaacaaacaaaaaaacaaatggtcttgcctatattaaggtcctcctttgttcagctcctttattggcttcacagctctaatcccagtctaaaattatttcgcttatgttgacttcatttactttatgtttagtatttgtctcctcgataaactataaactctttgaggacacagcctcaattgtcctgtttgttctttatcttctagtgtgtaccggtcagtaaatatcagtcaaattaaaggataaaatatgggaaagataagaatgagtccagtcaaagaaacctgtctgattttcaagaagaagaaaagtttagattttataagaaaagtaatacacagagattgtcaaataataagcaaaagaatgatagattttggggagtatgaatggaaagaggatgttaacagtatgccgaatgtattgtggagaggaaaattactataagtgggaggcagttagaaggttattacagcatccaagtaaattgataaaagcctgaacaagggtggtagagtagaaatggagtggaaggggaaaagctgagattataaagaagagtgcccatgaaatttttgtttttagctttcacttttattttgaaataattttttcagatcttttattttgaaacttagagaaaagttgcagaaaatcatgagcttgggtatagccttcacctagattcaccaactcttagagtactgctcatttgctttattcccttgctctttcctctgtacatgcatgtgcattcttacgtgttctttttttatgaatcatttgggagtaagttatagacatcatgcccctttattcccaaatacctcagtgtgtatttcctaataacaaagacactttcacatagacagaatacacttaccaaagtcagggatttaatgttgtatccaggattctataatagttcagggtccaattgaggattatgcattacaatgagttataatgtctctttagattccattcatctggaatagttccttgtttttttaattttatgccatcaatatttttgaaatgtactggccaattaagttgtagaatgttcctccatttgggtttgctcatgttacttcataattagactcaaactctgcatttttggtgggagtactacattagcattcttgtgtcctcctcagcattgaaaaagaggcacatgacatcactttgtcacattattagaggtatgaactttgatcatttggttaaggtggcatctgctaagtttctccactgtaaaattgctatttttattttgtaattattgaattaatttatgcaaagattatgagcctatatgaatattttatcttcatcaaacttttacccaatagttttagcaaacattggggattcttgcctgactcagttattgccatgacagctgcaaaatggtgattttgtaactctattatttcttctacatttgtcaattggtattttactgtaaagaaaagtttgctttttccaatgtatttatagcccatggactgttttttgattacatggattataatccattactgtcattattcattttaatgaccaaattaccccagtttgttcagtgggaggcactacaaatgcctctttttttttagtatttagaaaaaactctttctttttagtgtggtgtcttgctgtgttgcccaggctggtcttgaaatcctcagcctcctgagtagctgggattacagatgcacaccaccacacgtggctcctctgtcatttcgacatgccccatcattttttaagcacttcctttccggcacaacaaaatatactgagctccccgtgtacttttcctaccccagtcctggcaccagccatttctccacactcctgattccttttagtggagaatggtattttaaaaacaagttgtgggaactaaatatgttcattgctattgggttatcattgttttctaggccctttcttccccctcaatttttaactcatggaataaaggagatctagttcaggagactagaataatggtcacatcactgaccaaaaaccctccaaagcccaaattggaaagatttccagaagaccaacttatttgccaagatgactgtctatgccattttaaaagtatgtgttaaatatgtggttttttaaaagtgaaaagtcttatttgaatacattctcgttgttaagagatttaaacaaaagagtaatagaagaaaatatgaaacatttctttcctttttttcaaactttaagttttattggcactttttaaactactaaggttgacttttcaacacttacccagcttctaagacctatgtagaccaagtgccacatgaaggcaaggcagcaggtggcaacttgtcctctcaaagccacaatttgccaggtggtgtggactgctgccaggccactcttggggactttctgggatattcttacagattagcctattatctggagagaaataagtactgaccccgtatcaacaatggggaaagcacccaacattgtttttcactgtttgaattggcgtctgaactggaggagattaagtttagaccccagagacagagataaagtctatctctagtaagccttacagtttctaaggagtggagccaccagtatctttttctatttgaccctcttgatagaacagctcctttcccagaaaggatgccattcagacacacacacacaccacacgcacgcacacgcacatgcacatgtacatgcatgcatgcacacgcatattttctactctaaaacctgcctgttcaagctgacatgttgacatgttggtcctggtttctttttcactactgactggaaacaaagatgtgttatgaatacaagtggaattccctttggctatgttttgagactgcttgggaagttttttgttctggaactttaaacagccacaaaattgaattaagggatagcaaaaccatcttggtgtctggttgggagcaagcaactgtttccagctaggctaggggaaaaccaatcaatgattctggtttcagatctgctgaatgggacaagctaaatgctgtttacatttagccttcatcttgctaaccagtggaaattatgtgggccttaatagacagtgtcctctgttgccatttagatgactagattcgagaatttattttgaacataaaaggaagctggggagtagttctgaaggagcaggttgcttcatacctcttttcggtggactcttgagattgatgacctttgctcaagtcccagataacactcaaaggctgcgcgtgggagaaaaatcacctcatggtcaatttcagtttctacagtttcagtggagaccccacttaggtatgttatcaatcatggatagtgaagtaatggaggcacaaaatacagaatgggttcaagcgagggcactgccacaccacttgacgtgtgattggttgattagttgctaacgagaataaagatagaagaaggatgacataaaggtgtattaacagactggattgccagatgaatcttaactgcttcatcgaggagaagctgggttgttttcattcaggaatatagaaatgttttcaaaaataacttgtttctcctgtattacaaaagaataatctgtttattataaaaatttacaaaacacagacaaaataaaaaagagtcacccacagtcccaattcctagagagaaccactgcaaacagtttggctaagatacttcttttgtttttcccatgcttaaacttatattttttattaaaaatggattcatagtgttttgagaagtacttttcttctttctttctttcttttctttctttctttcttttttttttttttttcttgtaacaaggtcttactctgttgcccaggctggagtgcagtgacacaatctcagctccctgcaacctaagcctcccaggttcaagcgattctcctgcctcagccacccgagtagctgggattacaggtgcccaccaccatgcccagctaatttttgtacctttagtagagacagggtttcaccatattggccaggctggtctcaaactcctgatctcaagtgatcctcctgccttggcctcccaaagtgctaggattacaggtgtgagccaccctgcccggcgaagaagtacttttcttttaactacttttaccttcatctttctaggtcaatactacaatagcctttttttgttaattagtttttaatacaacactagtagaattctttctaataatttcagagtataggatcaagcataaaagtatttctcctcattcctacctcccaatttcattcccatgaggtaacactaaggctttttctcttactatttctttcatgtatatataagcttttattgtatatgtatacacacacaagtactatttaattaatttatcacaaaatatttaatcaaatcctgttatggggaaatgcagggtctttccaagtttttattgcagttagcatccttgtggttaaatctctgaacacaaccatgatttccttaagataaactccagaaaatgaattgttagatgaaaatatatgcacaattttagggtttttgatatgtagtgctcatttgcccttcacacactttctgcccatttcacattctcaccagtaggcagcattgaattcttaattcttcaaacttttaaatttgaagtataatgcacacattgaaaagcgtacaagtggctgggtgcagtggctcatgcctgtaatgccagcactttgggagactgaagcaggaggatcccttgagcccagaagtttaagaccagcctgggtaacatagtgagaccccatccctacaaataataaaaaaattagctgggcatagtggcatgtgcctgtggtcccagctactggggaggctgagatgggagaatcgcttgagcccaggtagttgaggctgtagtgagccataatcacaccactgcactccagcctgggtgacagagagagaccctgtctcaaaaaaaaaaaaagtgcataagccatgagttagacttgcactgctcaatgtggtagtcactagctacgtgtggctactgagcacttgaaatgcggcaagcccctggaggtgtgctacaagtgaaaaatctctaagacttggtacggaaaaaaaataatgtacagcatctcaataatttttatactgattatacattgaaatgataatatttgggtatgttacactaagtaaaatatattattaaaattaattttacttgtttcttttcactttttttgtttttagtttttttttttgtttgttttgttttttgagacagagtcttgctctgtcacccaggctggagtgcagtggtgtgatctcgctcactgcaatgtctgccttccaggttcaggtgattctcatgcctcagtctcccgagtagctggtattacagccgcgtaccaccatgcccggctaatttttgtatttttagtcgagatggggtttcactatgttggccaggctggtctcgaactcccgtcctcaggtggttcgcccacctcggcctctcaaagtgctgggattacaggcatgagccaccgtgcccagcctcttttcaccttttattttattaattttttctgtagcccaagttcaatcaagggtcatttcactttttagatgtggctactaagaaaatattagttatattatgtggcttgagttatatttctattgcaaagtaggactatagtatggcgtctctgctaatgaagcctaccacctgagctctacactccggatttgttctgttcctactcctctctcgctcgcccacctacctgtgcctcatttatgcccagcgttcttagaactaatgtagctcccttcagtattccaattttttatcaggaataatcaattaacatgtggtgagagtgcacttttaatggattgcagagtaagactgtgatctactggaacctacaattcagtataaactctaagttgcaaatttaatacaataatttggtaattgatttgtttgaatgtttaagtatctaagcttcaggaattactgctgagttcaacatcatgtccctaccagaatatgtacatggaacatgaacagacagattacccatacttgacagtcagttcatgatgggcatttgtcatctctgtatgcctcaatattgtttttgtttcccgtgcagcaaaggtgatggagtggcacacatagttttagacaagagctatcagcaccatgcaaacactaagaggaagagagattatcaggataccgctgggggtatggcttccagtacagttgatctccattcactccccgcctcccaaggttgagatggttgggccatctctccctcctcattaatcctcagctttcccctcttcttgttgctaaagcacatactgactgtaccaaaatgagctctaggtacccaaaccttttcaacacaaatgctattcacaggtaggttctttcccctacccacccactcccaatcactccagagcagacaaaagtgcaggtaagtagggaagaaaggtgattgattgggtgaacatataaatcttgctccctttctgctctattgttgatgcacatcttgttctttaatttctttttttaatttatttattaccaagttcccaagaactacaaaacacatcttattctttgagtcatttttcactggactcagctttacacttgaaaacaaaacaataacaaaggattaaaaaatacatcttaaagtatttttggcttcattatgtgcttgattatttggaatgtgcttcattccactgttatacttgcttcattccactattgcagtcaggtagcttctgttggaaaggtatccaggtgaaaggaatgaaaataaatatctctgtttgaacttttcttcatcatgatgggtcttttcattgttgttgtattataattaattttgtgagaataatgtttctagctatttgaaactcttcacttagagtttctacaagattgcatggcattgaattaaacagccatgtattagttcattatcacattgccataaataactacctgagactgggtaatctataaagaaaagaggtttaattgactcacagttctgcgtggctggggagggctcaggaaacttccaatcacggtggaaggtgaaggagaagcaagctatgtcttactatggtagagcaagagagagagcaaaggggaaactgccacacacttttaaaccatcagatctcgtgagaactcactcaatatcatgagaacagcatggaggaaactgaccctatgatccaatcacctcccaccaggtccttccctcaacacatggggattacagttacagatgagatttgggtggggacacagtgccaaaccatatcaagccaatataaccttttaacaagatgaaagaaagttttccataaaagatccctccctgcaacatttggagagtaagggaaatattttgttgatggaaatgtgaactgagaaccaaggaaatgccatcttagttctattatgttttgatttgttggatgaacttatataaatgtcctctaagctttaattttgccatctgtgaatgggggacagagtgttctttctatgtcgtgttcacatgggcactacaataaaagcaataaactaatgcaaaaggaagaaattatttcttagaccacagcagtcttgattgacatttgaaattattttacacctccaaattctgtgattctaaataataaaatgttttcactctgtccaaccaccatgtttaaatacactgtaaaatctaaagacctctttcatattacagtaagccaggctataatttttgatatacataaaccgccatgctcctgttttctctctttatattcaaagctgaacatatgcttgtcggaactttctgcctcctttttctctcccccaaaacccaaggattaggtggatttttaaaattttcgaccagcctggccaacgtggtgaaatcccatctccactaaaaatagaaaaattagctggatttgttggcgcacatttataatcccacctattcgggaggctgagacaggagaattgcatgaacccaggaggcggaggtttcagggaccgaagatcacaccactgtactccagcctgggcgacagagcaagagtccgtctcaaaaagaaaaacaaaaaattagctgggcatggtggcatacacctgtagtcccagctacttgggagactgaggtgggaggatcacttgagcccagacggtcaaggctacagagagctatgtgattgcaccactgtactctagcctgggcaatagagcaagactgtctcaaaaaacaaacaaaaacaaaacaatttcttcccttctcatcagaaggatgaagccaatctctatgaaatggtagactcctaatgagaacattacccagtattgaatattatggtataaaatattattactattgtcataatcagaaaaggctaatgtaatataatacttaaatttatttttattttcagattttcctatcaaaagcactgcttcccaatttaattcatcttctcaaagttttgaaagcatcatcagatttaaaaaaaaattagtgtaaaaaaacgtctgtagatctcactgactcattgctatagctaaggtctcattaattgtaacagtgaatgccatcaattcttggcccctgatagctcagcccctgacaccctcccgtgtctcccattatgagaagtccaatagggtgtgctccccacatgcactgagccctacttcagctctgtgggctgggcagactctgctggactctgctgcctgtccttctaggggcaccagagtctgtctcagggctccagtgagtgctgccctgttcctcagccactgctgcctctccacttggtggattgccaatacaccaggttcccaaggagccaaagttgtcccccttctgtttctgttacactctgttagagcagtcctaaaatgatgccactggtgccttggtattttgcagagatttggggaagtagccatttgggtttttttaatctgctggcttcctgatctctgtgagtcacacatgaagaacaccaaagtgaggagagaggcagagacatctgggccaagaaccggcaccattcctactcaggactgcccctctcttatgacaaccaagatttcatcctaagaacatctctccctcattttttttaacttttaagttcagaggtacatgtgcaggttagttacataggtaaacgtgtcatgggggtgtgtgtacagattatttcatcacccaggtattacacctagtacccattggatatttttcctgatcttctccctcctcccaccctccacccttgatagccccaggatgttttgttcccctatgtgtccatgtgttctcatcatttagctcccacttgtgaggacagtggtattcggattactgttcctgcattagtttgctaaggataatgacccccagctccatccatgtccctgcaaagatctggacagaactaccattcaacccaacaatgccattactgggtatatgcctgaaggaatataaatcattctattataaaaacacaggcacatgtatgttcactgcagcactattcacaatagcaacatggaatcatcctaagtgtccatcagtgatagactggataaagaaaatgtggtatgtttacaccatggaatacggtgcagccacaaaaaagatctcttttttcttgacataaatgatctaggagacttcagtcgcccccaccagagctttccttcaggtctctgcactaattcacccaacaagcctgaacttcctgcagtgggtacgtcccacacgtaagctgagatccctgctaagtgaagatttactcttgttctgatgaaaaccactccagaccacaggggattgaacttgaggttgagggactgtgggttgaagacaggaggaaagtgaaaccagcagtgaggactggtgggggaggggaggctgggaagcttcccaggaggatgctcggcggtgcggttcctctcttcactcaggctctcattctctctgcagaatgacatcttcgagtggtccagggaccaccgagcccaccacaagtactcagagacggatgctgacccccacaatgcccgccggggcttcttcttctcccatattgggtggctgtttgttcgcaagcatcgagatgttattgagaaggggagaaagcttgacgtcactgacctgcttgctgatcctgtggtccggatccagagaaagtaagtgaatgggcatgacggagagctgtccctcaggggccaggacatagaaacagcacaatgaggtggactcataaccccatagcgttcttctcaagcatttgccctaacaattttgccatatttataagatttatctctatttattaatttccttttgctcattaaattttgcccattggcacatttgttttgagttataagtttcatttgtaatggatttcctttaagcccagtgtcattatcttcaaactaatcttgcatggctgatttcatggaatctgtttctgtgtttccccactgccccattcatgattctctggagtagcagaaggggggctggcttcattttagtgacacacttgactctacttgactccaaaaggactgaactctctccaggtatcctactgtgtcctgaaattctcttgtagtgaaacctctgccctgcccatcactcatggaaacgttacactagtaggtttctgtgcagagaaaatgagaccattcaacagaaggcctcaaagcactcatatgccctgatggtgtcggctgagcatacccagtcggccagcatttgcaggatgaaactgctttctataagcacatgaagaaagagtgcctacaattgtgctggcaagtagagagcgacctttgttcttgggttggtctgggtctgcaaaatttggctgtgatgagcttgtagcacctaaagcaatagatttatgtgcaaagatgggcaacatatggaccatgctccagttagagccttgagacagcatgttgaataagtggttactagtgaccatctccactgatgggtaggagtcatctgaggacttacctaaacagaatctccttttcagactgaaaatggacatggaggctatgcctttgttcaacacaagaatctttgcatgaaaggaaggatggcttaggactgtgctctttccccccaaagcctctccttttacgctgaggggagcagtagagcatagtgagaaactggcagaccctggagacagactgctggaatcaaagtctctgactcctccacttactagcaaatgaatcaaccactctaagtctcagcttcatctataaaatgggagtaacagtaatacctatctcctacagcttttatgaagatatttttaaaatgcatggaaaatgcctggcacatagtaagagcttcgtgaatgtcagccattattattattacacaggcagttgatagactagagaattctctgtttccatcactgctttctgttggtttcactgtagggttttctctgtacatctcaatacagctcttttaggtgaaaacacccggtatcaattcagctcttttaggtgaaaatacccagtatcaagttttatagcagaaaataacaagatgttttctttctttctttccttccttctttctttctttccttccttctttctttctttctttctttctttctttctttctttcttttctttctttttttttttttttggagatggagtctcactctgtcgcccaggctgcagtgcagtggcgtgatctcggctcactgcaacctctgcctcctgagttcaagcgattctcctgctgcaggctcccgagtagctgggactacaggcatgcaccaccacgcccggctaatttttgtattttttagtagagacagggtttcaccatattggccaggctggtcttgaactcctgacctcaagtgatcctcctcggcctcccaaagtgctgggattacaggcatgagccactgcgcccagccaacaagatattttcaattaataattcaatgatttattgacgttgattttcactatgagtgtaaaatgttgaaggtcattagagaaaaagatgaaaaattcagagaagtagaaagaaaatcattcacagtcttaacagataaacagacactattaatattcagtagtatctctttctatttcatatattttgcatgatggcagtcgtatcgcatatgtaattttatgtctcaccctttacctcagattgtattgtagacaccattgtcaaaggctgcagaagattccatcagttgagcatgtcatagtttatttaaccatcattctgtggtcagctatgtatgtcatttccaattctgtgatacaaatgatgttgctatataattaataatactttgggacaatcagaccttagattaatttgaagagttcagatgagaaggcaaaagattttctgttttattaatgagaaatgagccgggtataatagtctgggtttctctgaccataaaaatggaagattttttttcatcttttctcataaaaaaatgttgtagtctgattcattatgtgtgtattggcggcacatatgtctaaagactatttctaaatgcaggaagaagaacaaagactatttcagcaagttccctgaatagtcatctgagaacatctttcatcaccagtccagtaactaaaggaggctgtggctatcagaaaccattcattcatatcatcatgtcacatgtatcattgagctcctgctgggaatcagtgctgaggatacagcttaaaattgacctcctctcagaactatagtttagaacacgttctaaactatagaggtcacccctagttgcctggtctagccccagaatgattaaggtagaggaatactgctctttgagagtacaggccaaacaggagagagatggctctggatcatgtagtttgcatgttaaaggcatgctcctggctgggccctttattatctctaagaattgcctaggcccaggaaagccaggctctccccaagcagaaaggcttttaagatgccagaacatcctaatatgtgagtgtgtgtttgtgtaatacatcctatgagcaaactagtaaaacgtagatagaggaagccagaagtacatgcatcttagattattcactcaatgttcttgtgattatactttactgtttgaaagaggctacagctgtcttcagatgtgtgggtgagcactgaagtcctgtggtaattatacagcatagagaacatagagatccgtaatccaaaataaggcttagaatcactgaactaaatgaagcaagtttccaacatacacagaggcagtcaactgttcagatattttcatgttcgtgaagctggctttaccggtcctgccagttagacggtggagaggagagtcctcacaggaatcaaagtcattatatgtggggataggagctgaaggggtggatcttggtgtcaggcaccgtcacagcagatctcagttcatgctaccctgggctgcatggagagcttcctgagtaacagaagaaggtgcccagctgcatttggggcccagacttgggtcatttcagtggcacacttctcatgggctgaatctccacctgctcttgtatgactttcctagaggaacagtccctattccagttggaggcaatcagaattcacagctgactccaccacactcccagggtgcaatgtttgtgcagatcaatcagctaagtgcctcttggagagtttactcaaacaggtgatagagactgaggatttagagactcctccttcagtccactcaggacactaacacagatattgcagttgattgataaacttttgctgagccattctaataacaacttactaaagaaaagcttggcagagaggcttaatcagctttccattttacagtctcatggaagagagaaggtaggagcaggaaagcaacacatttcaagctatacttccagaccctaaaagataatcttacgaaggctgtcataacaagtagttaactggactaaaccacattttgctgcactgtcaatgtgtaaattgtgtaaaggcagccattaggaggtgcaagggagagaagccagtggtattgcctttaggctctggcaactagggcccctgtcctaggtcttatgacttaaagggccacacttctctccacaaagtgaggagatcacagggccaaaggaacatggcacctgcctaaatcttccttgacttctgggccaggccctggattcctagggtcctagattcctccctaaatgctctgagctctcttctagagcctatagcagtctcctcctgggatctgttctcccaacaggaaatacatagagcctaggcctgaagagtggccaaggggcagtgttagcacagggacttaagttttaaagtgtgaggtcagatatccacctaatgggacagagcaaaaggggaaaaggaaaaggggtgaaccacaggctagggacttccacctatactcctagcttgaaacctgcaaatgttggggtgaacctatccgtgagccattcataaggttgagcgtggatccatcaagaattgtgtttggcttaaacaagacagaaggttatttctcttatatataaaagaattctggagacaggcagtccagggaggacatggcagcactgcagggtcagtagagaactgggattcctttatcgttctgctctaccatcctcagcaggggactttcattctcagtgtcatttcatggtgcaaactgatcactaaatctccaaccagaaggggaatcagggaggctgaagggagcacattgctgagttgagtcggtcgcctttaaggagtcttcctagaagatacaacctatccacttgtctctcattgaccatatctgtacccagggaaacagggaaatgtattctcatggttaatgcgttggacccttgaataaaatcttggttttgtttctaaggaaggaagggtgaatcgatatggggtaaacaattagcagtctctgccatagccacacagttgttctgccttaagcagagcgatttgtcatctcatattcctcagtcttattttttgtgaaccaagtgggtagcctctctgtctccattaatgaacagaaactggaatctcaaatcatctttctcagatgacaaaatgaagataaaatccagagactgtttctcctaatgctttgcttattccattgagtcccattttagggaagacattcctctagaggttacatgtaaatgctgtcatgcatttttaaagtagacagggaggatgctagtccagacacataaaaacaaggtccttgccttattgccatggtgatgagataaactgaaagaaaatggatggaatggttcaaaagagcaaatcagttctgttctggtgccttgggaagagatcaaaatgtataaatattgccattccaggaagaaaggcactcaaacatctagaatatttttgaggcctgtttcacctcaattcatcccctagtctgttatctctagtcttctctcccacctcccaagaatgagcatcacatttctcagtgataccctcttttttgttgtttttaaaggctcattattttaaagagcagttttaggttcaatttagcaaaattgagaggaaggttcagagataccccatgtacctcctgcccacacacatgcatagcctctcccattatcagcattccttaccagagtgaatatttgttacatttgttgaacctacattgacacgtcactgtcacccaaagtccatagtttccatcaggattcatgttggtgttgtatagtccatgggtttggacaaatatataatgacaaatgtatccactattgtagtatcttacagagtattttcactgcctaaaaatcctctgttctctgtctgttcatcgctctcttcccccaagccctgacaaccactgatctttccactatctctatagttttgctttttccagaatgtcgtatagttagaatcatactgtatgtagccttctcagattggcttctttcacttagcaatatctatttgtgcttcctccatgtcttttcatgacttcatagctcatttctttttcgtgctgaataatgaccaaaatgtggtccagatctattgaagtttatttatccattcacccagtggaggacatcttggttgcttcccagtttggtaataataaagctagagtaaacattcatgtgcgggtttttgtgcggacataggttttcaactcctttgggtaaataccaaggagcacagttgtgggattgtacaatcacaatatttttagttttgtaagaaacagccaaactgtcttccaaagtggctgtatcgttttgcattcccaacagcaacgaataagaatttctgttgctccaaaatcttgccaacatttgttgttgtctatgttctggattttggccattctaactaatatgcagtggtatctcaatgttgttttagtttgtatttccctgatgagataagcttattgttccatctatatattttctttagtaagatgtttgtcaagatctttggtccatttttaaatcaggttgctttcttcttgtgaagttttcagagttcttcatatattttggataacagtcctttatcagatatgtcttttgcaaatattttattcctgtctgtggcttgtccttttattctcttgacagtatcttttgcaaagtagaaattttaaattttaatgatgtccagcttatcaattctttctctcatgaatcatgccctttgatgtcatatataaattgtcaaacccagagtcatctacattttctatgttatcttctagaagttttgtagttttgtgttttacatttagaattgtgatccattttgagtcactttttgtgaggtgtgtgaagtctgtgtctgaattcattttttcgcatgcaaatgtccagttgttccagcataatttgttaaaaagactaccttttctctattgtattccctttgttcctttgtcaaagatcagttgactatatttatgtgggtctatttctaggctctctgttatgattcattgatcaattagtctgttcttgtgccagtaccacactgtcttgattactttagctttatagtaagtcctgaagtcaagtagtgcactcttccaactttgttcttcttcttcaatattgtgttggctattctgagtcatttgcctccacgtataaaccttgcaatcagtttgtcaatatctacaaaataacttgctgggattttgattggaattgcattgaatatagatccagttgagaaaagcagacattgacaatattgagtcttcctatttatgagcatgggataactcttcatctatttagttcttctttgatttctttcatcagtgttttatgatcttcctcataccgatcttgtacatgttttgttagatttatacttctttcatttttatggtgctaatgtaaatggtattgtgtttttaatttcaaatgccacttgtgctggtatgtgggaaagcaaattgactattgtatattaaccttgtatctggcaaccttgttgtaatagcttattagttacaggaatggttttttattttcaattctttcagatcttctacaaagacaacacatcatctacaaacaaagacaattttatttcttccttcccaatcgatatatcttttacttccttatcttattgcattaggtaggacttccatataatgtcaaaagggagtgataagagggtacatccttgcctttttcctcatcttagaggaaaagtatatagtctctcacctttatgacattagctgtatattttttgtaaatattctttatcattgagaatttactgagagattttatcatgaatgggtgttgcattttgtcagatgcttttcctgcatctattgatatggtcatgtgatttttcttctttagcctgtaatgtggtagattacattaattgactttcaaattttgaaccagccttgcatacctagtataaatcctacttagttggagtatataattctttttatacattgttggatttaatttactaacattttgttgaagatttttagcatctggctcatgaaaaatattggtttgttgttttcttataatatctttgtcttgtttgagtattatggtgatacctcatagaatgaattaagaagtattccctctgcttttattttctaaaaaagaaattctctcttttagaaattataccagttatcatagagaattaaatatatggtcgaattcaccaaaatagaaccatcttggcctggttctattttgcaagggtattaattattgattcaatacacttaataaatataggcctatttagattgtctattttttcttgttttggtagattgtgcctttcaatgatttggtccatttcatctaggttatcaattttgtgggcacagagttgttcatagtatttctttattatccttttaatatccatgggatctgtaggggtgtcccctctttgacttatgatattagtaatttgtgccctacctcttttttcttagtctggctagaggcttatcaattttattaattgattcaaagaaccagcttttggtttcatttatttttaaaattgatttcctgttcataatttcatttctctctgctctaatttttattatttattttcttcttcttactttggatttaatttgctcttctttttttagtttcctaagatggaagcttagttaattgattttagatatttttttcctaacatatgtagtcatgctgtaaattttcctctaagcactgcttttatggcatcccacaaattttgataagttttgttcttattttaattcagtttaaaatattcttaaatgtctcttgagatttttttcttggcccatgtgttatttagaagtatgttgtttgatttccatgtattttggggttttccagttgtctttttttgtttgtttgtttgagacagagtctcgctctgttacccaggctggagtgcagtggtgcaatctcagcccactgcaacctctgcctcctgggttcaagtgatcctcctcctgcctcagcttcctgagtagcagggattacaggagcacaccaccacgcatggctcacttttgtgtttttagtagagacagggtttcaccatgttgtctaggctggtttcgaactcctgatttcaggtgatccatccaccttggcctcccaaagtgctgggataacaggtgtgagccactgtgcctggcctccagttgtcttttattattgatttctgatttaattccattgtggtctgagagcaaacattgtataatttctattcttttaaatttgttaaggtgttttttatggctcagaatgtgctctattttggtgaatgttctatgtgagcttgagaagaatgcatattctgctattgctggatgaagtagcctgtagatgtcaattatatcctgtggattgatggtgttgttgaatttaactatgtctttactgattttctacctgctggatctgtttgtttctgatagtgggctgttcacatctccaattataattatggattcatctatgactccttgcagttttatcagtttttgcttcacatattttgacactctgtagttaggtgcatacacattaaggatcattatgtcttcttggagaattaacccctatatcgttacgtaatgtctctctatccctgataacttttcttgttttgaagtctgctctgtctgaaattaatataggtactcctaccttcttttgattattataagaatggtatatctttctccattcgtttagttttaatctataagtgtctttatatttaaagtgggtcagtttcttgtagacaacatatagttgggtcttgttttttgatccactctgatagtctctgtcttttaatggatgcatttagaccattgatggtcaaagtttttattgatggaaataaattgatatttccatccaattgatatttgccatatcaattgatatggaattgatgtttgccatatcaattgatatggaattgatatttgccatgtcaattgatatggaattgatatttgccatatcaattgacatggaattgatatttgccatatcaattgatatggaattgatatttgccatatcaattgatatggaattgatatttgccatatcaattgatatggaattgatatggaattgatattccatatcaattgatatttaccatatttgttactattccatccaattgatatttaccatatttgttactattttctatttgttgcaatttttcttttttctatttttgtcttttattctttttctgccttttgtggttttatttgagcatttcttctcattgatttttagttttggaagtttctattcatatttcgtcaaactcagagattctttcctcaaccatgtccagtctacttataagcctatcaaaggcatttttcacttctgttacagcattttttatctctatcatttctttgtggttctgtcttaggattttcatctctctgcttatattgcctgtgtgttcttgcatgctacctactgtgtctgttacagcccttagcccgttaatcatagttattttaaattcctgtgtgacaattccaaggtccttgctatatctagttctgatgcttgctgtgtctcttcaagctgtgttttgttttgctttggtttttgccttttattatgccttataattttttcttgataactggacatgatgtactgagtaaaaggaactgctgtatataggtcttcagtagtgtggtgggaggtgtgtgggggtaggagatacattctagagccttgtgattaggtctcagtctgttagtgaacttatgcctctggactgtggactccacaagtgtttcttagtttcttctctcctcatttaggtggaacaagatggctagaatgggctggagttgagtattttccctcccccaggttggttaggctctaaataaaaccccagcaggtcaggctctggctaactagtttctcccgaaggtaggtcttgttaagaacagaatactctggtatatttcaaagtggctcttttcccctcctcctggtggaaatacaagggaatttattttttttttctgatacttactctgagaacctggtcaagctcctggaaggaaaagtcacaaaagcatgggggactccctatgactagatcccccttggagattttaaccttcagacttgtccatacctagcctccagcaattcatcaattaaggtcaggttttcctaacacaccactagttcctgtgaaccactccctatgttgtgattctctgtatctgcctgtctgtccaattttgggaacagtggttttccctgtaatctcacatctcttactaatctcagagttgttgactttttttcagtttgttcagcattttacttcttgttagaatgagtggcaacttctgagctcttcatgtggaaccggaaactggaaattgatactttccttttttttttttttaacgttatgtagccatgcctgtctaaaccctaagtgtatttctccattttgagcatcacatatctatccagggcagggtggttagacaaaacaatttttgactcatctttgcttctctaccccaccttcatcttctactttagggattctcaatggagtgggatgtatcatctggggatttgcaaccaacctgactccatctcccttgactgaatccgttgctctttgatcatggttttatgtagggctttggggagtctctttttgttctcagtccatttgccatgaaggtccctctacctgttgctaagttaatagaacaattcctccctagatgttagtgcggttgagcacattcaaagccttggttggttatctgtattttgtgaaaaactctgtagaaatcatctcaaaggagagaccctggatgatgagacatccaagcatctaaacatgtgtttggaatttggggagagacatggagacaggggcttttaagtacaaccatgctctgccactcccttactactcaattaccctgggtttggtgattgcctattttactcaggtaaaatactggtcctgcagcagggaaaccaaacttggccctaaggtaagcatcacttggccatgctgtaagcagagctcagctctttggtatcctttctgccagctcacagtttaataacagatgccatgaggcatgtggcattttctcagcgaagtcggcttctttctcttttctacatgtatcacttattcatttgacaactatgttttgagtacccactatatgtcaggtgatgttcaagatgctgtagattgaacagtgaaaaagaaaataagattctggagagtacttgccctatctttctagagctccccagtttgggtctgggaatgtgggaagaggaaactccagcacacatctgcccaatgcctgactgggcccctctctctacagacacctttgctcctccccattcaatctctcccattactcaatctccgtcccactgatctgtttctcggttcactccctcttgtctatttgcctctttctctccctatagtctttgtcttttcacctgccagacagctttgttcctttttttgtacccttctctgcatggagacattttgcctcatctgtcacactgtgttcttaatgccatgatgttcttcttctctcacagttttataagagaacaaaagctgtttaacctattgctcagcaagactctttttgttgttgtttttggtggggaagtgaggaattttgtcctcttatattctctcctcacttcatcatcctgctttgatttattcttttcaaacattccttgtgaatgtaaatatttcctctccttgaatcttatctcccatttttgagaggcagtatatctttggttaacagcttgagccctgaagtctctgttactctgccctcacctcaaaccactacatcttatcctggctctgcaaaaattttgagaatgtccctgaaaatgacagctactgttaaacaaaaaaaattgagaataaattatttttttcctttgaataattctccctgcatccagctgtagttggcaaaaattaaaattctgaatcttccagtttcaagaacttggtaaaatcaactaaagaggtgtgaactgtgtttaattcgataccttttgttaaaagtaaatggaaaaggtaaaatatcctttaactacttttattaaacttttggcctttctaaagagacatggttgttgtagccaaacagctgaattatattctgggatacaagacagagatgattcaacattgaggttacagcatcaacaccaaaatttccctaatgtagtggttaaaatattgggtgggggaaaaatcagtgtggtacataattcaatagctttttatgagttttaaaaattttccaagtcaaaaatgtcaattttttttgcctctgtaagaggtacttttcctagtagagctttaggagaatttgcatgcgtgcgtgcgtgcgtgtgtgtgtgtgtgtgtataaaaatacaccaactgcattagcagtcatttttctttccccactttgaccatcccatttctatgtgcaagaaattcccctggcaagatgaggagacagttgctcaaatttctggaacctgagtacttcactaactagcatggtaaacatattaatcaacaggtgtcaatggattctgggactgctgtttgtaaatattaacttaattgttgatggcaataaaggcatcctcatgcatctttgattcacttcagtagccaataatagctattatttttttaaaatatgtatttattttcccctagattgctatagttgctatttattaactgcttactatgtacctgcattatgtctttacacacattgtctcttatcctttcgataactctgtcatgtagatagtggtacctggaatctggacttgaattctaaatcttggcttcccatagccttgattaaccaagtcaaaagaagaacagtatatgtttgcactaaattattctttctttagtaaaatgctactttactaccaaagctaaggagaaaacctagctagtttttatgcaacatttaaatatttatgtagaagttaaagcaaggttaaattttacaaagatcttttgatgcaagtagataccattctcactaatatttagatattatcgattcctggttctctttctaggctatgtagagtaatcttttaatctacactggacattttctttctttctttctttcttttttttttgagacggagtctcgctctgtctcccaggctggagtgcagtggcgcgatccggctcactgcaagctccgcctcccgggttcacgccattctcctgcctcagcctcccgagtaggtgggactacaggcgcccgccaccacgcccggctaacattttcttaaaataaagagactttcaaggaaagtgtatggctgtagctccagggcgtcacccagtaatcaacagtacttataaaaggtttttattcaatcgttattcatgttctaaagaattcaatctattattattggtttatgcatcagagaaaacagctcttcttgcctttttagtgtctcttcttttttcccatatggtaagacataaaaagtagagaaagttttcataacagaaaattcatttttagttattatttcctttaacaattagcttataaaatttctataaccccgcagctcttgaaatctgtataatataaacaaaatataagaataaaattacactttttagcataaaatgtaatataggttcattgtagaaaaatttttaaatgcaaatcagcatcaagattaaaatgaaataatttgtaatccttccacttagaaaaaagatcagttaaaattttgctgtatatttttctaaagttttttatgtatcaagctagctttttaaaaaagtatgcatatcctatatcctatgtaaaagtgattaaagtaagaaatataatttaatatttacctttattatttcatttccagcttctttatttttgtatgtgtgtatcctaatttccacttgatatcttccttctgcctgaagaacttcctttatatttcttgtaacacaggtttatgggcaataaattctcagcttttgtttgtctgaaggtctttattttaccttcattttttaaaggtatttttaccagacataaaattctgagttgtcaggttttttctcttggtattttaaagatgtcagtaccttgtcttatgccttacataatttttgatttgtatcattgtgtgatatgtattatccctctgcacgtaatgtttccttttttgtcactgacttcaatatattttatcttcagttttcagcagtttgattgtgatgtatctagattcattttttttttaaggagagaggtattcttgggactctgggcttcttagatctgcaactttttgtcattcattaattttggaaaattcttagccattatatttaatttttttaacctgtttctgtttttctttggaactctttttttttttttttttttgagacagggtctcatcactcaggcttcagtgcagtgacatgatcatagctgctaactgtagcctcaaactcctggctcaaatgatcctcctgcctcagcctcctgagtcggactacaggcacacaccaccatgcctgattaaattaaaaatatatatatatatatatatgtgtgtgtgtgtatatatatgtgtgtgtgtgtgtgtgtgtattatacatatatatatatatatatatatatatagagagagagagagagagagagagagagagagagatggggtcttgctatgctgcccaggctggtcttgaactcctggcctcaagtgatcctcctgccttgaccttggcctcccaaagtgctgagattacaggcatgagccacaatgcctggcttcttctgggactctaattacattttattttaaagcattttatgttgtcccacagatattggatgtgcttcactcctttttatctttatgttttggcttggataatttctattggcatatcttcaagtttactaattctttcctcagttatgtctagactgccaatgaacccatcaaaggcactcttcatttctgattttgtttttatttaccagatttgcattagacattgataaaatctcccatctgttcatgcatgttcaccttttccatagatccctttaacatgttcattgcagttactttaaagtccctacctgatagttgtaatatccaggccatttctgagaatggttctattaattactttatctctggacaatgatttttgttcccccccccttgcacttttgtgtgactcaattttaattgaatgctgaacattatttctgtaagaacagaaagaccaaggtaaatattatttatgcttgagcatgggcacatctctttttctttcagaccttcagtatgtgtgggtggaagaggttggggttgggtcaattaatcagaagttgagctgagtttagattttactgctgctattattatccttagtgcaccacagacttcactggatggctacccttactacgtgcttagagcctgatgtgccagaggagttttctaagtattcattctgtaccctcggcttttagctgtccctgcacacctgtgtcacaaagtagatctttccctatgctcttgctcctacacaaagggtggacttctgttgtttgtgtctctgtgcatggctgtttataagagtagagggtttcttcattgttctggtccagtatcagtcttaggcaacgctcctgtgcctgaaccttggggtcaagggtttcttagcattcctgcagtagccaacctctgctgttgagcagtgcaagatcctgggcacaagcaggtttcctgctcttcctcaaaggggcagaagatttttgcttctgtctctccctcagcagcaatgtttctttgcctatgtctgggggtgagggtttcccaacacctctcccagagacaaacaattttgcttcagttgctctcccagagcaatatacttttgcccagtcctaagggccagaaggtgtctgtattcctccagcagcttaaacacatttatgcctagtgttccattattggaacggtaagcatgtgggagttatttatatcctgctgctcaaggtcatcaccaaggtctgattgcaaaaattcaaaaacttgcaacctcaggcataaatgggttaagattttgctttgtaagagagggccctggggaagaaggcaaggctttgttcttgttgccagtagcagctgatcagctcctgcatgtctatgtggcagagggggtcctgggtctccactctaccctgtccccaaccttccttgtgagcacccagttaggggccctaaagaaaagcttgagtgtgaatacaaactcttttgtgtccgaggcttgaggctatcccatattgaccttcaagaattttgttaaatttttagctgacttcttcttatctacttgtgtggtagccatctctttctccttgctttgacaaaagtgaagccattcatattcatgtgtactgtctctccttggatgggtttatgactctttggaattcagattacttagttgccttgtgaccttaactcttgatgagttaaagaaaagttatggttgtgtatattagttagctttttctcattgtcgaggtgacagcaatattccctagtgactttctacatctaagcagacacagaactctgcatcctattttatagtctgcatttttcatctaacagaatactgtaaaatctttctagtttaatggttgcttaatatttcattgtgacgatgtatcataattatttttcatgaacactgaaggatttctaccatgtgtgtttttttttttttttttttgagacggagtttgctcgttgcccaggctggagtgcaatggcgtggtctcggctcactgcaatctccgtctcccaggttcaagagattctcctgcctcagcctcccaagtagctgggattacaggcacccatcaccatgcccagctaatttttgtatttttaggagagacagggtttcaccatgttggccaggctggtctcaaacttctgacctcaggtgatccacctacctcagcctcccaaagtgctgggattacaggcatgagccaccatacccggccccatcttttttttttttaaccattataataatggtatgatgatcaacttggtatataaatctttgaccacagctatgatactttcctttagctaaaatcagaattgccaagtcaaataatacatagaactcttggctttttatacctattttcatattaatttcaaaatctttgattacaattttatgttttgggccatttgtagcattgccttttaaaacagatagctgggcgtggtggctcatgcttgttatcccagcacttttggaggctgaggtgagagaattgctttaagccaggagtctgagaccagcctgggcaacatagatcctgtctctaccaaaaataagaaaattagctgagcacgatggcatgtgcttatagttccagctacttaggaggctgaggcaggaggattgcttcagctcaggagtttgaggctgcagtgagctgtgattgagccactgcactgcagcctgagtgagtgacacagggagaccctgtctcataaataaataaataacatacactgttctgttcactacccatggccaaagacaaagacactgtctcttcatttccctccttttttgttggagagaaaaatctgacacagtggaaacgtccccacgtccctgtccagaaccctgccacctctcagtggaggaagaaggtagaatggtcacaaaatctggtgtctaggtaggtgaattaacagatggggtgtgttgcgtatttctcatgtttactctcttcagctctctgcgctaggacatatgactccataattcatgaatgtcaccttagtgctggtttacaacctgaaagtctctttttctaaagaacctaattaatgctgggctagaaagagagtggcataggagaaaaatttgtttaaacaagaggcatctgaaggcataaatgcatgtacttaaggcaagacacggagtgattagctagaaacacatccattatttttgctgtccaaattgttctttccataagatgatttgtgaggttgatgtccttgtgacagcaattttctgaaaatattaaataaggctgagtcccttttaaaaatcaagagcatgattcatacatatttgtgaaatgtaagtaccttttctctcttactgctgcaaactgctgacagcaatgtattatgagacccctcgtcagttgacagttgaagtggaaatattgttgtaagtaatgaatttgttgatagctgttccattacccagaatgaatatttagattagtcatgtgcaggctgtcatgtcagagctaccaggagcttttccttttatctaatttactcttaattcctcagtccccatctcaccatgttatatcctattgagtgtgtcaagggatgattagattgagagatgcaaggttttgttattgacacaatttctacaggagcactagagaaattaaacccttgctgaacaaacctgggtggaactctcagtcattttctttattttttatcagtacacagcacatccagaaagaaggaagagctctcaatcaagaggcagcgtgtgagatgcttcgtgaatggcatcaagggcatatattgaaagtcacccttcccggattacacattttagctttgttacatactcattgtaaccactccgaaaagtgctgcttgatgctgcgtgctctttctgtgtccctggaggtattctgaaggtcagaagagagatatacaacagcgaggcttggtgataacgtatagaataacagacggggactccacacccaggccttttttaacggtgtgaagcatagacagagctgcagtctgtgctaacattaggttatttattgattcaatcagttgacacaaggaggcagctacggggaggtaaaatatggtcctaaaatcaaaaagatttcagttttgtcattctgtctctgagattctatttccacatctagagcagggtaataatgatacctaccttacaaaattattgggagaatacattagttaatatatgtgaaagtatggaggagatgtgcaataaatatttgtgttattaactacacatacagcactctataggagatattccatttataaaaactttaggttctaaaaacctgtacacgttgattatttttgtaagtcaaaagtgattaagaggagtttaagctatcatttccagatgtatttctataaataaaaacataagtatattcagttgatttggggtggagagttccatagatgtctgttaggtccgcttggtccagagctgagttcaagtcctgaatatccttgttaattttctgtcttgttgatctgtctaatattgacagtggggtattaaagtctcccactattattatatgggagtctaagtctccttgtaggtctctaagaacttgctttatgaatctgggtgctcctgtattaggtgcatacatatttaggatagttagctcttcttgctgcattgatcccattaccattatataatgcccttctttgtcttttttgatctttgttggtttaaagtctgttttattagagactaggattgcaacccctgctattttttttttttttttgcttgataaatattcctgtatccctttattttgagcctatatgtgtctttgcacgtgaggtgggtctcctgaatacagcacaccgatgggttttgactctatctaatttgccagtctgtgtcttttaattggggcatttagcccatttacatttaagatgaatattgttatgtgtgaaaatcaacagaatatacattcttctcaacaccacatcacacttattctaaaattggccatataattggaagtaaaacactcctcagcaaatgcaaaagaatggaaatcataacagtctttcagaccacagtgcaatcaaagtagaactcaggattaaaaaattcactcaaaaccgcacaaccacctggaaactgaacaacctgctcctgaatgaccactgggtaaataacgaaattaaggcagaaataactaagttctttgaaaccaatgagaacaaagacacaatgtaccagaagccctgggacacagctaaaccagtgtttagagggaaatctatagcactaaatgtccacaggagaaagcaggaaagatctaaaattgacatcctaatatcacaattaaaagaactagagaagcaagagcaaacaaattcaaaagctagcagaagataagaaataactaagatcagagcagaactgaaggagatagagacacgaaaaacccttcaaaaaatcaatgaatccagaagctgtttttttgaaaagattaacaaaatagactgctagccagactaataaagaagaaaagggagaagaatcagatagacacaataaaaaatgataaaggggatatcaccactgatcccacagaaatacaaactaccatcagagaatactataaacacctctacacaaataaactagaaaatctagaagaaatggataaattcctgaacacatccactcttccaggactacaccgggaagaagtcgaatccctcaatagaccaataacaagttctgaaattgaggcagtaattaatagcctaccaaccaaaaaaagccaaggaccagagggattcacagccaaattctaccagaggtaaaaagaggagctggtaccattccttctgaaactattccaaacaatagaaaaagagggactcctccctaactcatttgatgagaccagcagctcctgataccaaaacctggcagagacacaacaaaaaaaagaaaatatcaggccaatatccctgatgaacattgatgcaaaaatcctcagtaaaatactggcaaaccaaatccagcagcacatcaggagatcaagaccatcctggccaacatggtgaaaccccatctccactaaaatacaaaaaaaaaaaaaaaaaaaaaaaaaagccaggtgtggtagcacacacttgtagtcccagctactcaggaggctgagacaggggaatcacttgaacctgggaggcagaggttgcagtgagctgagatggcaccactgcactccagcctggtgacacagcaagactccatctaaaaaaaaaaaaaaaaaaaaagcttatccaccacaatcaagtcagcttcatccctgggatgcaaggctcgttcaacatacacatatcaataaacgtaatccatcacataaacagaaccaatgacaaaaaccacataattatctcaatagatgcagaaaaggccttcaataaaattcaacaccccttcatgctaaaaactctcaataaactaggtattgatggaatgtatttcaaaataataacagctatttatgacaaacccacagccaatatcatactgaatgggcaaaagttggaagcattccctttgaaaccagcacaagacaaggatgccctctctcaccactcctattcaatgtagtattggaagttctggccagggcagtcagacaagagaaagaaataaagggtattcaaataggaagagaggaagtcaaattgtctctgtttgcagatgacatgattgtatatttagaaaaccccatcatcttagcccaaaatctccttaagctgataagcaacttcagcgatgtttcaggatacaaaatcaatgtgcaaaaatcacaagcattcctgtacaccaatagtagacaaacagccaaatcatgagtgaattcccatttgcaattgctacaaagagaatgaaatacctaggaatacaactcacaagggatgtgaaggacctcttcaaggagaactacaaaccactgttcaaggaaataagagaggatacaaacaaatggaaaaacattccatgttcatggatagaaagaatcaatattgtgaaaatggccatactgcccaaagtaatttatagattcagtgctatccccatcaagctaccattgactttcttcacagacttagaaaaaactactttaaatttcatatggaaccaaaaaagagcctgtatagccaagacaatcctaagcaaaaagagcaaagctggaggcatcacgctgcctgacttcaaactatattaccaggctacagtaactgaaacagcatggtactggtaccaaaacagatacacagaccaatgaaacagaacagaagcctcagaaataatgccacacatctacaaccatctgatctttgatgaacctgacaaaaacaagcaatgggaaaaggattccctatttaataaatgatgttctgaaaactggctaaccaaatgcagaaaactgaaactggaccctttccttacaccttgtataaaaattaactcaagatggattaaaaacttaaatgtaagacctaaaaccataaaaaccctagaagaaaaacctaagcaataccattcaggacatagtcatgagcaaagacttcatgactaaaacaccaaaagcaacggcaatgaaagccaaaattgacaaatgggatctaattaaactagagagcttctgcacagcaaaagaaactatcatcagagtgaacaggaaacctacagaatgggagaaaatttttgcaatctattcatctgaccaagggctaatatccagaatctacaaagaacttaaacaaatttacaagaaaaaaacaaccctatcaaaaagtgggcaaaggatatgaacagacatttctcaaaagaagacatttatgagggcaacaaacatatgaaaaaaagctcattatcactggtcattagagaaatgcaaatcaaaaccacaataagataccatctcataccagttacaatggcgatcattaaaaagtcagaaaacaacagatgatggacagggtgtggagaaatagggacacttttacactgttggtgggagtataaattagttcaaccattgtggaagacagtgtggtgattcctcaaggatctagaaccagaaataccatttggcccagcaatcccattacagggtatatgcccaaaggattataaatcattctactataaagacacatgcacatgtatgtttattgcagcactattcacaatagcaaagacttggaaccaacccaaatgcccatttataggctggataaagaaaatgtggcacatatataccatggaatactatgcagccataaaaaaagatgagttcacatcctttgcagggacatggatgaatctggaaaccatcattctcagcaaactaacgcaggaacagaaaaccaagcactgcatgttctccctcttaagtggaagttgagcaatgaaaccacatggacacagggaagggaacatcacacaccctggcctgttggggggttgtggggggatgctaagggagggatagcattaggagaaatacctaatgtaggtgatgggttgatgggtgcagcaaaccaccatagcacgtgtatacctatgtaacaaatctgtacattctgcaatgtatcccagaacttaaagtataataataataataataaaatatataagtagtcttatcaaagctttaaaaccaggagtacttgtcttttccctacattctattaaacattttcccctattgtggacctttgatgtctacagtgttttcatttgccacccactgaccagctgatgttctgctgatttgggtggtctctgaacccagcaacttggaactcaaggagccacccttggcttacagcagacatgtcagcaacagctgtttcactgtgcttaggcttaagttcccttataaactcctggccttcaccaacattagcaaaatgtaggcccagagggtaatgatgatatctatcttacaaaattattgagtgactaaattagttaatacatgtgaaagttaattgttgcaaacatttagctccagtctcaaaaagtttcctttttcattttgccaatccctgttccttcctctttgatcactattcactccttagccttaagaattcttcctgctgtgccatgagccccctgcaacacttggcattctctcatgacttccagtttgaaaaactatttttacttttgttttcatcctaattatgtgcatctttttagcagcgacttaaagacactcactacttttatacttttgtaactggtgatgttactgctgttcataaaatatctcagaactttagcacaaacctagctaacacacccctgactaatgaacagagtgtggccaaatgcttgcttgtggccactaataccatctgctggtgataggtaaaaaggttaaagcctttttccaccttgctttgttcatacctgtgaacttccttaaatggaaaatttataagtagaggtatttccataatgaggggtatggaagatacaaagggaaaaagagagagtccttgcctttatatatcttgtaatttaattgggaagaaaaggcacatgcttatgaaatagtcagggactcccaaatttgtatacgaaagtgacactgtagtagatgaggatattaagaaccaaaggggattcacaatttcagagggaatgttaagatgaggtccttgaagaagtctacatgaagtgatggttctttctgactggcatggtgagggccttctcttgacggctctcattcttcaggaacagagtttattctcagttaagacttcttttatatatctcagtaaatgttaaaaattctctatgtgtaggtcttacatgtttcttttttggtttatttctagatattctacaatttttgtcattattatcaacaggaatggctgaatttttatcacagacagtgagagggactgtgagtggatgcccagacatccagccttccctcctaggtatcctaggctaacagcgggaagtatcacattgaccagacaagttgcagagtgccactgggagccacctacctggagaggactttatctatgttgttgcccacgggcatgctggccagaggcaaggggtcctgatggagagccaatgtctagatatttgatgtaatcccaccttggaaattagaagttcacattctcccctttttgctttgcttaaagaaatgctttcacgccttcaaaaaaaaatgttttatttaaagtaaagcataggctagctcccttcctggggaaagatatctaactgcaaagggtagtctaagagtcaaattcttagtctaaaatatgaaaattacaaagagtaaaagggatgaattcccagtgaaatagagaccaaagaaatcattgtcaacctaccagctgaagaaaattcttgtcagaaattggctttggacaggctccctgtccaagtcacttacttctcttcacactgcctgttttcctataaaacaataataaatctgtcacacagataaaaagatcctagtgctgagataatgtgatttgttgaaacatgctcattcactttgggaggccgaggtgggtggattacctgaggtcaggagttcaagactagcctgaccaacatggtgaaaccccgtctctacaaaaaatacaataattagccagggtggtggcagacacctgtaatcccagctacttgggaggctgaggcaggagaattgcttgaacctgggagacagaagctgcggtgagcccagattgtgccattgcactccagcctgggtgacagagcaggactccgtttgattaaaaaaaaaaaaaatactcattgactcaactgaagtgtgaggactcttctgccatttgactttcttttataaacctactcttatcagtcttccattttaaagaagagaaaaacaattactcagatgtcctaactatcaagagatttggagaaactatatacatatatggttcttagttgggcataatttgaaagcctatctatctatatctatctatctatctatatctatctatctatctatctatctatctatcattgactttcaaattctgcccaactagttctgccccactaagaacatggatttttgtgataatgaaaactttctcttacaagcagagggccaatatttgctataaaggactgagagagctacatttcatatgtgactgtaataaccaacattttagggggaaaatgtgatgttaagagtcttagaatcccaggtggtagtgaggggatttctggatcctgaaggtcaagtgtttccagagaaaaagaggaatagagattaggaaacaccttctaatgtgggagctcgggcagggagagagtctacaactgtggtagctctatttaatatgataatgcatttctttttctttgtgccctttgcgcctttgctgtttattaactgcaccaactaccaggaaaagagaagagggtgtgggggaccaagatttaaaccattcaaacttcatattgaaagtttggttacagttgtattagaagaagggataattaacttgaggggtctgaggtctttctctttttctggaaacagggtttcactttgttgccgaggctggagtgcagtggcatgagcagggatcactggagcctccacctcccaggctcaggcgatcctcctgtctcagtccccccaagtagccaggactacaggcacgtaccaccatacccaagctaatttttgtatttttagtagagacagggttttgccatgtgtccaggctggtcttgaactcctgagctcaagggatctgcccacctcagccgcccaaagtgtcgggactacaggtgtgagccaccacacccaactgaagtctttctcttctaattgtcaccagcatctaatgccttgcatatacatttaggcaaaacatttactttgaagtgatccccctcaggtactctttcagaatctttttactcttgaaaatttaaagttctaataagcccagtataagtctacatctagtcttagaataatagtaacagcttctagttgttattttttataatttctataacattctttatcatgttgattttagtgtatcgaggacctactgtgcaccagacacttttatgtgcatatgaaattcctcttccttatctctatgcatggtagaatctgaggctctgagaagttgacttagtaatattttgtaagtggtagaattggaatctgaacccaactctgtcttggtccaaagtgcatactctttctactgagttacactgtcatagtacttatagggaataatgtctttcttcttcctccacttcaccctattgcctgcttactttgctggtatattttatattttacttcatttctgagttattcagaataagaaactgtgcttgcttaattatgagtcagagctgtctcctgcataaaaccttttaacaacttcctcttgggaaaaattgcaactgttatttcaatgccatggccacagttaccctatctcttggtacttctgttttatacctcgcttcctactaatgccattccccgcacacttcaggctatttcgtgacactgtgcttttgctcatgtttctttggcttagatcctcactcctcgaagtgtagttccaggaccagcagcatcagtgttacccaggagcttgttagaaaggcggaatctcatgccccactccagaccccaggtgattcaaatgcacagtaatggttttgagaagcactgacttagaatgttcttattgttttttacctagccaattttttcttacattttaattatgttttgttttgttttagctcttgtcacccaggctgaagtgcaatggcacaatctcagctcactgcaacctccgcctcctaggttcaagcgattctcctgcctcagcctcccaagtagctaggactacaggcttgtgccaccacacctggctgattttgtattttttgtagagacggggtttcaccatgttggccaggctggtctcaaactccggacctcaggtgatctgcccacctcagcctcccagagtgctggaattacaggcgtgagccaccacacctggccaattttttaattttttatttcaatcggtttttggggaacaggtggtgtttggtgacatggataagttcttcagtggtgatttctgagattttggtgcacccatcacccaagcagtgtacactgtacttaatgtgtaatcttttatccctcaccaccccccaccctttcccccaagtccccaaagtccagtgtatcactcttatgcctttgtgtcctcatagcttagcatccacatgagtgagaacatacgacgtttggttttccattcctggttacttcacttagagtaacagtctccaattccatccaggttgctgtggatgccattatttctttctttcttatacctagccaactcttattcattcttcaaaactcacctttaagaagctaaggtcagtagttctcaaaatatagtccaaagagtcttggtcagtgggtccccaagaccctttcagagggtctgtaaggccctcttgtccaactaccatctgtgtgagacagactttcttcatagacttcaaccaaaacaacatattgcaacagactgcctgcagcatcagataggtgaatccagctgcctttcataaagccagacatccagaagatctgcaaagataccacacagtgtcattcttcacactaaatatttttgttgcattgaaaaatagttatttttcctaaaaatatgtaatttatttaccatgtaataggtttattattttaatgaattgatatatttaatattaattttatattaacaaatacgcatatattttatatgtaatctatatataattaacatatattaacatttgatatttaatcaattaataaaacatttcccagttttaatttcccatacagtaaatagcaatagctctaaccccatgaacaaaaggtctttggcattctcaataattttttttttttgacacaagttctctgtcacccaggctggagtgcagtggcacactcatggctcactgtagcctcaacctccccaggctcgggtgatctcctgcctcagcctccagaatagctgggcccacaggtgtgtaccacaatgcctggctaatttttgtattttttgtagagacgcggttttgccatgttgcccaagctggtcttgaactcctgggctcaggtaatccactggcctttggcctcccaaagtgctgggattacaggcatgagccactgtgcgtgacctcaaaaatatttttttaatgtaaaagggtcctgagaccaaagagctttggatccattttcctggggtgaatgaagtgccctccttagcaggtctgtgatatcatgggcataactcaccgttatgcttatcattttatattaaaataatctgctcatagagctctctcattagactataagcttcatgaggactatgtcctattcatctttctatttactgagccagatgaactacctaacaacccctcccactcccatcaaaaaataattgaggactaaggagtgtgtctactacctagtttatagagagcactagacaacctacggctgagacctacagctttagcagggatgaagtgtgcataatgctgaaggaagcagcacgtggacatcaccactcgtggagtttcatcccctcaaagtgtgtttcaccagcctggagttctgtctcccgggatgaggcagggaagctctgtgagcacactgtccattcatgcacaatcacgccagacgaacagtaatctccagtattcatgctgccttcaaaggcccggtgaccctcaaagatacagggagagaactacctacaaagatgtggatgtttcaacaggagacccatttggccatgtctgctgtcaataaccttggccaactccagtgtaagaggaggaaggcatgggtcttccctacaccagaatcccatgttgtcagaacaaattctactgcaagtagcagtctgagacttgatgaagacctacctctgccctttggacaccctgacagccccttgcatggaagacatgataaaggtagtctcctaagggcacacacagctcaccttctattcagaatccagccacagaatcctgtcagtggtggcacacaggatggagcaaggccctaggtaatgcccctctgaaaaatgtttgctgctgggaggtacccatacagtatttttagccaatccaaatattttgaacacctttattttaccagtgaaaattcatttcccttattataattacaaattctttaggggtgattggagataaaaatagttgaagccttgtcacagacctctggtacgtgaactgattagcttgtcaggtgctcactaagcatacctgaaatgtggatttttttattacagtacttcatatgttaatgaactgcctctaaggtgaagaatctcacacacacacacacacacacacacacacacacacacacacccctctcaccctatttatgctggagaatcttcaagtaaatcacaagcagtataacaatgtcattaagttcaaatacacatagtggagtgaaaactaaatgtagtagtgtctcactactcagctatctagtaatttcatttaactggaataaaccaaggacctgtaaataaacaaagagaaccattattagacactatatgccagaatgatatacatttttgcatggaatcctcgaaacgccaaagcacatgttccatcctgtacctccatagaaagagatcttcgaatcaatgtcatgatcctcataattttgtactcttagtctcggcacgaccgactccttcaggtctcacccagagcccatgtgttcttgatttacacacaaattgaatagtcttagttgtctggttttcaaacccttcacagataaagagaaacaagttagaaggaacaaagaagcaactgctggtggcaacactgacaaacagaaatgacagctgctcagggtagacctgaaattaagggatgggccagcaaaatttaataagtaaatataaggacccagttcttacagtaactgactcatatataatgactcagacaagaccgagactcctacctcaatcgaccctcttggaaaaacacagagcatccactgttgtttctcgagatcatgctcatgccatgagatacctcttaggcaccactgcacactctctctggacttcctctgtcctagggcatttggccatttgctctgagcagctctctgtgcactccaactggctttggtaggttcatcccaacacaccctcttcacacctgcgtgtgtgggcctcctgccttgggacttctctgttgatgctggagcctgagacacctctcagcctccaggtttgcaatccagaagtttgcatgtggtggaggggctgggatgaaaggtgggagctggtgagacattcttcccccaaacatctcccagagggaatgtcctgaggttcagtggctcagatggcctcttggaagatggtccagcccgactgagatagcaaatagtggccagtgcagtaacacactgtcctgttagctgcctcacctcccctgcctcccacactctcttttcgtggacttgagctttgtttataaaataatagcacataagcttttgcctcgagtcctgccatctggggaacccaggttaagacattcctcactatcaaggaaggtcaagtttgtttcataaactctgattaagagggcaaaaaaaatgagtaatgatttccatatacaatttatgtatttattttctactcctcttactatcattcccaacataaacaatttttttaaaagtccgggtaattgaacatgtatatcttcaactaggaagaaaactcagctacttaaaatgattatcttccggagtttttacagcacggttatactgaagggacatcaaataatgcaataatcatagttgagaggagatctatcagggtaggctgtctggagcaaatcaatcttgagctgatttctgaagactagagagcttgaggaggacaatgcagcttgaatacaggaagggacccacgtaacctttagagcacattgttgtgcacaagggtcatatcttttacaggagaaatgaagaagctgtgttatatcagcctgttcatttttaccctcaacaagaaaaatggtcagcccatctaatccattcagctacctcagctgatattgatcatgacggtggctaaaataactccattggctcttttcccaaatggaggctgattggctgctggtgtgtagcttattattgagttgttaaagagttttggagttaaacttgctcccttgaatggggtggaggattgtactctgtctgttgtcctttcagcacaagatctacatatatgtaggctaaaacaatcaggggaacacacttgcacacatacgtgaacacacaggcacatacgcacatgtatacatgcactactatctagtgtcactgtcattcctttacaatttttgctaccaaaaaaagtagagatggctgagtgtggtggctcacacctgtaatcttagcactttgggaagccaagatgggtggatcactagaggccaggagttcgagaccagcctggccaacatgttgaaactctgtctctactaaaaatacaaaaaaattaactgggcatggtggtgcatgcctgtaatcccagctaatggggaggctgaggcaggagaatcacttgaacccaggaagcggaggttgcagtgacccgagatcacaccactgcactccagcctgggtgacagagcgagactccgtctcaaaagggggaaaaaagccaaagccagagaaaaatatcttttctctgctgcatttcaaggttctgaagaagatgcttttgtgaagcagtggtctgccctctgcttcctccacaggggaggagatgcatccagaagatgcaggccatgcatctggatgatccaagtgaaaggttttcttctacagaacgcttatcatggagtagcacaggggaggagatgtcaagactaattcagggtcaaagccagctctagagtagttcgattacaactttcagagaatacttcaaacaaagcaatcctaagtgctttcacttaaagacactgcacacaggagagagaaaacccattttcaacttaaacaattcaaaaagtttggaagattttcggcgacactccacagagctaccccaaaatgggcctccattttcagatgtgcatccaagtgcatcacatatttcacttccctgtgggcaatgccagaggagacaaaggaagggggagagaatgttccatgcatttgcaaactgtcagggcatatcatttgtcctctaaataagtgtttactaagcatccacatgatttttccttgtcccctgcaaggtgcaaaaattgtagggaaaatgaatttctggccaggctttaagtgaaataaaaatccaaacatgttaagtcaagatgccaggaacagctcatcactcatcattacagtgcatttgtggggctgtaatttctttctcacccgttgtggtgtttgcttcttttcacatttcctcaggctggcccccttggaagtcggcaggtcatttcccccccttcatgctctaatagatttcactctcaagatctcacacaccaccagctctggactgctgtgtttagggttagcaaagcagtaggaaaacgcttgcagacagagaacggtgatttctttttcatccaaagaaaaatgagagtttgaagatgcttatcacacccagatttggggaaataaaaagaaatcccaaatcctttcttctccacaaaatacattttttgtttcaagactattcttagtgtttcagttctctttattgatccagtttattggagctgaagtaattgaaaagttagtacccatatctggatttgtgttctgtgaccaaggcttacttggattggggcgctgttgtgtgcaatggcatttgattgtgtaaaaatggactccttgtccagaattaaatgctgaggaacgtcttcccaattgtggtattggtgcgatgagaatttgagaggggtgggtagtggaagggcttacagcatctgttgtggacctgtccttgtcagttgtcaccttcaagctatagaatgctgctctagaaataacctgtaaagtgagtttgactgcttttgcctttatgtttttgacaaatatttgggtctgtgttctcaaatctgtggaggagagccactctatttcttgggtcgttcttgggttgatcccaccccttccctctagttcttcctctttcttttgcctttttttttttttcttgagaccgtctcactctgtcacccaggctggagtgcagtggcacaatctcggctcactgcaatctccacctcccgggttcaagcgatcctactgcctcagcctctctagtacctgggactacaggtattcacctccacacctggctagtttttgtatttttagtagagatggggtttcaccatgttggccaggctgctcttgaactcctgaccttaagtgatccttccaccttggccttccaaagtgccggaattacaggtgtgagccaccggtgcctggccactcttttgctgtcttgatgagtttaggcaccttctcctatcccagagtctgagtgttcatagatacgcagagaggaagtcactcacattccaaaccaagactgaacctgttagagtggttgttaatcttaaatattgtcaacattttaccataattggaagctcagggaatgacctaaaagctcatgctcagaaattgttcatttaaactgggggtagaaaccctcacagtgaaatctgttgataccagggattgggtcctgacgagcaagaatgtctttaattaagttcttggctttatgtgcacaatcctacatgggcaccaatccaagaggtaagcatcttatgaagaacccaaaagcagtctgcacagttattgcatgattgtggtttttgggaaaccttgggattgtatcgtactccttgccttactgaaatcactgtagtgtttttattttcctgggaaaccaagactcatcatttattaaccaaaatatcattcagttagtcattccacaaatatttaggagtgcttgtcatgtgggattctctctgtgagaccttggagagttggcctttctgctgaattctgccagcccagcagtgtatccatgtcatagttctggttaccttagaagctggctctgagatggagattacattgtagaaagtttactggagcaggtccttgggatcaatacatgtggaagaaggggcagaagcaagatgggtaaaggggagaagctgggctttgaacagtctcagtggagacattcgtcagcccagtggggaccaggcctggacaacgggcttctctggtcagtcaccgatgtgcagtcattaggggaggggcatgacctcaggcaaggcagctctccatcagaggcagcactgtcagctactgggagagtaagtcctttaatcctaagtggggacctgggtggcacatcacaatgtccactacggtgtgctaagatgcttttagctactctacagaacatcttgactcaactggcttcaacaataggacatccttgcatctcaaagtaagacaccagggataaagcacctccaggattggttagttcagtggctcaacagcttatccaaggagctctccatccatctgctctgtcagcctgaagaggcaactttgcttctcaggcttcttcctttcatagtcacagatggctgttgccggactgggtgtcactgcaggaaagagaaatgatttctgcccctgtgctctttctattgttgaggaagatatttccttgtatttctctttctttattgtggtgaaatatacaaaagataatattaatcattgtaacctctcataagagtgcaattctgtggcattaagtacactaatgatactgtataaccatcaccactatacagaaaactttgtcatcattcccaataaaaactctgttctcatgaaataataactttctcttcacccccagctcctggtaatttctgttctcttttctgtcgctatgaattttcctgttgtaggtgcctcaagtataagcatacagtatttgtcctttttgtctggtttattttactaatcttaatgttttcaaggcccatccatgttgcagcatatatgaaaatcttattcctcttcatggctgactagcattctattgtatatatgtacagcattgtttgtctactcatccactgaataatgttgctaccaacatgggcatacagatatctgttcatgtccctgctttttattcttttggatatatacctaggagtgaaaatctgggtcatatgataacttgatatttaacctttggagaaaccatcaaaccatttcctgcagtggctgtgccacttcacattcctccatcagtacctgaggagtccagtatttctacatccttgctaacatttacttcccttttttaaaggtatggccatccttcccctccagtcttattggcctctatcatgtcacatgcccactcctaaattaattatttgcaaagtgaaggatattaccaaaattgccttaaaccaatcaggaccagggccctgggtagggtctacattaccctaaaggacatggctgcaaggaggacagttagatacctgaacaaaatccagacattccagccagaaagaaaggatgggacgaggaagaataaagggaagctaccatcaatgtttgcaacagggtggctttaaaaatagaaatgcccagaccagagattctgattcacttggtctgcagcagtgggtgctcagcatcagtcacttttaaatgttccccaatttattctaatgtgcagtcagggctgcgagccctgatctagcaggttaggctgcccgttaagccagctcgtgtgaatactgagagatgagaaggacaacatgctacaggaatgctgtgcagtgcacctcgcctgggggactgatgaaaacccctgagaggaagtgatgttcagactgatgcttggaagaggcaagtcagccagggctggggaagagtgtcatagacacgggacagtatgtggttcagtttaagaagaggaagaagctcattctgtctagagtgtacacagtatccacttcaaatcctgaggggacaatatttttactcaaatatatgcaacttatggggccaggtctatgttcaacactccagccgcgtttatctctgggtaagtttccctctctgtgtgccatgttcttggttggctgagtgagcagcaggttatactagaggcatcagacattcagggtttaagaattgagtttgaaacctgcccatgctgtatacaaccggtgtggctgtggggaaggcccaagacatctctggacctctgcacaggtcctgcaaaagaggttataaaaactacatcatagggccattatggaactcataaaaaaaaatgtatgtgagcaacatcataaatatgctgatgagttgcaaacttctactcccgtccccatctctctctagggcacatctcaactccagacctatatgttgatatcctctacctggcagccccatttggatgtatattgggcatctccctcttaccgtgtccaagacagagctcttcatatgccactcctcctccattctcccctacatcggcttagggcatcttaatccttggtgtcatccttgactccactctttctctctaacatggagtctgttaacaagtcgtgccactctactttagaaatatacccagattctgaccatttctcaccacctccatgactatccaggttcaggccaccatattctttaacctggatcatgtgacagcctcctatgagaccctccaaacttgatcccccattattcctactttatctcctacaaccctccctcttgttcatctgctccagccccaagtctcatgcagccccagtctgcatggcttcagggccttgctatttgtgggtacccctgcccccagttagccaaatggctaacttctcacttccccaagtctttagtcaaaaaccatagtgtcagcaagccctcccatagacaccctatttaaaatttcagtgcctgcccttaatatatcatattctccttctctgctttttttcttcctggtatttaccactaatgtgctctacaatttgcttatttatattgttcattgtcttccctgccagaatataccagatatatagatctctgccagtatacccctgctccacaaagccagggattatctgttttattcaccttcttttttttttttttttttttttttttttgagatggagttttgcttcttcgcctaggctggagtgcaatggcatgatcttggctcactgcaacctctgcctcccatgttcaagcaattctcctgcctcagcctccctgtagctggaattataggcatgagccaccacgcccggccttgttcaccttctgtctcagttctagggcatgtagtaagcacccaatacatttattagcacagcattttacagaagagaaacctgaggctcagtgtgattaaataattcattcaaggtcacacagctagaaggcgttgtgtagttgaatgttctgtggtgcttttcaacaacagaaaacccatttagcaaaaagacagggcagcatcaatgactcctctccagccctcctccctatcaccaaatgacgaaaggaaatctctaaaatgaggaaggagtaggtgcaagagggcgtcgtggagttgctctgtggccccttggccagaccattcatgtttgagtgttattagatgaggaagctggggagccatctcagtgcttcttctgaagcacaaaggccagtgactgttattaaaaggagaccagctgctcgaggctaaaagtgcacaggaggaagggatactccctacttgggaaagatttgctaagtcggcttgagatagtcagggaggatttttagactgtgttcagcatccagacccatctcactggctatcctacccagacttactgtgccccctaaaaattccttctttcatccattctactgaacatacaaagaggaatcctagccgattacagggaagacaatacagagaataaccccagaagtagatctctgcagcatcattggaatgaggacagtgatttttttttaagaatgtcttttttgaggaagaggcaatgtgcctggaccatagtggttctagttggggaagcccgggccttttcctccttacccctgggaaaccacatcgctagtgctgtccgtccacagggacccacccacttggcagggtagagcttctagaaccagagccaaggcaggcaggagactctttaaacagttcagagggaggaggcaggagcagggtctgagtggaagctgggtgctgcaggctgtggtcagaccagagaaggccgattccacaggactggggtcagagagcaggggtcagagagcaggagccagagcgggcctcggcctctccctgggaggccacggcacctccctgtgcctggggccttcatgactcgagggtgtctaccccaaagctgctgcaagcattcagagagagaagtgcccagggcccagcagagagcaagccctccacacgtgtttctctccctcttctttcagaagcaagatgggggtggggacagtggctcagagcaggactgggagaggctctcttgaaaggcctgggttgtaatccaaagagcggaggaaggagaggaagctgctggagttgcaagatggcttctgttgccattgttcagttgtttgctttcctccttagaggtgcggacaagaagtagcagagccaaggctctgggtgcctcttccatgttccctccatagtcctttcctcctcacatgctcaccaccagctcccaggtcctcagcctgtgcagggcctgtgtgctccacacagacgtcctcttcagatgatgctcccacgtcttggctgtggtcctttctggaaattgcccttggccacagagagctgcctcgcccaagcgtttgccctcccaggggctccctgaggccaatgcccagatgatgcaaggataatacctttcaatttcatataggtcttaagatcatctggcccagaacgccccatcggatccactgaaactcattgtgggtgaccttctccctccacccagtgctgccttcttcccttactcgcagatcatctggagagaactccctaagagccttctgcccatgactctagaaggccacctctaaggccctgagtcccttagttgtctttggtctttgcccctccaaacacagcccactcatttgacttcctaggcacccactatccactaaaatgcagccatcctgtatcccagtgactagaaaatgggtgctgatgggttaatatggtgtccaataaaaatatttaccatgatgggagctgacacatgcacagctagcagtctgcaaagcacattgacgtatgttttttcagttgcaaggcagaatagcatggtggtttctgaagtgactctgcctgaatttgaatttctgtcccaccacctatgagtcttgcgactttgggccagctacataaactttctgttgctctatttccctatctgtaaaatggggataatagtcccttcttcagagaatgtttgttagaattaaatgagtcaatacatataaaggtctcagaactgccctggcatatggtaagcacatagtgtgccttagctgttagtatttgatcctcacaacaaccctgtagtactacaatttctacctgtgttgggtacttctcaagacactcatattctcagcccagcttttcaccccagctgtttgttcagccacctgctggcacggatgtaacagcgccttgctgagctgtgtggcttctcttacttcctgcttgagatgcctgcagagcccacttggctgttctgacccaagcagacctggaagtgtgggggagctaatatcccatgtggcaccccttgatgccaaggaggtattggagccaatggaaaaaccatcccttcttttattccctgagaagataatccagaggtatattgtgacccatcaaaatccaagttcagttgccccagcagtagccactccattaatgcatgcagtcatggccttcccccattccccatttccttgagcccatttgcccatccatgcctgtcaatggagctcacgtcccagagtaaactgcccagacaccggccgttgcctcgtggtctgcttttttttgggggggcagggcagggggcggggcatctaattgtgcataggagaagggtaaaagaataaaaagaggcatgtcctaaacaccatggaatactatgcagccataaaagggaacaagatcatgtcctttgcagggacatggatggagctggaagccattatcctcagcaaattaacacaggaacagaaaaccaaacaccgcatgttctcacttataagtgggagctgaacaatgagaacacacggacacaggaaggggaacaacacacactggggcctgtcagtggggcagggaggggaaagcatcaggataaataggcgatgggttgacaggtgcagcaaaccatcgtggcacacgtttccctatgtgacaagcctgcacgtcctgcacatgaatcctgggacttaaaaatttttaaaaagaaccatacagtagaagaaagaaaaaaaaagaggcatgttcaacatatataatcagatttggactcaagtcagagtcttccacctaccaaatttcatgccctcacactgtgcctgcactcccagttgatacatatgcatcttaacagaggccttccagaagcttgattaggctgcgggaggccaaggaggaacacactatgaacaggtagcttcagttactttgatgttcctgcccttctcctgcccctgcatagaggcaatcctgcatggcaagagggcggtgagcagtggctccacttggctgaagcctgggtcaggggcttcacctaacttgtctttgtatcgccagcacttagctcatgcatcagtaacactcagggtctggcacatagcaggtactcagtaaatgtttgctgggtacataggtccagaactcaaactatgggtgatttgcttcttaatgattactttctatgtggccatgcctgtttctatacttattatttttttgctggtttggaacgtaatctctgatggacagagaacttgtttttgggtggaagattgtctacctttttaccaaggtgagttagtacagaattgtgtacctaaaattatttaagaagcattaactatttctcaaaattatttgagaaaacctgaatatcaggttgattgatgaaagaaatctctaggtgctatcttgaactggtggcctgtgggataaatgtagctctaagatatatgggttggccagcacagtgttgattatactgaagttattctgaggtatgccacagggcctaccacttcctatagcattctacctgtcccaactctcaaatttatgttacctgcctagcccttgcaggtatatgggtcttgtgacccctacacaacaggcttccacatatagaaagcgttgaaggagctgactggcacagttctctccctgggcttttttctgacttttcctgtgacttgctcagcccatcctctctcccatcagcgggtcctcatggtgatatggtgtcttgccctgtaggtactataagatctccgtggtgctcatgtgctttgtggtccccacgctggtgccctggtacatctggggagagagtctgtggaattcctacttcttggcctctattctccgctataccatctcactcaacatcagctggctggtcaacagcgccgcccacatgtatggaaaccggccctatgacaagcacatcagccctcggcagaacccactcgtcgctctgggtgccattggtgagtaggggtgttgagggccaatggggagaatggtggcccaggttttcttggcctctcagtagttttgtggaatcagtaaagagaagcagtggagtggaatggagttcagtgaacttgagctttttttttttttttccgagatagagtctcactctgttggccagtctggagtgcagtggcacgatcttggctgactgcagcctctgcttcctgggttcaagcaattctcctgcctcagcctcctgaggagctgggattacaggcatccaccactatccctggctaatttttgtatttttttttttttttagtagagatggggtttcaccatggtggccaggatggtctcaaactcctgaccccaagtgatctgccctccttggcctgccagaggagctttggctttaggatcctgactcttggacaagtcatgtgatctctctgatttacagttttcctatctgtgaaatgggactagcaatgcttacgtcacaggaatatgtaaactgcttagtacagtgcctggcacgtagtaggtgatcagtaactagtagttattcaccatgaccatggaaatgttctaaaggagaagcagcagttgactcttctctcaaactgtcctgaccattctagcctcagctgtccaatcatttggcagagcttaagaaaaaaggccttcaaacaaagacatgggaaggaatgagacttggcatttcacgggaccatgaaacagttaagagcgaggcctctggagtcagcgactttggttgagtcctggttcctccacttactctctgggcaagtcactcgttcttctgcctttcgtgtccctatctgtaaagtgggggtaatactagcacttacctcctcctgggtcattagagggctaaatgagttgatacagagtgttcctaccagtgcttgtatgaaacaagccttcgtgatgttgcttttttttttttttttttttttaagacggagtctcgctctgttgccaggctggagtgcagtggcgtgatcttggctcactgcaagctctgcctcccaggttcacgccattctcctgcctcagcctcccgagtagctgggactacaggcacccaccaccacgcctggctaatttttttgtattttttagtagagacgggatttcaccgtgttagccaggatggtttcgatctcctgacctcgtgatccgcctgcctcggcctcccaaagtgctgggattacaggcgtgagccaccgtgcccggcccgtgatgttgcttttattgctagtcatgtgttcttaggcaacttacttgtcccttctttgcatttatctcctcgttttaatcatagcagggataatcatagcagttacttcagaggcctcaggctaaaaggagttaatacctgtcaaagcaaggtgattaagaaatattagctctacctttgtagaagcaactcagacttcttggtaagctgagccttgagcacagagatcaaacataggaaagttcctactgttaagtagaaatggtctctgtgtcactcagtgatgagattctgcatcacttcattagggccatctgtttttcagaccccagggatcccaaagttcttgtcaacttgcactgatggcagcaatagaaggtggagtgaacactacatttagccagggaataactgcataagcagggagaaagtgccttggaaaacaggaggggcagtgccccaacccttcctatggctttcccctcctcttgccctgcatcttctgaaaggactgtaatgagggaagccgtggccagtgttgattctgtgagtagacagaaatggggacaagatggtccgtcaccatgtagggatggatgggccaggaaactcaagcagtatggccatgacatgggccctaaggagctaggtattggttataagtctatccagctcaacactggactcccagacagtttgcctcccaaaagtccttggaaagctcttgccatatccagttgtgcagtagagtggggagtacatcataatgtctgtttctgaaaatagggtgaagaaacttttccataccgctctttaatccaggaaaaacactaaaaatgatgagggggggaggtggtgtgcagggtagggatggcataaatttaaaagaaaattgcagaccacagatggatccatcttgaggtactcgttatagagcgaaatcctttaaacatggtcagtggcagaactatgtgatgactagtagccacttaagaagtaagaaaagagtctgacagtttctcaaacagttaaaaatagttactatgtgatccagcaactccactcctacatttataccaaagagaaatgaaaacatatgtccacacaaaaacttgtatatgaatgttcatagcaacgttattcataatagctaaaagtggaaacaacacaaatgtccatcaactgatggatggatacgtacaatgttgtacatccatataatgaaataccgtttggcaataaaaagaatgaagatctgatacttgatacaaaatgaatgaaccttgaaaacattttttatgtggaagaagctagtcacaaaggactacatattgtatgattttatttttatgaagtgtctgaaataggcaaatctacacagatagaaaacaggactgggagggagtaggaggcggttgggggtgatggctaaggcatgtgggtctttttggagagtaatgaaaatgttgtaaaattgattgtggtgatggatgcataactctgtgaatatattaaaagccattaaattgtatacttcaagagggtgaattgtacagtaagtgaattttatctcaacaaagctgtttatgaaaatcaaatgaactaatccttagagaaatgcaaattaaaaccacaatgagatattacctcacacttatttgaatgactattatcagaaggataaaagataacaagtgttggtgaggatgtgaaaaaagggaacccttgcacactgttggtgagaatgtaaattagtgtagccattatggaaaacagtatggaggttgctcaaaaaaattaaaaatagagctaccatatgatctcgcaatcctacttctgggtatagatccaaaggaaatgaaatcaggatgttgaagagatatctatactcccatgtttaaacaggattattcacagtagccaagatgtgcaatcaaattaagtgtccatcaacagatgaatggataaagaatatgtatcacatatgcatcatggaatactattcagccttaaaaaagagaaaatcctgtcatttgccacaacttgaatgaacctggaggacattatgctaagtgaagtaagccaggcacagaaagacaaacgctgcacgatctcacttctatgtggaatctaaaaaagttgaacgaagtagagcagaatggtggttaccagaggctggggcaggggggttgttgagagatattggtcaaagggtacaaattttcagtctgactagaggaacaagttcaagaggtctactgtaaaacatggcgatagtgactacagtcaataacaatgtattgtattcttgaaaatcactgagagagtagattttaagtgttcttaccacaaaaacataagtgtgtgaggtaatgcacatgtcacttagctcaatttaactattccaaaatttatacatatctcagaacccggtgttgtacatgataaatatatacaaattttatttgtcaattaaaaaataagtaaaagaaatttaaaaaatcaaatcagagaagccatgagagctctcatgagtacatcttttaaaaaaagtgagagagtcatgcaaatcaaaaccacaatgagataccatctcacaccagttagaatggcgatcattaaaaagtcaggaaacaacaggtgctggagaggatgtggagaaataggaacacttttacactgttggtgggactataaactagttcaaccattgtggaagacagtgtggcaattcctcaaggatctagaactagaaataccatttgacccagccatcccattactgggtatatacccaaaggattgtaaatcatgctactataaagacacatgcacacgtatgtttattgtggcactattaacaatagcaaagacttggaaccaacccaaatatccatcaatgatagactggattaaaaaaaatgtggcacatatacaccatggaatactatgcagccataaaaaaggatgagttcatgtcgtttgtggcaacatggatgaagctagaaaccatcattctgagcaaactatcacaaggacagaaaaccaaacaccgcatgttctcactcataggtgggaattgaacagtgagaacgcttggacacagggcggggaacatcacacaccggggcctgtcgtggggtggggggaggggggagggatagcattaggagaaatacctaatgtaaatgaccagttaatgggtgcagcaaaccaacatggcacatgtatacatatgtaacaaacctgcacattgtgcacatgtaccctagaacttaaagtataataaataataaagaaaagctacatgaaaaaaagtgagagagtaaaagctgcccactggccactggaaggggtagaataatatataagtacattctagatatttaaagatatttaatttacttacctatttgaatgattctcatttgtctctcttgagctcttccaaaaaaggattttttaatcactccagcccacagagactattttttaaaaacagttgtacatcaaaacgatgatctgttatcagccatttagcatttaccttaagaaggatagctctgaggtcatggtatcatgtctgcagttcacataggaaagttaatcttgtgacgatttattgctattttttctgttcatattgtttgtctagctaactaagtcaatgcctttggagtcagtaaccaagtcttttgctcctcacagaggctgacaccatgtcctgcacatggtaaaccctgaaaaaataggtgattcaaaacatctatgcagagaggtggtgattgaattatatcaatgcccgctttgtcttccaggtgaaggcttccataattaccatcacacctttccctttgactactctgcgagtgaatttggcttaaattttaacccaaccacctggttcattgatttcatgtgctggctggggctggccactgaccgcaaacgggcaaccaagccgatgatcgaggcccggaaggccaggactggagacagcagtgcttgaacttggaacagccatcccacatgtctgccgttgcaacctcggttcatggctttggttacaatagctctcttgtacattggatcgtgggagggggcagagggtggggaaggaacgagtcaatgtggtttgggaatgtttttgtttatctcaaaataatgttgaaatacaattatcaatgaaaaaactttcgtttttttttttgtttgttttgtttttgagacagagtctcactctgtcacccaggctggagtgcagtggcgcagtctcggctcactgcagcctccacctacctggttcaagcaattctcctgcctcagcctcctgagtagctgagattacaggagcctgccaccacacccagctaatttttttgtatttttagtagagacagggtttcatcatgttggccagactggcctcgaattcctgacctcaggcaatccacccgcctcggcctcccaaagagctgggattacaggcgtgagccaccgcaccctgccgaaaaaaacttttttttttttgagacggaggctcgctctgtcccccaggctggagtgcagtggcgagatctcagctcactgcaagctccgcctcccgggttcacgccattctcctgcctcagcctcccgagtagctgggagccagcgcgcccagcctaaaaaacttttcaagtcaatattactacgatttaacattagagtgtggacatgtgatttaatcgctatagctaaaatacgtcaaatatacgttgtcatgtgcttgaacatgatgctaaccctgacaggatgaaggaaagtaatattctttcagtgtagttcaggagagcatttgttttcttttctaccaattaacccatcattgcttttaaacaaccatctgaaggagcagagaggcagggtagaagacagaagggggatctatgtggtaactaaagaatgtttctgttttgttaattattgtgtgtgtgtggttttattgtttgcttaagagaatcaaaaactgaaaaaaatgagaatacaggaaatggctcttgtttatttttttgctgtgtttacagcttgttaatgctctactgtctttgtttcaagagagatttgttcactgcccagctcgttttgtgtcctgagccctatggccagcccaccttataaatcatgcctgtttagatgtttgattttgttctgtttgctattgttatcttaaaggtgtataactctgacatgccagacatcaaattaagctcaaattaagctctcgtttaaatgtttaagcacctaatttatattctaattgatcccagccactgatgcatgtactttagctacttctgctaaataagcatattaattttccacatcagaccatcagatcttgagaaccaacagttatctagaattccgtgtctactaatgtttcacctgcatgcagccttcattaattttgtagcaaaatataaagtgatcattatgtagcttctggattaaaaaaatttgtgtgtgaagttgctttgtaaagtgcatgtggaattaatgggacagtgtgccctttgtgttagatgttagagcaaaagaaagggcttatagtgttagtattggagcactttgaagatagatattttcagaaaagatgtaggatttaaaagttaaattttaaattttagaaaaagatatgatggcaattggaaatagtcacaatgaagttcttcatccagtaggtgtttaacagtgttattttgccactggtaatgtgtaaactgtgagtgatttacaataaatgattatgaattcattggtgttcttgtccagatacttcagtgctgtttagagaatgttctttccagagtgcttggtgcctcatgatgattgtatgactcacattgggatttgggctctgggctaacaacagcccctgagaccagcccctgagaccaggcctgtcctatcctatcggccttaggcaacagccagaggaagccagcaagttttatttggaatgtagaactcccagtggtattgttccctgattctcactcaccagcagccactgggagtgcttatagatgataattgggaatctactcctatatgtcacccaaaggagcatgaaggacaccttcccctctccaggccccaccaatagttaccagaggtgggggagatggactcctgttttcactctagtcctgcctctctcaacctcacctctgcaccaccaaagtctccacccatcttttgccccaaagcagctgtggctgtactgtcaggtagaagcttcttaacgtgtctgcagttgagtgggattctagccattgatgggtaccaggctagatcacatcatgtaaggaccctttggatgtgaccgtagcatttttcagctgcttcatatcccagtcacacattgctaagaccttgtatagagcgcaggtggagggtagtcacattccaagataagtttgtatcagcatgatgtgaaatggcccttaattgggaatgtatatgtgaacctttgactcctaaaagtactaaacttacttacttgtccattagtcaaaaagatgacatttggaacagctatttggaatctttttacaaaaggagggtatttcccagctagaccaaataaatctagaatctccttcctctgaacctgagtgccatctttttttctgcagcagagccatgaatgacctcggattggaatgatttggaggaagaggtggacaaaggttagattgcactagtgtcttccctgttaacattcctttcaggtctcagcagcatcttaacagaaagtagctctgggagttatttcccaaacctatccaaggtggccttagactgatacattgtttgaaagtttcagtttaagataaaaaaatggtccccccatgtccagtctttaatctcctcatcctcacaaggcttatttcagaagcacccacccctgcatctaggtgaagggagcccagggaaagcaattccaatagcatgtgtcccacaggcgtcatggcagagtcatggagccagcctgggacagtggagccaactcaagttcacctcgagtccccaactctgctactggccagctctgtggccttgagaaacgtcagcctttctggattcagtttccttctctgaaaagagaggactcttctctaaggtccccttcagccctaacattcgaccacagcaacagagatgagtcgggcgtgttctcatatgcctgacttcaaattcgaaacacctctcaagttagcactcatcctttctggacatagaaggtcaaaaattgggagtgggagggagtaagtgaatctgaatgggagaacacagactgaggctggaaggatagaatgttcttggttttaaaaaatctgcatatattttgtgcattcctaaaatgcaataaagcaattaaatataacccatcatgaaaaacaatttaatgagagaaattattacagaaagctctacagcttaatggggtagtagaaatagcactggacttggagtcctgagacctggatttgaactctaactcttgatctgactggctgtgttacctgggactcaggttaaggctgaaatatgacatatgaaattgtcatttactagcctgcggagcctctctgagcctcagtgtccttgtctacacgacaggaagagcaacatttatgtgtattagatgaatctggaagcctcatcccagtgcctggggcattgcagagccctgggagacatcagttgagggtgagtagcatgccccacacacaagccagagactgggatatggtgcagagagccatagaccagaagtgagccagcttctgggcctggttttgctaactaaccagatggctctaacctctgggaactttggtttcactttccataaaggaccaactggattgggttaacctgtccagctctgccgttctggggagtctttgcaaccgtgtgcctccatcagttccaggcctccgcgtggccctctgcacccctggcctccttactgtgcctcgcacctgtgtcaaaggacaggtctggcctgcaatgtccctatgcttcagtcagctcatcaggacctggaatagatttgtggaggggagaggttgaaactcatggatgagagtaagcattggggattatctgtgaggttcatttgtccatttcactcctgtccccaattacaaaggggactgaaaaccagttgtgttctcagtggctgaaagaaatctcctaacctttataatcctttcttaaaaaattttcccatttttggccaggtgtggtggctcacatctgtaatcccagcactttgggaggctgaggcgggcagatcacgaggtcaggagatcgagaccatcctgggtaacagtgaaaccccatctctactaaaaatacaaaaaactagccgggcatggtggcagatgcctgtagtcccagctactctggaggctgaggcaggagaattgcttgaacccagaaggcggagcttgcagtgagccggattgcaccactgcactccagcctgggcaacagagtgagactctgtctcaaaaaaaaaaattcccatttttagcttagggtgttaatcaaactccttccccttcctctacgtcaaggatgtgctataaatgaactggaaactcctttccttgttccctctgctacttccctgtggactgtagagtccgaagcccccatcccaccccaaggatgttcctgacttctacatttgcaacatcagaagcaggaggagggaaggcctgtctcagggcaacaagcccggctgtcccagcagcttctgtgggctccgacacagccttctttccctctccattcaccccccgaccccgtggtgccacgactccccatctggaagaacagtcagccacatcctgcctgtaactgcttcacaggatccaaaaggaaaatatcagctaacagcagcctgggctagctggggctgtgaagactttgccctgcaaaagagtacccttccttacagctgctggcctaggtttactatggaaaaaagatggcattaccttcaaccagccatctgaatccctcacaactagggatctactaatagctgccctcctccccacttgttctcaatcctctatgaggcaactctcaatgttaccattgaatctcagaagttgcttgcttgcttgctttctctttctttctttctttctttctttcctctctctctctctttttctttcttacaaggtctcactctgtcacccaggctggagtgcagtggcgcaatctcagctcattgcaacctcccctcactgcaacctccacctcctgggttcaagcaatcctcccacctcagcctccccagtagctgggactacaggtgcatgccacgatgcccggatttctgttgttgttgttgggggtagagatggggcttcaccacgttggccaggctggtctcaaaactcctgacctcaggtgatccgcccgccttggcctcccaaaatgttgggattacaggtgtgaaccaccatgcccggccagaagtctcagaagttgctttcttctagaggtaccaactgtgagacagagctggcaacccctgtgctgtgggtggacaaaatgactgggcccaccacagcaagggtgtgtttgtagttttatgaccagatttcacataagcctgtgctcacagcacatgtatcgcaaaacacaggagctgtgtgtaagggtgcgttcttattctgagctgtgtggccaagctgctgcgtggggtcgggggagctccctataaagtacatgatgtgagcattggtggagatgaactaagctaactgggatctccaatgtctcaaagacagcatgtgtcccacaggcgtcatggcagactcatggagccagcctgggacagtggagccaactcaagttcacctcaagtccccagctctgctaccggccagctctgtggccttgagaaacatcagcctttctggattcagtttccttctctgaaaagttcctgacttctactctgcaacatcagaagcaagaggagggaaggcctgtctcaggcaatgtaggcaatatcttccagttccagtaaacaggttctgacacccgaggcagagggataaggaagattcacttcagctccttcctggccctgcaattgctgcccatgaatccaagaatggcttgatcagagctgactgagtgccttctatttcctcctcggaactaaagggcactttcatttctagcatcataaagtgcttatttcggatgtgccaaccaatgagcacatctgtctgcactgttgtccacagctcctgctagactgaactatttgcaacacatgggatccaaactctttgagtcagtgtgttagaatgtgcacacagctgcaccatggccaaccagtggacaaaggatctcaaagtgggtattttggcctggatggtttcaaataattaacagtgaatatctttttttttgagatggagtttcgctcttgttgcccaggctggagtgcagtggtacaatctcggctcaccgcaacctctgtctcctgggtccaagcgattctcctgcctcaggctctggagtagctggggttgcaggcatgcaccaccacacccagctaattttgtatttttagtagagatggggtttctccatgttggtcaggctggtctcgaattcccgacctcaggtgatccgcccgcttcagcctcccaaggtgctgggattacagacgtgagccaccatgcccagccaacagtgaatatcttgattttgcctctatgtagaaaatctttaagcaatggcccttttcaccaccttttcaatccatttgaagccagaggcttgggtcagtcttaagacactgaaatggacaggcctttttgacgtagttttgtttatacattacctgattctttggcctacctctacaccacagaggaatattcggattgttaccttgttaggagacaaacagccaaaggaaaaatattgaaacctctgttccatcatctatgtatgtaagaactagaaccagtgactgctttgttctcttcttctattaaaaactatgggaatcagtagcaaacaagcttagaaaatgcaagcttctgctttacccaagcaaaagatatggccagaagctataccagcgttatatcccataaaagaaaaaaaactggccaggcacagtggccatgcctataatcccagcactttgggaggccaaggcgggtggatcacttgaggccaggagttggagatcagcctggccaacatggtgaaaccctggatctactaaaaacacaaaaattagctgggtgtggtggtgcgggcctgtaatcccagccaccggagaggctgagaatggagaatcacttgaactgggaggcagaagttgcagtgagccaagatggcgccactgcactccagcctgggcaacagagtgagactccatctcaaaaaaaaaaaaaaaagaaaaagaaaagcagggaagaggctcaaggtcattgtgccgagggatgctcagctaacctgccccatgtcaaagcctttctttatgtaaacagctgtagattgacatagaatcatgaagctggtagatattcatggcatgccatttggatggctagatagttctaaacagtatcactttttgtttttgttttgctttgtattgttttgtttcttaaatttctatctaaaagatgtccttaaaatgagcattgctatgtccaagaagttgcagcattataattcttggaagtaataatttgcttcaaagtaaggtcagtcaccatcacatgccatagtgatttgtctgccaaagttctatgcagcatactagaacttggctgagcgtgcacgaagctcaactaattaaaaccttctcaacaaacttgtcttggttagtttgtttgatacaatatcctttgttgtaacattcagtctggttgtttttccatttgctttaaatttagcattgccacataaaaaagagacagagaaaataggacagcttgaagaggtgtaaaaatataattactcttttgaaagtatgcatatttatctattttttgctaacccccgtctcacttgtctttccacttggctaaatagacgaatgttcctggctcatggatatacagcacttatgggttacttctaattgagaacatcccttactgcaatttctatgccactgattttagtacattttaaaaatttcttttgcatcaaaaaggaaatcaaatgaaagcatatcaggcttgaaagaccactggtggtactgtagaacttccacaagccaatctgcaaaaacacttcaaatctctgaaattttgttcaacaggaaggaaggaagggagggaggaagggagggacggaaggagggagggagggaaggaaggaagggagggagggagggggggagggaaggaaggaaggaagaaaggagggagattcatcaagaagtattttcccaaactacacctagttgtgacaatatttggctcaattttataaatctattacagctgcatctacaaaacaatatgctaataattcacaactcatatgtaagagccatgcagaccatgactgtcttcttcaccagtgttttccctgcccacatgacaaggcctgagaggtgggatgtgctcactaaaaatttactgaatgaatgaatgagtgaatgaatgggtagatgcactgtactacaatgcagaaagaaaactctgccagttctggtggctcacacctgtaatcccagcacttcgggaggccaagttgggagggtctcctgaagtcaagagttcgagaccagcctgggcaacatagcaagaccccatctctaaaaaacaaaaaagaaaagaaagaaaattcaatttagtatttctgtgtctcatcttctgtttgccctgttaaatatgaaactgcaggcaggcaaggccctcatttgtcctgtgcacagttgtatcctaagcgcccagcagcaagagcttaccatgtagcaagacctccaaaatttttgctgaactgttggcgtttatgaatatggataggcccttctcttggaaaattgttgacccaagcctggcacggtggctcacgcctgtaatcccagcactttgggaggccaaggagggcagatcacctgaagttgggagttcgagaccagcctcaccaacctggagaaaccccatctctactaaaaatacaaaattagccaggcgtggcggctcgtatctgtaatcccagctactcaggatgctgaggcaggagaatcgcttgaacctgggaggcagaggttgcggtgagtcgagattgtgccattgcactccagcctgggcaacaagagtgaaactccatctcaaaaaaaaaaaaagaaaagaaaagaaaagaaaattgttgacccagaaatctgaacttacaaaagtaaataaattagaagacaattctgaattttacaaagtatttattacgggtttcctttcataagcaggccttgaaaacatgccttaactttaaagtcttcatgtaacttttatgaagaacatgtgccataggatgcaagatacagctgactgccaggactgtgcaatcacagagccatttccagacggtcagagttagaaggctgcgcctccctgccactaggtcaaccactaggccacaagcaaaagactcggctaaggagtgaaacaggcaatggcaatgttatgggctggattttgtcccctcaaattcttatgctgaagtcctaaccctctagtacctcagaatgtgactagagataaggtcttcaaagaggtaattaagttaaaaagagttcattaggatgggcgctaatccaatctgacaggtgacctcacaagaaaaggagattagggtacagatacacacacagggaagaatgcatgaagtccctgggataaggcagccatttacaagccaagggaaaggcctcagaagaaaccagtcttgccgacagcatgatctctcatcctcagaactgggaggaaatacatctgtgttgtttcagccactcagttggtgatctctattacagcagtccttagcaaaccgatttagacaggtaagtggaaatgtcttcctttagactcccttctactgttttacagactagaaggataatatagaagtgtccaagttccaggcgagactatcagaaggcaaaagcaaacgctgcctcctgctctttcccctccgccccacccactccgccaccctgtaattgtcatctcggctgggtctctgtctccattgtgccctgaattaattctccctggatgcgaggtggtggtgattccacagagagagctgccttacagatcagcatcacgtcagtgtcccaacagaaaacaacactggaaaattatttgcctttccttttaacaatcaacaagaattcacttagctcccactgtggtgaagtcaggggaccgaacctagcagggagatgggtatagtttctgacccttaggaaggaaacccatctcccttctcattgtccaaatacactcacgtcatttggacatttttcagcaattacttttgcaaacgttgtagaaaaataagtgacttagtaagtcctgagccttcacttaagaaattggcctgggccttactgaatagggggtagaagagggaaatggtccatgtgtactcttttatagacaaaaaaagttacattctttcactgaaaaaaggccaaccatcatcaaaacaatttaatacattctacctctttaatagaagctcaaatcaaatgtctcactcagtcaaactgagttaggagagaagccatctgccggctcccagttcagctccagcaggactgttttgaacaccatcggctgagtcctgttcgtatcactaaaaaattatcttaactgctcgctgcaaaaagtaatttgcccagcattgtccattcctcggaagcagaactaatgtttcctgtggctgtgaatggctgtgaaacagcatcacaagataaatgcctacaggcagctggagaaagtgagctgccatcagagaggagtcctctgacagaagtggtgagacctaagggtcacatgcaaggatagccacaggccactctgcaaatcaataatcaagaccctgaaagaggggcagttctgggaagtttgggctgcataggcaggtgcataaggagcctcaggaatgctgctggattcagactctggtccctgtgtcacctctcaccctcatgtataaggcccaggaaagtagaatgtggtgtgtgtgcatgtgtgtggtgtatgcgagtgggcactccgtttctgaagtgtctcctacctttcccccttccctcctctcccctcctctcctcttctctctctctctctctctctctctctctctctctctctctctctctctctctttctctctctgtctgtctgtctctgcactcattcctaaggcccctgatttggcagtggagctactgacgggtggagagagatcctttgttagctgggcagtgactctggggtgcagacagctggggagaagcttgacaagacaaagaaacatctctgcctgtctcaggccttccccaccactggattctctctccctgggagactttgctccttctccaaggctgccctggtgtgccgcctgtgtttgctgagcccctccaccctgctgaacaccctgggaggctgatgggcatgcattataccaacaagctgttccggatgaagaatggggagcattg

SEQ ID NO: 408 - DNA, 3111 bp, Homo sapiens
ggccccgttccatttccacagctcctcctccccggccgcgcgcccctcccgccccgcgcgcgcctcctctttctcgcggccgagttcagcccgggcagccatatgggggatacgccagcaacagacgccggccgccaagatctgcatccctaggccacgctaagaccctggggaagagcgcaggagcccgggagaagggctggaaggaggggactggacgtgcggagaattcccccctaaaaggcagaagcccccgcccccaccctcgagctccgctcgggcagagcgcctgcctgcctgccgctgctgcgggcgcccacctcgcccagccatgccaggcccggccaccgacgcggggaagatccctttctgcgacgccaaggaagaaatccgtgccgggctcgaaagctctgagggcggcggcggcccggagaggccaggcgcgcgcgggcagcggcagaacatcgtctggaggaatgtcgtcctgatgagcttgctccacttgggggccgtgtactccctggtgctcatccccaaagccaagccactcactctgctctgggcctacttctgcttcctcctggccgctctgggtgtgacagctggtgcccatcgcttgtggagccacaggtcctaccgggccaagctgcctctgaggatatttctggctgtcgccaactccatggctttccagaatgacatcttcgagtggtccagggaccaccgagcccaccacaagtactcagagacggatgctgacccccacaatgcccgccggggcttcttcttctcccatattgggtggctgtttgttcgcaagcatcgagatgttattgagaaggggagaaagcttgacgtcactgacctgcttgctgatcctgtggtccggatccagagaaagtactataagatctccgtggtgctcatgtgctttgtggtccccacgctggtgccctggtacatctggggagagagtctgtggaattcctacttcttggcctctattctccgctataccatctcactcaacatcagctggctggtcaacagcgccgcccacatgtatggaaaccggccctatgacaagcacatcagccctcggcagaacccactcgtcgctctgggtgccattggtgaaggcttccataattaccatcacacctttccctttgactactctgcgagtgaatttggcttaaattttaacccaaccacctggttcattgatttcatgtgctggctggggctggccactgaccgcaaacgggcaaccaagccgatgatcgaggcccggaaggccaggactggagacagcagtgcttgaacttggaacagccatcccacatgtctgccgttgcaacctcggttcatggctttggttacaatagctctcttgtacattggatcgtgggagggggcagagggtggggaaggaacgagtcaatgtggtttgggaatgtttttgtttatctcaaaataatgttgaaatacaattatcaatgaaaaaactttcgtttttttttttgtttgttttgtttttgagacagagtctcactctgtcacccaggctggagtgcagtggcgcagtctcggctcactgcagcctccacctacctggttcaagcaattctcctgcctcagcctcctgagtagctgagattacaggagcctgccaccacacccagctaatttttttgtatttttagtagagacagggtttcatcatgttggccagactggcctcgaattcctgacctcaggcaatccacccgcctcggcctcccaaagagctgggattacaggcgtgagccaccgcaccctgccgaaaaaaacttttttttttttgagacggaggctcgctctgtcccccaggctggagtgcagtggcgagatctcagctcactgcaagctccgcctcccgggttcacgccattctcctgcctcagcctcccgagtagctgggagccagcgcgcccagcctaaaaaacttttcaagtcaatattactacgatttaacattagagtgtggacatgtgatttaatcgctatagctaaaatacgtcaaatatacgttgtcatgtgcttgaacatgatgctaaccctgacaggatgaaggaaagtaatattctttcagtgtagttcaggagagcatttgttttcttttctaccaattaacccatcattgcttttaaacaaccatctgaaggagcagagaggcagggtagaagacagaagggggatctatgtggtaactaaagaatgtttctgttttgttaattattgtgtgtgtgtggttttattgtttgcttaagagaatcaaaaactgaaaaaaatgagaatacaggaaatggctcttgtttatttttttgctgtgtttacagcttgttaatgctctactgtctttgtttcaagagagatttgttcactgcccagctcgttttgtgtcctgagccctatggccagcccaccttataaatcatgcctgtttagatgtttgattttgttctgtttgctattgttatcttaaaggtgtataactctgacatgccagacatcaaattaagctcaaattaagctctcgtttaaatgtttaagcacctaatttatattctaattgatcccagccactgatgcatgtactttagctacttctgctaaataagcatattaattttccacatcagaccatcagatcttgagaaccaacagttatctagaattccgtgtctactaatgtttcacctgcatgcagccttcattaattttgtagcaaaatataaagtgatcattatgtagcttctggattaaaaaaatttgtgtgtgaagttgctttgtaaagtgcatgtggaattaatgggacagtgtgccctttgtgttagatgttagagcaaaagaaagggcttatagtgttagtattggagcactttgaagatagatattttcagaaaagatgtaggatttaaaagttaaattttaaattttagaaaaagatatgatggcaattggaaatagtcacaatgaagttcttcatccagtaggtgtttaacagtgttattttgccactggtaatgtgtaaactgtgagtgatttacaataaatgattatgaattc

SEQ ID NO: 409 - protein, 322 aa, Homo sapiens
MPGPATDAGKIPFCDAKEEIRAGLESSEGGGGPERPGRQRQNIVWRNVVLMSLLHLGAVYSLVLIPKAKPLTLLWAYFCFLLAALGVTAGAHRLWSHRSYRAKLPLRIFLAVANSMAFQNDIFEWSRDHRAHHKYSETDADPHNARRGFFFSHIGWLFVRKHRDVIEKGRKLDVTDLLADPVVRIQRKYYKISVVLMCFVVPTLVPWYIWGESLWNSYFLASILRYTISLNISWLVNSAAHMYGNRPYDKHPRQNPLVGAIGEGFHNYHHTFPFDYSASEFQFNPTTWFIDFMCWLGLATDRKRATKPMIEARKARTGDSSA

SEQ ID NO: 410 - DNA, 915 bp, Homo sapiens
tcccgccccgcgcgcgcctcctctttctcgcggccgagttcagcccgggcagccatatgggggatacgccagcaacagacgccggccgccaagatctgcatccctaggccacgctaagaccctggggaagagcgcaggagcccgggagaagggctggaaggaggggactggacgtgcggagaattcccccctaaaaggcagaagcccccgcccccaccctcgagctccgctcgggcagagcgcctgcctgcctgccgctgctgcgggcgcccacctcgcccagccatgccaggcccggccaccgacgcggggaagatccctttctgcgacgccaaggaagaaatccgtgccgggctcgaaagctctgagggcggcggcggcccggagaggccaggcgcgcgcgggcagcggcagaacatcgtctggaggaatgtcgtcctgatgagcttgctccacttgggggccgtgtactccctggtgctcatccccaaagccaagccactcactctgctctggggtaacctacttctgcttcctcctggccgctctgggtgtgacagctggtgcccatcgcttgtggagccacaggtcctaccgggccaagctgcctctgaggatatttctggctgtcgccaactccatggctttccaggcagcagcagaagtggtcctgacccagatgccctgacagcttttcctggtgtgattttggaagttaacccttgaacagaatgggtttgaactgcgcagcttcacttaaatgcatggattttcttctgcctccaccacctctgagacagcaagatcagcccctcctcctctcagcctactcaatgcaaagaagacaaggatgaagacctttatgatgatccacttccacttaatgaatagtaaatatattttctcttcttatga

SEQ ID NO: 411 - protein, 142 aa, Homo sapiens
MPGPATDAGKIPFCDAKEEIRAGLESSEGGGGPERPGRQRQNIVWRNVVLMSLLHLGAVYSLVLIPKAKPLTLLWGNLLLLPPGRSGCDSWCPSLVEPQVLPGQAASEDISGCRQLHGFPGSSRSGPDPDALTAFPGVIVNP

SEQ ID NO: 412 - DNA, 2089 bp, Homo sapiens
ggccccgttccatttccacagctcctcctccccggccgcgcgcccctcccgccccgcgcgcgcctcctctttctcgcggccgagttcagcccgggcagccatatgggggatacgccagcaacagacgccggccgccaagatctgcatccctaggccacgctaagaccctggggaagagcgcaggagcccgggagaagggctggaaggaggggactggacgtgcggagaattcccccctaaaaggcagaagcccccgcccccaccctcgagctccgctcgggcagagcgcctgcctgcctgccgctgctgcgggcgcccacctcgcccagccatgccaggcccggccaccgacgcggggaagatccctttctgcgacgccaaggaagaaatccgtgccgggctcgaaagctctgagggcggcggcggcccggagaggccaggcgcgcgcgggcagcggcagaacatcgtctggaggaatgtcgtcctgatgagcttgctccacttgggggccgtgtactccctggtgctcatccccaaagccaagccactcactctgctctgggcctacttctgcttcctcctggccgctctgggtgtgacagctggtgcccatcgcttgtggagccacaggtcctaccgggccaagctgcctctgaggatatttctggctgtcgccaactccatggctttccagaatgacatcttcgagtggtccagggaccaccgagcccaccacaagtactcagagacggatgctgacccccacaatgcccgccggggcttcttcttctcccatattgggtggctgtttgttcgcaagcatcgagatgttattgagaaggggagaaagcttgacgtcactgacctgcttgctgatcctgtggtccggatccagagaaatacacagcacatccagaaagaaggaagagctctcaatcaagaggcagcgtgtgagatgcttcgtgaatggcatcaagggcatatattgaaagtcacccttcccggattacacattttagctttgttacatactcattgtaaccactccgaaaagtgctgcttgatgctgcgtgctctttctgtgtccctggaggtattctgaaggtcagaagagagatatacaacagcgaggcttggtgataacgtatagaataacagacggggactccacacccaggccttttttaacggtgtgaagcatagacagagctgcagtctgtgctaacattaggttatttattgattcaatcagttgacacaaggaggcagctacggggaggtaaaatatggtcctaaaatcaaaaagatttcagttttgtcattctgtctctgagattctatttccacatctagagcagggtaataatgatacctaccttacaaaattattgggagaatacattagttaatatatgtgaaagtatggaggagatgtgcaataaatatttgtgttattaactacacatacagcactctataggagatattccatttataaaaactttaggttctaaaaacctgtacacgttgattatttttgtaagtcaaaagtgattaagaggagtttaagctatcatttccagatgtatttctataaataaaaacataagtatattcagttgatttggggtggagagttccatagatgtctgttaggtccgcttggtccagagctgagttcaagtcctgaatatccttgttaattttctgtcttgttgatctgtctaatattgacagtggggtattaaagtctcccactattattatatgggagtctaagtctccttgtaggtctctaagaacttgctttatgaatctgggtgctcctgtattaggtgcatacatatttaggatagttagctcttcttgctgcattgatcccattaccattatataatgcccttctttgtcttttttgatctttgttggtttaaagtctgttttattagagactaggattgcaacccctgctattttttttttttttttgcttgataaatattcctgtatccctttattttgagcctatatgtgtctttgcacgtgaggtgggtctcctgaatacagcacaccgatgggttttgactct

SEQ ID NO: 413 - protein, 254 aa, Homo sapiens
MPGPATDAGKIPFCDAKEEIRAGLESSEGGGGPERPGRQRQNIVWRNVVLMSLLHLGAVYSLVLIPKAKPLTLLWAYFCFLLAALGVTAGAHRLWSHRSYRAKLPLRIFLAVANSMAFQNDIFEWSRDHRAHHKYSETDADPHNARRGFFFSHIGWLFVRKHRDVIEKGRKLDVTDLLADPVVRIQRNTQHIQKEGRALNQEAACEMLREWHQGHILKVTLPGLHILALLHTHCNHSEKCCLMLRALSVSLEVF

SEQ ID NO: 414 - DNA, 957 bp, Homo sapiens
ggccccgttccatttccacagctcctcctccccggccgcgcgcccctcccgccccgcgcgcgcctcctctttctcgcggccgagttcagcccgggcagccatatgggggatacgccagcaacagacgccggccgccaagatctgcatccctaggccacgctaagaccctggggaagagcgcaggagcccgggagaagggctggaaggaggggactggacgtgcggagaattcccccctaaaaggcagaagcccccgcccccaccctcgagctccgctcgggcagagcgcctgcctgcctgccgctgctgcgggcgcccacctcgcccagccatgccaggcccggccaccgacgcggggaagatccctttctgcgacgccaaggaagaaatccgtgccgggctcgaaagctctgagggcggcggcggcccggagaggccaggcgcgcgcgggcagcggcagaacatcgtctggaggaatgtcgtcctgatgagcttgctccacttgggggccgtgtactccctggtgctcatccccaaagccaagccactcactctgctctgggcctacttctgcttcctcctggccgctctgggtgtgacagctggtgcccatcgcttgtggagccacaggtcctaccgggccaagctgcctctgaggatatttctggctgtcgccaactccatggctttccaggcagcagcagaagtggtcctgacccagatgccctgacagcttttcctggtgtgattttggaagttaacccttgaacagaatgggtttgaactgcgcagcttcacttaaatgcatggattttcttctgcctccaccacctctgagacagcaagatcagcccctcctcctctcagcctactcaatgcaaagaagacaaggatgaagacctttatgatgatccacttccacttaatgaatagtaaatatattttctcttcttatga

SEQ ID NO: 415 - protein, 130 aa, Homo sapiens
MPGPATDAGKIPFCDAKEEIRAGLESSEGGGGPERPGRQRQNIVWRNVVLMSLLHLGAVYSLVLIPKAKPLTLLWAYFCFLLAALGVTAGAHRLWSHRSYRAKLPLRIFLAVANSMAFQAAAEVVLTQMP

SEQ ID NO: 416 - DNA, 83874 bp, Mus musculus
  misc_feature (1)...(83874): n = A,T,C or G
aggtcgaccagctcagctcttcctctctccaggctctatgctgggaagtaggggaaataacccacccatacctttgggggggggggcgcggggggcggagggtgtgattgactctgtagctgatagtgcttcatgaatgtgatgagaaataaaaatgtaagaaaaaaattcttctgaaatgtcagggataattttagagatcccagaagggcttcagaagggcggcaaatcagaaagtaatcccatgcgctgcaggagctaactggccacgggaaggagtgaggtgactggagggatgagaaagctcccctacttcccttttattattatttttagctcactttgtagaccaggttggcctcgaactcagaaatccgcctgcctctgcctcccaagtgctaggattaaaggcatgcgtcaccactgcccagcgttcccctacttcctattggttccttttcaatctctttcccttacattacattaacaatgtaaccactgggccctgctttgtgacacgtagctcacgtttcctcctgggattctgattctaagagcaccgtggcctccaagttcacgctaaaaccaccccttctcttgcctggggaccaacctgtgcagcccttctgctgtcagatctgtgatttcttttacctgtgcaccctgaacaggaggccaagtgcctttggctaactgatggccggcagaggcaccacccaccctccccttgccctgcccactatccctttcttcttggttggaacaatcttgttcccttatattggaactgccgttttttgtttgtttgtttttgttttttggaaggctgtggaatatctaggaggtggagcttggcttgaggaagtgcaccactgggggaggggccttgaggttgataggaagacccctcttcctatcctttctcttcctgattgcaggtgcagcgttaccagctgccacacccaaataaactcttcctcccttaagctacttctcatcaggtattttggtcatggagacaaggaaaggaaagaatatgaacttccaaccctttacagctcccttccacggtcactccttccttggtgtttgcttcttattggatccagatggctagagcttttctcttcgtggagtgaacacaaggggatttcagccatccaaactcatgaccctctgctcccaaagagacagagttccactctgtcgtggttaggaccccaggtttaggatcaggcaagtcaaagtaaaagggctactcgcagtcacgtgacccttaggcagcctctttgctcactctacatctcctcttcccccagctcctcaatcagtgattctcagtcaggacagaccttggcacctcccatcccccagacatttgccatcagagggtgataactctatgtcacaatgggtccaaacagaagcatggaggagaggcccgagataactgctgaatatccaacagtaaagaaagagccctctgcaatggactggtcagcctcagtgtccaccacggcaaggttgaaatgtcctgtgttaaatggagatattcatgggcgctactcgaagagcttgtcttcagaaccgagggctcatccctatctgtcatttctgcctcctttcagtttcctgagtccatgagggcagaggccagatgactctcagccaatgttctgcatcatcagtagtaatggacatgggcagagttgagcaaatatttttatttgttgaaatatgggtcaagtctttccagcctctggaacaaggtccgaaaataagtgagtctcagtatttgttgaatggctggttctgtttgtttgtttgtttgtttgaaaatttcattactgttggcactctgtctggactccacccccacagttacctggcaacagccaggtatgcttctccctacagttacctggcaacagtcaggtaggcctggaccactataaaagggactgcttggctcctcccctctctcttgcctcttcttacctctcttgccctctcgctctccataccctccccccccccccccgctctccacgtgttcatggctggcctcttctctactctctccctctctctgcctttctctgactctactactctcttaactcccctccccatgccctgaataaactctattctatactataccgttgtgtggctggtccctgagggggaagggatgccttggcatgggccctctgagacaccctcttcccccacacctccccacacccctatagaacatatcttactagctctttatcgttttacgatcacaacaattacccactaatgtatgtgctttgggagacttgtaagagacaggcctggtcttctttctccttgtgttctctgacaaggtagatggttcgtcaaagaaatgacttccaaaggcccaagacctctgtcagccaaccatggagcagggagccagaaacaaagtcatggagagttttggataaaagtcttgctgtttaggggaaaaagaaaaagaaaaaagaaaaaaaaaaaaaaaaaaaaaaaaggaaaccaggccaggctttgtgtagcttcactgtgaaacaagagctgttttctgggcccagaacctgctgtgtcccatgtttaatttcttccatctgtctggtatctgacctctgctgccctctaagccattgccacatattgtctgcctatgttcccatataaggccatctctctctctccctccctcttgtcctctccctctctctctctttctcagggttggacagcaacactgctagcttcctcccccctccctccccctgccttccctggcagcctctgctgcctggatggccggctgagagtgggaaggggcagggggctgccaaggaatgcgatcggtttatttttactccagctgaattctttgcttggcccgcaggcctcagccactcggggatgtcacatgccgataagctagtggggtgactaagatctgtggctcaaatctacaacaccccaggtgtgagccttcgtcatggagttgggggcagaggggagggagcaggcaagggacattgaggtcatgggattcgcttgtttccattgctctgggtcctgttcccagaagggcaagtttggtccttctgagaagcaatgtcagggcctgagatctgtaaccactgaggcccatctctgggcaaaactcaacacctgctaggacatgggggtgaagctaggtatccgagtgaactgagtagccttgtgaccctttgagacctcactctgttttcttctctatcaaaatagcaacagtacatttgtttgacactattctgttgttgtaatgaaaacgtgccccatcgggcaggatttttggtctgtcttgttctgtactattgcagtggcccttgtacttgtagtgcctggcacacagtaggtggacacatatgtataaagcaatgccataaaatgtttttgtttagtggcacccaagaaataacagctgatttgaccttagcccattttgtgctcatgggcatctgatagacaccagttaagtgccaggccattttaggcactgaacaacatagcagtggacaaggcaagaaagctagaagatggctcagttgctagaatgctcacttgttcaatatatgtcctttgggatggggtctttccctcagcacagtatcctacgggttcgtccatggtacagcatgtaccagtacttcatgtgtgtgtgtttatatacacagatgcctgcagatgcacatgtgtgcccatactaatggaagccatatatcaatgtccactgtctttctcaattactgtctgtctgtctgtcgagacagggtttctctgtagccttggctgccctggaactcactatgcaaaccagactggcctcgaactcagagttcctcctggttctgctgcctcctgagtgctgggattaaaggcagatgccaccattgcccagcgctacctaagttactttcaatatggtctctcactgaacctggtacccatcattttggcctagactgacaaaccgttgagctccaagcatcctcctgattctccctttccatgcctgacatttccccatggactctaaggatttaaatcaagtcctcatgcctgcacagcaagcacctcatccccccagcccctattttctctgcttcttgggcagactctcgtttttactttacaatgcaccaaccacggtttccttgttcatacattggcttatccatcctttgggttctgtcattccatctggtgccctatcaaaaccttgccctgacgtcacccattcaggagactgagaaggtcttggtcacgtgaggaatgaagcccacctgtgtccctctgttcctggcctcttctcaccctctcccaccctcccgtcaaccttttcccgaatggttctgagttttgtaacagccccagaggcagctctatcgctggctacccttaaatactccccctggaagtctataaatacaccaaacatttagctcaggaaaagaagagagagaaaaaaaagcatcggagaggcatccagaacaaaaatatactttcgtttccatcactggccaatgtgtgtgtgtgtgtgtgtgtgtgtgtgtgtgtgtgtgtgtgtgtgtgttttgtccattttcctctgctttgactctgaagtgtttgcttggagttttgtttttttgttttgttttttttccaaccattagctccacatgggtggagacaaggctgcttagctgaatgtagcaacacacgcctgcaatccagtgcaggagacaagaaaactatgagttcaaggtcagcctggattctgaggttctagctcagaaagagagggaaggtgggggcaggtaaatgtgtttgccacacaagcctgatgacctggatccaatccccagaacccacaaaaagttgggtatggcaacacctatctgtatctcctaccttgggaagtggagacaggagagttgtcccaaagttcacaggtcggtatgaagtatgagtatgaagacacaagcgagctactatttaatgagtcagaagggaggaactgactcctcagggttagtctctgacctccacacaatcaggtttcttcatgcacatatacacataaaataataccaacaaaagttagactatagggagagcgggctgcttcaagagccccctagaggcaaagaaaaccccacaatatgttgatgtcaacccttgcagagtcccttagccacctaccttagccacctttccttcactcttccattaccctgggggtgggccgcctctaccttaatgggattgccaactgacagaggtcatcattgatctgcatggatgactttattattttgtaactgctgaagtctgacgttgagtccctcttgtgctatgaatggactctcatgatagggtgccccactccatgggcacacatgcttagggatgccagcttccaggggttttctgcaggagtgaaactttgagtatgcccactcatcatcccagcctgcagctccattcacaaccaacagctcttctgcctccatgagaagcccgggacaaggactgagagtcattcagaccggaagccacaggacttgtggcatggcctctgtggagtgttcccatcttttctagggccctgtctctaacctgggatacctcttgtctctgttgacccccttgaaaggggggtgtctcctcttctcccccaaagatttcacagcttctgtagcaagtgcagatttgctatgggaagcatagcccagtatcagcaatgggaattgcttcccgaggaggagaaattgggccaggccgtgccacacacggtaatattggagtgagttctgacaggtttgtgaagtgtttctcaaggctgctggtaaatagctctcagccttactgatgatggtttgagcccctgggggaatgtcgggtgatgactatatttcaatccaaatggataaccaaggagtctatataaattgtaatagaattttggctactttatttagcccattcatctggacagtgattttcgggctttgcaaagtgtagtccatttgcaaacacaaaatccattactgggaaagcctgacaaagtgtagcaccaggcatgcatttaattagacctcctggaatctcgtccgtttagctgaatgtttcagagactatttatctttctgccttttaagagagcacatcctgctaccacatgtgcccacaagatccaaccgccagagcggagagagcttggggtacactcaaacctcaattcaggtttccatttagatctaatgactttcatctccacgtagcctagatggccaaggtgttaaatgacaattcttgggtcatgaaatgacccacttctgagtgtgtcccagtgtctgggtcattttcccctgtttccaaaggataagataactcgggtagtgtgcacagccaccccagatgggatggcatcttggaaactggcattcactgaatgctcgttcaggatccagaaatatctcctggtcaggatgataagtctaaatttaaggccccaaacagaaaactagcttggattcattggattctgcacagggaggcttttgtttggaagttctgaactgaaaaggggctggagacggtgcatgtgtggcccccctcagacgtctgtgaagatctagggactctactattacccctgtggacccttgccatcacgagagacagattttttttttttgggtggggaaacaaagaagaaacattgtatccactccatacaatgaatacatgtgcattttctttcgttttaaattatctcctgtgcccttatgtggagctcagaggacgagtttcaggagactgttctttccttccactctgtgggctccagaaatcaaactcaggtcatgaggctcggcagcaagagcctttactactgactcagtttccctccctcccgcctagcacaggctggcctcaagctcattatgtgattaaggatgacctagaatggctgagagtctcgcctttaactcctcggcgctgcccgttttaagtggtgctggggatcaaacccagggctttgtgcattctaggcaagcgctctaccaattcagccacattcccagctttgagacatagtagcagtctctcccaacacaactggccaatacttgctcttgatgaaacaccatctcttcctctgctaacaagcccagcccttccttttggagagccaccctcatccactgttcctggtgctgtaagaaaagaattgattgattcaagaatggtttgaaccggggtgtggtgtccgtgcctatataaggtggagccagggcagagtttgaggccagcctgggccacacaatgagttccaaacaggtctgggctatatgttaaagaccatgtttcaaacaaacaaacaaacaaacaaacaaaccaagcaaacagaatggagtgtggcacagtggtatcccagctacacaggaggagtaccccagctgagacaggaggaccaaagatccaaggtcagcatgggtgacttaccaagactgcttctttttctcctcctcctcctcgtcctcgtcctcgtcctcgtcctcctcctcctcctcgtcctcgtcctcctcctcctcctcgtcctcgtcctcctcctcctcctcctcctcctccttcttcttcttcttcttcttcttcttcttcttcttcttcttcttcttcttcttcttcttcttgagtcagggcttctctgtgtctgttctttggctgtcctggaactcactctgtagaccaggctggcctcaaactcagagatctgcctgcctctgcctcccaagtgctgggattaaaggcatgcgccatcactgcctggcttgcaagactgtttcaaaatcaaatatgaccaaaagcattttttaaaaatttaaaaagggaatcatctccgggtccggggagatggcttaggcattaaaatcatgtgctgctcttccagagaacccaagtttgattcttgtcacacacacataatggctggtagcagtctctaactccatttccaagggtctgatgctctcccttctggcctccatgggcactgcatgcatgtggtgtacacacatgcagacaaaaacatctgtacacataaaatacataaaataaaaatgaacatatgggggcaacagtctaacatcttttgggccaatgagagtcttcgccgagaactttctggaacactaggctgccaggacaggggtaagcctcccagtactagcagcccaccagtactagcagcccattcagagcaaagggggaggagacagagatggggggagagagcaagtcaagatgacagtgaactcttagattaagtcatacaggagtgatatgaacttcccaatgacacagcatctaagcacctgttttagtttgctttctatttccgtaataaactaccatgaccaaaaacaacttggggaggaaatgatttacttagtttacagatcatagtccgtcatcaggaaagaaaaggcaggagcttgaagcaggaaccacaaaggaatacttcttactggcctgcttctcctgagattctcagctacctttcttacatcggccaggcccacatgcccaggggtggccttgctcacaacgggcccggccctcctacacacaataaattaatgatgtaataaaataaaaagcaaggtcggaggtgtaactcagtggtagagttctttcctagcacaggctataggagaacaggatgaggaggtggaggaagagggggtggagcgggaggtgaggtagaagtgacaagctttcagaaccgctgttagagcctgttagaaatctattcaaaatctcaaacacagttcagttagaaggtaccattaggagcttacataccagacttgaccaggcgtctctggggggaaaagaaaagctacccacagtttgtttcagacagaataagcaaggtctctatgctgtaaaactgttgctaggaatgtcttcttagactcctcagtgaatcccaccaaggaatcacagggtgaagtcagttcctcctttcgtctgtagcaggtggggacaccacaatctgtctctgtggaacctgtctctaggtttgtgtgccaagcgcctttaccagttgagctacctcaacaggtcatttggattctttttactggtctttaaacagcgctctgtctaatggagacatgacagtatgattccttcagccatccctgtcccccagtaaatgtcacacatactctgtcatcactgagacatcttggtacatttctctccgtcctgggctgtttaactatattgcctctctttccccatcatctctgtgaggacagaaccaaccctattgggtcttgttctctattgcatttccagcagtcagcagtatggaatgcctaatttatcatttgttagcttgaggttgtggcaagtctggtattacatttactgtttctccaaggatgtctgagcatctaacctagttttcagagtaggcctccatttgtcccggtctgtctctcctctccatgtctgggtctctcaatccatagtttataattgttccatgcatgatttaacctggagattctttcgtcgaaaacctaaattcggaaaccacgcccaatgctttctgaccccaaaccctatcccagtcctgcttcaaacaagtcgccccaagtttggtaaataaatgaatgaatgaatgaaacagcacacgcaaacagcacaggttaagccctttgtcaaggtgagaacggtagacggttcgcaaaggttattatcagcaggagtctaagtgggaataacagccagagtcaccctaggctttctgcagcggttcggaaccccaggtaccagggccaagctttccagcccgaggctccgccctccggtgtgcgcgcgcccccctcctccccgagccagaggaagtgacgtcaccgcatggcaaccgttgccaaggagcggtctctaagaacccgcaagcgccccagtgcctcccgagggtggggaggtggtttcgtgaggaggatttgaggtaacccccgccaactcgcggtcgggaactccgcgaacccccgagtcccgtcaagctgcgcccgctcccggccggtggcggcagcagggcctgtcggggggcggggggtcggccgcgcgggtccgcctcggtctccgggcgtcgcaggaggccgtaggcctgcgcgcgctgccccggctgggccggataccacgcgcgtcctggttttaattcttgccccggctccccctgggtgctgcagtgggtgagtgctggtgaattagctcggccggttgcgctggaagagggagagtaattgcttttgctaattttagcgcgcagcgcccggcgggcagcgacagccctacctggttcaagagcatctctgtcctctgaaagctggtggggcaacgcagctcatttcttttcttaaaaaagtttggaaacttggcgtgtattagttgcgcataatgggtaccactgtattcacacatgcatacatatagtgtattccatcaccccatccccgtttctcgctcttcgctttcctgctcccacggaatccatttcctaacccttctcccttcgacttttttgcccccacctcactccccttttcttttggaggtccaatgagtttaattatggttccccacccctagcaaccattaagttgcctgtaataatcgtgagcccctccccttttcttctcttggcaacattttcttgcttatccagatatttggtttgattttgtgtttctcaaagaagaaaaagccgtatggacaacttctaaattagtttaaatatatgtggatataaggatgtgtattatatttttacagttgaaaacttgagcctctcaagtttttaaaaagtaaagatattctctgtaatttatttatttctggcttgttttttgagacaatgcttctctgtagagtcctggctggccaggaactcactctgtagaccaggctggcctcaaactcagaaatcctcctgcctctgcctcctagcactgagattaaaattgcacactactatccctgagatagtctttatatataaacttaaaagaaaccttaaatttagcaatcatactggttgtgccatcctttcttatcttttaaaacaactttatttccttccttctagcttccttcctcctttccttctttcctttcttccaaatgtcttctaaatgtaagcttcacccacccaattaaagaacccatttcatgccagacttggtggctcttgattttaattccagcactcaggagagagaagcttggtctacaccgtgagttccaggccagctaaggctacacagcaaaacctgttttaaaaggagagaaagagagagagagagagagagagagagcgcgcgagcatgtgtgttggggggggtggagtaagatgctcagggcttactttatgtcttgagtgaaacagtatctgtctcatagttttaactaagaaagcattgagatgactttgtcgtcttgtccacctcaccttttctagtttaagagggtcttatagtgcagcccaggttggccttaaactttgcctccttctttctcagccgcctcacttctgggcttacagtgtggggcagtgctcaggaatagcagttcagttttgttgctgtgattttgacaaggtctcaaggcgcccaagcggctttgacctcacactaagtagccaagcaagggccaccttgaacttgtgatcttcctgcttccacctcctgagtgctgacgttacaggcctgctcacggacctccagttaattcagtgctgggaatcaaacccagggcttcctacatgttaggcaagccatcataaatccccagcccagcacttcattttagtaaagcagtttcccttggtaaagccatttcagctgttaagaaatcagttattcaattttaattaaaaatttaaaaaataaactttaaaatatttattttataaatatgaatgttttgcttgttatgtatgtgtgccacatggatgcctaatgctgcagatgttcagaagatcccctggaaacgaagttaggggtacttgtgagtcaccacctgggttctgggaaccaaacccagggtactctccaatgttttaaggctataatcttccgtaacagccttttatgttcaggcttccaggctgtttgttttgctttccagcttgaggccagtgaacaagttcattcaacctagtagaaaaaaatcaccgcctcagtctcgatttaatgtgttcagaatggaattggatagattcctcatggaatgtacagtttaccagaggggggggggaggaagaggaaggcccctaagaaactagaacaacatacaaagctgcctaaggaaagctgtgccggtggtgtggtgggcacggaggacagacaggctgtgttccttgaggatttcctgagagattgtgagtcccaacagggcctgggagagtggtgagatccaatccagctaaggagggaaaaggaggaacaatcattgttaggcagaaagacaacagcgttgattgaacgtaggtggaagcaggagcagcgactgggctcaagtttcagagtgaaaggttaggttgagttggctcatacagatcttgagagctttatttcataagaaatgagaagtttacaaatgatctgaggagaggtggaggccagaacactggaaactgcttcctcactgaaggtaaaaggaaaccaaggcctgaaatacacagggtagcagagctgaggtctaccaggctaacccagtcatagtaacgtgggggcagggagcgtttggagacctaaacagcactaaagaataggcctggcctgaagtgtatgggccccatttgcattccctggttgaggcaaagcacagatatgggctcagggttgccagatctaattttcaaaaggataagatctggattctatcatggaaataagatttttttaaaatatgaggtaaccaattaaaaaaaaaaaaaagcttgcctataattctgtctttaagccagggtaaaaactgtattggggcggttctaatgtgggtggacattattgtccatttgtctgtgtttaggtgcatcagagttgatactaaagcaggttgatattgaatattagcagcatatacagacttcatactgaaatcttcatattctgatttcttccaacaaaactgtcttgtcctagcattatgtatgtagtgcagacgtatccctctctacctacttcctatgaatttaattctgattttctcctgacatgttagctaccaagactgaggattcctcgctcctctttttcttttccctctgtagttttaagctataacattaatcatgagtgaccaaatcaaattcatcgtggacagcctcaataaggagccttttaagaagaattataacttaatcacatttgattctttgggaccaatgcaactattgcaagttctcaatgatgtcctggctgagattgaccccaaggtaagttttcaagatatttctttgtaatgaaaaatgtaggaggatcgcccacctttgcctcttaattaactgccatgggtgtgtggaaaagtccattcctgggtctcatttacctgctcgtaaggaggagttaatgaactttcagaccactctaccaactcccatttctgttacctacctaaaggttttagtttttttacttttcatttattttgtgtgcatgtgtgggggcatgtacatgctgtgtgcatgtgtgggggcatgtacatgctgtgtgcatttgtggtgggtgtgtacatgctatcaaacccgtgtggaggtcagaggacaacttacaggcatcagtttcctttaccatgtggttcgctgtgatccttgccaggctcggtggcagacccatttttacccagtgagccgtttcactggtccctcagttatctacttatttagacattatttctcttcttctagacacaaatagatttggtcctggaataaagatgtattttataaaaggctttattatattgcaagttagttcatgtctcttattcactttcccattggagactttagaagcttgacattaaaaatgtgactcttgatctgacttggaattagggagtctgtgcttaatctgttttatgaagagaccattctttgtggtatgctgtagcagaacaaacttgtcgatgagtttaaatatctttctttgttaaacacacaaggataacatatctttcaacttctttgtttgttagcaagatgttgatatcagagaggagatgccagagcagacagccaaacgaatgttgaatcttcttggtatccttaagtacaaacctccgggaaatgccacagacatgtaaggatctgctcacataccatgcttcttaaagccgcgttaaagtctgaaactccagatgatacagttggtctttttgggtgacacttggtcctccctcatctgatggccttaggacatcacagaatttgaaaatcaacaattctaatccttctaactctgttttgttgcatagaaagaagtcttaagtaggtcagttcttcctctctcaccagcagtcaggcacataccattttatgatttgtgtcattacataaaaacagctctggggctcgaagaatctgctgctcctccagaggacctgagtttggtggctcacaaccacctacagctccagctccaggggatcatacgctctctactggcctctcagggcataaatgcacacacacacacacacacacacacacagcatatacttacacaaatatacacatgcacgttaatataaataaataaatctcaagaaaccaaaccaactagaatgctgcccagccagtaaagtcttaaggttaactctgctgactaatggtttcagcacagcttcttggatgctccagtgctatgctgaggctgtaaccttctgactaatggaaggcctcatcagtctcacatccatattttaaaagtggttgtctaaagcaatcgggattaaccctgtaagtcacactttgaacaaaggctgccttttctgtgtgctaacgagcatctatttccactttaggagcaccttccgtcagggcttggtgattggaagtaaacctgtgatttacccagtgctccactggcttcttcagcggagtaatgaactaaagaaaagggcatatttagctcgtttcttaataaaactggaggtgccaagtgagtttcttcaagatgagaccgtggctgacaccaataaacaggtacacagcaatgatgaacactgcctgagcccagtgtaaattgctctttaattgttattttagagttccaggtgataccagaagggaaaatggtatcagctcatggtcagctggagttaagtctaaaactgtgggtttttttttttcccacaaatactgtttagtgctaggatctatgaataggaaatgaagatgttcaagtactttctgtgcttagtacttctcccaggcttgagattgcagggcgctgtgctcatcagtaaggcaatcgtgtagtttgtcatctgattgagagagaagctgacgaccttcataattacaccaggacaaatgatagacgttcgttcatcctccctccgcccagttggaatatgttggccctgcagctgagctaggcctgcagtctctcaggacggagggaggataggaagtttgaagttgcaatgtatttttctcatcaacattgcattctgaccccaggtctttatagctagtgatgatgaggattcagctgctctgggtcctgggtcctcatgtcataaggtacttggctgaccaaagactgtagaaacagagtaaccagtgtgggcttcaaagaattttagttttttatactttcacttcatagtagttaggttgatttgggtcagtttgttacaaagtttgtcattctgtctttttttccagtagactatgaggtccatggagacaggtgtcaagtttataatgtccatctttgttttcctccaggatttggtacagtagcttctgtatgttgattgctcagtactggactgaatcaaaataatgaactgaaggctttcatttttcatcagtgtattgttaatggtggcactaaaactatagttagtattgatgtcttaaagccgcagctatacaagtacacaggtcagatgccctagtaggcatttatctgataaaggagacagggatgtgtgtatgtggagtgtgtctgtccctcccaacacccttcataaatgcttcctatatatcacgtagaccactaacagggattttaaaagagtgcattttgaatatatgttatgtatttgataatgtaaataaaccttctagaggaagtttattaatagtatcttttaatatgctcagccaattaaggggataaaaagtaataaagatgttgttcttgaagcatgtccaagggtatatgttttaaaaaagagacacatttagcaaacacactaataaaaattgtgtgctgtctttctcaatgaaaagctttagagtggatagtttgtagatttatagcatattatcagtcacaagtattgatttttctgatattgttatttaaaaaaaccacagtggtgtgtgtggtgctagagtttgaccagatcttaggcatactaggtacatgttctaccactgagatacactttcagacctgacagtgccctaaaattaggataagagctgtggatggtgagtttcattaacgcaactactgtgtattaagcacctatgcggatcatgtcctacagaatgccctagggctgtgaaggtctgtatgacaagttcttaccctcctggctcttgctatttcctggaaggagccagacaggcaactcctgtgttataacatgatatctctgatagacagctggagcaggctttgcttaggatagtggtatctataccactatttattgggatgaatctgtgattcggattaggagggagtgtgtcatgagcgttctcagagggcatagagaaggtaacctgtaggtgggagcatagactgttccaggttggcatagctagagggtagactgtgagagagtatttagtgaggagactgagcagatcttgtttttagatactatctagtgtgcaagaatgtgaggaggttttgttttgtttttgagacaaggctttgatatgtagcccattctgaattcacactcgagatcctgcctcagccttccagggcctagaatgatgcccatgcaccatactgtttttagtgctgttcctccaaggactgaagtgattggtgcaagggagtgggtggtttggtgacaaggacactgctggatggcgctgcaactgctaacctgctgacttcctttccagtatgaagagctgatggaagcctttaaaactctgcataaagagtgtgagcagctcaaaacatctggattctctacagcagaaatcagaagggtaaagaaatatctatttcgacttgaataatgctgtgtttagctttttctgattttagttattcaacatgagttttaactgtatggaaactaggtgaatgactgcttttaatgacctttaatatgttgtgtgtatgtctttgcgtgtagacatacgtattcatgtgtgtgcatgtagaacctagaagtcatctggagtctttctcttctatgtacattagtttttgaggcagaatctctcattgaacctgaagcttaggctaatctgactgggcagcaagctctcaatacccatctccccttacccccagcactgaaattagaggtacgctcagccatgcccagcctttcctttgtcggtctctactgaagaaatcaatgagggcaccaagcgcatgtttgatgttgttatctagcagggatttagaaatacttcattttgaatctttatttgataggtatccttcatatgatacagaaaatgcagaaaagaacaaaaagggaaaagttgcattgtgtttatttgagaactcataatgactccattttgcatttttaaatgagggtcagaggactccctcaggatcccaacctccttagagacagggtttcttgcaggcctgcagctcactaattaggttagactgtctggccagcaaagctccgaggtcctcctgtttcagctccctggtgctgggatcccaggtgtgtgccaccatgcctgctcattgcgtaggtcctgaactccggtcctggctgcagtttgcttggcgagctttgctggcctagccattctcacagtctcaccagtgagtctcacttttttttttttatatgtatctctgtgcgcatctgtgtgggagcatgcacatgtgagtacaggtgtctgcggagtccagagaaggatgttgaagctacaggagctggagtcataggcagtcatgagaagcctaacgtgggtgctgggaactgagctcgtgcatgcatgctcttagccactgaggcatctctccagctcctgctgctttgtagtcatcccgttgtgagtgcattttcattgttacgacagtgaccaaatctactttctgttgtgcttatacattaatcgtgtttacactttggcttcattttcttttgttattataaataatgccatgattatcaacataacttttgcatggctgggtttgtttctttgcagtggtttttaaatgtagaattgcttattaacgcacataaattactttagggcttttaatacatgttctccagaaaatatttttacattctgcccaggcatttaagtactttccttaaagacttgctattctgacttgcatgaatcttgtatttttagaattcctgagttatgagtgctatctttatattctcattaaatcggggacatcaaagtttcttcctcagggaagctgtccctgactccctaaatagatcacgttccctagttcttttcctgtgatggcattcattgcccttataagtgccttaatgtctgtctttctaactgtgtgaagccctaagaaggcagggattgtgtctctgcgtcttcaccactgtattcccagtgcctgacatggtccttgtcatatggcaggccctcggtaggagtctgttgaatacgagaaatgaaaggtgagctcagctctttcagataaggatgtcatctcctgtgtcctgtgagtgaatcgtagagatggaagaatcctgagtctgactttagtttcattcattattactaaatatccttgaacctgttctctgtaacagatttaaaaaccatggtgacagaagaaattaaaaaagagttcagtcacaatcacatgctctcaggacacctgctgttgacatttatctcccttgacggtgaatgatgcacaaagattgcaatgtgcttctttcaagctgtgacagtttatgactttttctcatgtcattaagtagtcttctgtgtcatctgatgacttttgttttgttacattgtggttaatcattgtcagacatttagattctttaaaattttagctgcaaaaaaaaaaaaatttagctgcattggcatcggtaggaatccttatagaaaaagtctgggggctggagacatggctcagcggttaagagcacgaactgctcttccagaggttctgagttcaattcccagcaaccacatggtggctcacaaccctctgtaatggggtccgatgccctcgtctgttgtgtctgaagagagtgacaatgtactcatataaagtaaataaattaattaattaaaaaaaaagaaacagtctgactttgctgggtagtactagtgcatagttttgttttgttttttgtttttttgttttttttgttttttggttttttctttttttttttttttggtttttcaaggacagggtttctctgtatagnnnnnnnnnnnnnnnnnnnnnnnnnnnnnnnnnnnnnnnnnnnnnnnnnnnnnnnnnnnnnnnnnnnnnnnnnnnnnnnnnnnnnnnnnnnnnnnnnnnnnnnnnnnnnnnnnnnnnnnnnnnnnnnnnnnnnnnnnnnnnnnnnnnnnnnnnnnnnnnnnnnnnnttaacaaacattcataaacacacacacacacacacacacacactcacacaaaccatgtaaatcccaataattgacctcaggttgtcagtcttggcaccaattgtccttacccaatgagccatcttgttggccgttgtgaatattttcctagaatagcccatgtacagagttcatagcctgaagggatacacgttagttttatgacttcttacattatttttttaacacagcactatcaatatttcctaaaatcctaccagtaatggctaccattgtacatgtaacctatagtatttctgtatgaccctttgggttttgtttgttttgctttgttttgctttgcttttgcttgtttgtttaagacagaaatttgtttgcttctctgatttctttatgaactattgtagagctgatttaaaagaaggtagtttatttttatttttttttttcttttcacggaggttgacaaaacaattttaaaggtgtgagtcaccatgcctggccattcttttttttcattttagttttttgagacagggtttctctgtagccttgtctgacctggaacttgctctgtagaccaggctggcttcaaactcaaagagacccagttgcctctgtctcctgggcattgggattaaaggtttgtgcccctaccaccaacaaacttcagttttacattttaagaatacaatatgggctgggcgtggtggcacacgcctttaatcctagcacttgggaggcagaggcagatttctgagttcgaggccagcctggtctacagagtgagttccaggacagccagggccacacagagaaacactgtcttgggtgggtgggggggattaccatatgggagctgagcatggtggcataggcctttaatccctgcactcgggaggcagaggcaggcggatttctgagttcgaggccagcctggtctacaaagtgagttccaggacagctatagatatacagaaaaaccctgtctcaagcaacaacaacaacgaaaaaaacaacaaaaaaaaatatcgtatggatacggcatggtggcacatgcctttaattctagtacttgggggcagaagcaggtggatattttgaaattgaggccagcctagtctacatagtaattgccaaggcagtcaggattatctagggagaccctgtctcaaaaacaaaacaaaaccaaccaaccgaacaaacaaaccccccatcataaccttaaaaatagttttgatgggaaattggcaagatgtgtggttggtatttaacagagcagatgggctgtcagcagctgttcgtgcatttagacctgcacaaatttcattatggaaggttttggagactcatgtaggcatatttggactcagagcacaaatgtactggctggcagctttaccttgctgcgctataacctgctttaggtacttttctagatgaatgccacactgccaaacattttttttcttcttgcataaaggagcctggggaaaatgagcatgcccttaaatcaaagagggtctttgttacttgctgctctggctatgaagggatgggagacacagggcttggtcaagcctcacctcatcctgtagactgagtgtgtttttttaataacctctttactgctttttaggatatcagcgcaatggaggaggaaaaagaccagctcatgaagagagttgaacggctgaagaagagggtaagtcgtgagttaccccatacacctcagccccagtcccaaggactggcagagacgtaggaatgcacataaagcttaagccaggcctgggcggccagcggaggatggactcaagtaacacagaaggaaggggatctcccaggcagtagcccagagctttcaaggacctgcgttgaaagcttggctgtcttctctggggagtactgtttaccaagaggaaatgataagtggatgtcgggtcacgtgacctgctaatgcctttctcaaacgtgacagtaccatgcactacttattctcttgctgtaggtggagaccgttcagaaccatcagcgaatgcttaaaatagcaagacagcttcgagttgagaaagagagagaagaatttcttgcacaacagaaacaggaacaaaagaatcaggtatccacaggaagtttatactcaggaccgcagaagtagctcctcttggcattcaaacttgaaaaaaaaaaaaaaaaggaaaatttttacagtttctcatttcctattgatggacccactctttctttaggatgggttttatatgagtgcgtgagtatgtgcgtgtgtgattgtatgtgtgtgtgtgattgtgtgtgagtgtgtgtgtatgtatatgtgagtgtgagtgtatgtataggtgtgtgtgtgtgtgtgtgtgtgagttgctgggaatcaagccaggaacctttctcatgctgcacaagtgctctatgattgagctgtatccccagtcaagactactgtttttctttcctttgtttctttatttcctttttttcagtatttgagggttgaccctcagacacacattagacaagcactctacaatggagctgtatccccagaatttgtttattttttattgtaagatacagtttgcttatttgccactggaatgaaacatgcaggatcatgtgatcagtgaaagcaaaagactgttctcactgccccagacgcagggagcccagtaatactgtaggttagcagctaaccttacctgctgcacaatagagcgatctgtagagcaacctgagacaggtgcagcccagaacacagcacttacacatcatatggagcctgagagggtgctgctgttggtgacagtgtcacagaaactcttaagtgatagtagttggggactcacagtcacccacactgccatactttgaaacttcaccttaaagaagaaaatatttggctttaaagtattactttaaattattaaacatctgccttaaactttaaacatatatttcaaatcagtgtaatttctaaattgccaatttaagctggcagccaagatatttagctctgtgggatctgacttggcagctcagcagtttactgcagtggtgggttccattccctgggcctcggatgggtatttaaggtcagggtctggtgctgaggcattactgcgaatgtgtacaagaaaaccttgttacacaagggaaggcaggcacctctctaagaaatagtttctttaaaaaattattctatcaactttattctttatttattttgtgacaggatcttcctataaagtccttgctgctctggagctgactatgtagactggccttgaactcacagagctcctcctgcctctgtctcctgaatgctgggattaaaggtgcatgccacctccaaactgaagagttttcttgaatcgctagcttaagcagtaactaaagaaaaatgttctggaagcatttttaaaattttgtatgaggggctagagagacgatggtttagtagataagagcacgtgctgctctcgcaggagacgccagtgtggttcccagcacccacataggacagctcacagcttcctatgactaattccagcggatcagacactcttgtctggcacacatgcacacactcatgaatacactgaagcacacacacacacacactcacatacaaaatacaataaataaacagttaaattaacacaaaaatacattgagaaaactagttacatttttggtttagtgcagttattttctcagtacttccctgtttcttctatagagtaggaatcccgtatatctcccattgcttgtctatgtaagcattatctcagtggactgagcaagtaataagttgccttatcgtttaaagctgtttcatgcggtgcagagattgcagagagtgcaaaatcagctgaagagcatgcggcacgcagcagcggatgcaaagcctgagagtaagtgagtcacttcgtgatgcagaggactagaaagtagtaatttaccccaggatagccctgaagacgactcgtaggcattagttgtttcagcattttagaggatcatttcgttacctgtctggtcaaagggaatcctgattttaaaaacaaaaacaatccatgggttttcaaaaatggttttctgcctcctgttttcagtcaaatggtgaccatgatataactgtggaggtggctcgtccctgtgtgcttaggatgtgtgtgatggatggaaaaaatatgaatcttgtcaaggctcaaaagaagaagaatcaaggttggcgattatagcacaacctttaatcccagcacttgggaggcagaggcagtagatctctgtgagtctgaggccagcctggtctacagagtgagttccaggacagccagggctacacagagagaaaccttgtctcgaaaaaaaaaaaaaaaaatcaactcctagaccttgaagctgaatgttttctatggcctggtttgtagggtagcgggtaataaggtggatgttctggctgagctcttcgtagctcgggcaggtgacaagctgttttcatgacccacttaatcccatcccaggcactgaacggctccttgctcatcccaaaggaggtcacacaagctaagagcagagcatgctctcatttgtgttttgaactggagaaatatcacaatgtgaatatctagctgagggagggataataacctataaatagtacatgatacataggataccagtactaaatgcaacagataatcacaggtgttggcaagatgcacagaaattgggaaactcatatttgtttgtagaaatgtaaaggatgtagcttctttgaaaaacaatttagaaattcctcaaaatgctaaaaattattacaatatgaacttctaattctttccttttttattaaaaaacatttgtgagggggcacacatgccgctatatgagtatcaaggtcagaggacaacttgtgggagttggttttcttctatcatgtggttggttttcttctatcatatgggctccatagcagactcggatcgccagatctggttggtggcaagcaccctgacttgctgagccatgtcaccagctccagaaccactgtccctactcttaggcatattttttattatttacttatttatttatttactatatgtaattacactgtaactgtcttcagatgctccagaagagggtgtcatatctggttatggatggttgtgagccaccatgtggtttctgggaattgaactcaggacctctggaagagcagtcactgctcttaacccgctgaaccatctctccagccccctcttaggcatattcttaagcaatgtaaaacatctgttcacacaaaaacatacatgtgtgtagcagcattatttgtaataagcaaaagagttgaagcaacccacatgtacctaacctgtatatttatacagtagaatattgctttgccaccaaagtggatgaagttctaatacatgcttatgacataggtgaacctcaaaaatataactttaagaagccaatcacaaaagaccatgtattgtatggtgctatttatgagaacatccatagaggactggagagatggctcagtggttaagagcactgactgctcttctagagatcctgagttcaattcccagcaaccacatggcagctcacaaccatctgtaatgggatctgatgccctctctggcacgcaggtgtacatgcagatagaacacacatcatcatcatcataataataataatgaggaggaggagatgatctatagaaatagaaatcaatagttttctagggctgggaacaaacaggtagaggtaagtgcctacaaatgagttcagagacttctttgctaataatgacctaataaattgttctggtggttagataactgtttatatactgaaattattgaattgtgcctctgaatgagtgaactttgtggcagttgagtgctagcccaataaagctattaagagatagtgcaggggcttgagtagtggctcagtagttaaaatggtaaaatgacttagcacttgtagctcttacagaggacctaggttcggttcccagcacccacacaactgcttacaaccatctgaatcttcagctccaggggatctgatatcctctctaacacctgtgggcactgcatacatgtggtgtacagacatacagtgtaggcaaaatacccagacacaaaataaaataaactctaaaaaagaaaaggaaaggaaagaaaaaaaaaaaaaagaaatgaataggaaccttgtattgacatgctgagtagccggtacttgtcattgctggctttctggatcatttctcattcatcccgggctaagttccagttccaggagtaagcatacagttagttgtggatgtcctttatttaattctttgtttactaaattttactttttaggagaaaaattctcaacagattttccctacatgtataggacatgttcttcatgtttctcttataaaaggaatatgaatgttctaaccatttcattatattacagctacattacagtatcaagaagtaattcatgtgtcagaaacttagtaaataatccgttagtagttggggcgggttgtgtcatacaaattttcctggggagatgcagcacatgtccactcacagaccagtgtaagatgccaaagtcccagcttagtgaacggtggatttcttagggctacttagaggaatataggcaagggtcacttacagaagaagaagggactcaaagacagctgcatcaccaaagcccaccccagaatgggtgacagctcacagaagctgggagcctggagcacactgcctatttgagtctataggcagctcaatgggttggagaatgtcctttccacatgacccttggaaaccaggacaagtcctcctcctttctgacagcttgccggtctcagagtcttctcagtttgagtagtgtattaatcagggttctctagggtaatgtaacttatagaatgaatatgtatgtgtgtgtatctgtgtgtatactgttatatacaggctgtggtccagctaatccaacaatggttggctatgaatgaaaaatccaagaatctagtaggtgctctcagttgctgaagctggatatctgaactggtcttcactggaatcccaaagaagtagactttaatgccagtgaagtagtggacttggtagcaaacccagagcacacaggcaaagagtaaaaatttccttcttccatttccttccttacataggcatccagaagaaggtatggctgatattagaggtgggttttctcagctcagaagatatggattagaggcttgtcttcctacctcaaagatccagattagaagtgaatcttcctatttcaaattaagctaaaaacccctcacaagtgtgctctccaattatgggttttagttaatgtcagatgtagtcaagttgacaaccaagaataaccatcacaactagtccaagagtaactctcagcagctttattcttacttcaggagggaggggcctggtgaatctggtcaatttcaggaacttcctgaagctattttgagttggttaccttcctggttagggggcttctctgcaggaagtagtgcttcaatgtatagtttctaggaaacagttacacaataggagataggaactgaagtttaaatttggataaaaagaacacaatgttttccacaggcaggagggaaaaatcaagtgaggaaaacacagataaaaagaagatactatatgttatgcatgtactttgtaagtgggcaggaactgaggcctagcctttcctgctcatagctcatgcatgctgggcaggcattctgtcatacttctcagctctctccccagattgccatcagcctttaatcaagatagctgacaagcctctcattactgtggcctttgcgatgcctcctctggtcctgtccccttcctcaagcagatattgatctgttttttgttactgtagggttaatttgtgttttcaaacttttttttttttttttgttttggtttggttttttgagacagggtttctctgtgtagccctggctgtcctggaactcactctgtagaccaggctggcctcgaactcagaaatccgcctgcctctgcctcccgagtgctgggattaaaggcgtgcgccaccacgcccggcacaaaactttttaaagtagagaagtaattagggccagagagatggctcagtggttaggagctctggctgttcttcccgaggactgggttaagccccagcacccacatgcagcttgcaactgtctgtgactccagttctcgggccctgacaccttacacagatctacatgcaggcaaaacaccaatgcacatagaataaaatagattattaaaaatagaaataatatttaagagtcttacgtgtaaaaaaacattttagactttgattccatgcacctgtgcttgtaggaagtatgtaactacctggacatgacaaagaagatgggatggagagttagtgagaaggcatgtggggatgggcgcctgagaggaccccagggcacccttccctcctctaccttttccagtcctggaaagaagtggggggagtgctgagagaatgaatggaaaactcgtgaatttgcattaataaaattttacatgtactatttgtacagcagaactaaaaataattgtaaggctttgggccagatttgttatgcaatcttatacgtaggttacttaagctagaaactcatcatttttaaaagccaagccagaatttgtaaatgtgtaacggaaagatcagaaataaactatgtaaatctctccaggctgggaatttacaataaaaccattattcactgaaaatctgtatatagttgtacatctgccaaagtaagaaaactattaaatcttaaaaatatttactataaattaatactttaaaaaactaaaagcaactaaatctaaaacatttattcaagtgggcacttttctttctcttctccggatttgaacttgttgacctctagctctgcctgcattggtctgaagctggcacagtaccatgtgttgctgtttatgaactattcaaagtttaagaagccaggcaagcctttaatcccagcgctggggaggcagaggcaggaggatctctgtgagttcaaggctagcccagtctacagagtgagttctaggacagccagggctacacagagaaaccttgtcttgaaaaataacgcatgtaagtatacacacatatacacaaagacgggaaagggaagggaagagaaagaagaataaaatacccatgtgtaggagaattcctgggggaaatttgtgttttactttgacccactggcttcttaaatacttagaaggtgaaataggacactgatagacctgctcctgtaactattatttgtgtattttgtaatttaaggaactagtttataaagttagaaagatcctaatatacttttgctctaactatataaatattttatgtaagttatgatttatactaaactaattaacctggaaagacttcagtgatctctatggtactgtacagatgctgcacagagagctttaacacatagccctcgttctgatcacatagcaggatgcggaatatcacaatacctgcccttttgaactaaactttcacttactttgtcttttaaaggtttaatgaagaggctagaggaggagataaaatttaactcatacatggtcactgaaaaatttccaaaagaattagaaagcaagaaaaaggaattacattttttacagaaggtggtttctgagccagctatgggccactctgaccttctcgaacttgagactaaagtaagtgctggtcttcttatagttcagctgtatctgtcttatgataaggacctgtacctgtggtgtcctccttgtgactctagagctagcctgggctaagggttgatagtgctgctgatccgttgtccttgtggagattctagaatgttctattcttcagaataatcataatatattatcatttttttgtctttaagtaaaaaaaaatgcgtacttctcatgtgtactttgactggactttgcttcagaatccactggatgctaatgtattataacatcttgttccctataaataaaacactaatcatttgattatttttaaaagttctcagccaggcagtggtagcacctgcctttaatcccagcactcaggaggcagaggcaggcggatttctgagttcgaggtcagcctggtctacagagtgagttccaggacagccagggctacacagagaaaccctgtctggaaaaacaagcaaaaaaagcccaattctcatgaaaattgattgaaaggtttttacttgatgactctttgatttatttaataagctctccagttaaatgtctaattctgaccacattgcccttttaactcacttaggcaacatggatactcaggtcagatgtggcttacataggaggtcacaggttaggggcttcagacttttgaaggatggatataccaagccgtggttggtttgtttgtttttctttgttgaaggactgatgttacctggctttattactttggaaagagttaatgagtagtataaatggtgtgtatcagtgaattttagttgttccatgtcagctctcagctgggtctgtgaactccctgtcctctgcctctggggaatgtctgactgggttcacattgttacctggtgatttgtaagtcacagcagaggtatgtgggtaacttcagatttcatataataatgtaagaataattcctataaatgcttcaggattgtgtacatatctgattcaatctgtagaagtaatcgaattgtatattatttattattaaatttaagttgtttctaaaagtgctcccaatagtcggcttatacggtagctgggactttgctcctggtgatttccgtaatggaaactgttacatgaactcaagctgaatgtggctgctgctaggccgagttcgctagtgcacatcagcttgggatgttggtatagttgtctggctatttgattggttgcttggtttttctgagagagttctactgagtagctgaagctaatcttaagtatctatcctcctgcctcagcttccctagtgcttagggtttcaagtatgtactaccactcctggctgtcagggagagttttaacatctttaacttttacactgttttaggtcaatgaagtaaacacggagatcaatcagttgattgaaaagaaaatgatgagaaacgagccaattgaaggcaagctctcactgtacaggcaacaggtaaggcgatttgtaactgctggggaagttcttctgtttcttgtctgatggagttaactcatagcttcaagatggtgttgggcactttgaccttgggagggagtctcatgtctctgttatgtgagatctcagttcccacccagagtgcacttcactcccttgtcttttaacatggagtccttgcatgaggggaactagtccttcatcgcttccctttcatttatttttaatcaaaagaaaaatagaatttttaaggggtttgtgcacaatgtacccatctcctgtagtgtttgttttactctttcgaatttgtactatgtcacaatttggctgataatattctaagaatctaagaaaattctagaaggctgggtgtagtggtgcatgcctttaatgcaggaggcagaggcaggaggatctttgagttcaaggccagtctgctttacataacaagttccaagacagccaggaccacattcaggaaccctttctccaaaaaaaaaataaacaaacacaaaccatctctgaaaatcaaataaataaataaataaataaataaatgaaagacagaaaacatttcccgagttctagctcatttaaatgttcattcagctttaagaacatccatttggattatgtaaataatatgtacaattctgatgattctgatgtttgactttatttttaagatttatttatttattatatgtaagtacactgtagctgtcttcagacactccagaagagggagtcagatctcattagggatggttgtgagccaccatgtggttgctgggatttgaactcctgaccttcggaagagcagtcaggtgctcttacccactgagccatctcaccagccccgatgtttgacttttaacctatatcttatttattaaaatgctggagagatgcctctgcagttaaaagttcttgctgctcttacagaggaccccagttttgttcccagtccccaggtcaggcagctcacagaagcctgtgacttcagctccaaagggttcaatacctctggtttccatggatctacacatatacatgatgcgcacacacacacacacacacaggagtgaatcttgggctggagagatggctcagtggtgcagagcaagtgctgctcacagaggacccagtttggttcccagtgcccttgtggcactgacagcctcctgtcaccccagttctagtgctctcgtctgacctccatgggcccacgcacacacatggtgcatgcaaacactgaggcatacacacatacatttaacagaaatatcttataaaaataaattgtttattaaatgtaccaaatgtagtagatagtttggcctttctttttttttaaatattggtattaactttagtgagctgcacttcacggtatttttgaaaagaaggtattcttattttcttccagtgagtggaaatgtacaaactgtacactgggtcttgctccgcgtcccttcctggaaggtgttttcattgcctctcagcatctgtcactcgagggctcgagtatttctctagtgcatatttgggggtttgagtgtttccccagggcctttgcctttcagaatgtgagtttgaccatccatgtttgtcgtggtaaacacccaccggtgagaaggaccagaggagcaggcagtgttggtcaggagcagcaaagctgaccctgaacatttatattggtgaaaatcctcccccaaaaggtaatttcacaagataacagaaaactgaatgtatttactattttattctcatattgactatccaactaggcatccatcatttctcgtaagaaagaagccaaagctgaggagctgcaggagaccaaggagaagctggccagccttgagagagaggtgttggtgaaaacaaaccagacccgggagttcgacggcactgaggttctgaagggagatgaggtaagttgaagcatcccatgactgaaggttatgacagtgaagtttgttctagatcactgacgcggttaacttcttaagtgtatgttggtgtgaagttaattcatttagtaaaagttacaaaaactgaagtattaaatgttttgtcctttttgaggtaatattgacaatttcttgatataagatatgaaagactggagtttttcgaaacagtattccagagtttcacttgtcttttgatttaaattgtgtgtgtgtgtgtggggagggtgtgcttgtgagcatgcatgactgcagaggccagaggtgttgtgttccatagaactgaagtcacagtagttgtgaactacctgatatcagtgctaggacccagactcagtcctctggaagagtagggcgtgctctgagccatctctccatcaccagtgcttttacattttaatgacttaatattggatttatttaagtattaaattataaaagcaaagcaaacctagtagaatcaaatagataagaatttgtctttgttgattaataaagtaagaaagctttattactaaattgctgttagtagtatgcatttgactaacaaccgtgaaagtgacctcatcctgcatgtttatctgttttaaaatgctacattcctatgccctttgcgttttgagcaatgctttaatagttgcgtttatggcgtcagacttgtaagttagtggggcagttaatcttgattgctgatggctgaactcgagtagcaaaataccattcttcattgttttccataaaattagctcaagtgcagctgagggtaaagccagacatcttgaataaagcccagagtcttgtctccgcccagtgctttcttacttagcagttcaagtggcaggccacagctggactccaacaccttgcctgtattctctagcttctagaccccagcagaggctcctttgaaaagctgcacatagccaaacctcattttggactttgagaagttcttgagttaatactgtgaaaaattggccgtgttccttccctgtgcccagcacaagtggattcttcctctgctgcagagtgtcccctgagcttctgactgtagctttccaacgtggctttcagtctaaagggagcagcactgctagtgaggcagcatgtggtcgacacatccttcaggagctgggtaggagactcctgcctgcttcctaggttttatcaactgtgaaggctcagtgccagggcaagtgctgtgaccacagtgctgtggaccctgcctcaggctcactgggcattctctctatgcacatgtggggggaaggaacccagtgacaagctgtaagcctttattttcaagacatcatgttgtgtagaggtatctgacagcagaccaagaatactttttaagtggaaaaagatagctttggaattgctatggtcaacttaatttttgagaaatgtgtgatcaaaactagaacaaatcaagtaaattatttggcatttacctaagagaacagaaggtattggggaacattatgcgtaatttctaaagaacaaatcttggtagaccaattttattttcaactttgatagaggatagaccatatgggcaaggggaggaagcttgctctacttaacattacataagatgggcggccttctctggagtttcttatttggcatcacatggtagtcactcaacccctcttacttaaatgttacctatcggagcacttgatgagagggtgttaagagagagtggcacgaagctgcctgcttgtggcttgtgcctgtaaacacagcactcaggagtgccttgaggcaggaagattgtcagaagtttgaggccagcctgggctacatagcaagtgccaggccagcttggatggactacatagactctgagagaaggtggggaaggagggaggatgggttggttgtatagtgtttataaaggatgccatgacagaacctcgtgcagagtgaggaccgcttaagtgcatccagggagagcattgcacagctgagacttgtccaaagtacggtctgtgtttttactgaccttgaaaagattcttgacttttctgaggattttccgtctgtaaaatggggatgatggtctctaggaaaaacacatcaaatatttgatatcaaagcttcttacaaagcgggctgagtcaccacgtcgcacgtggagccatcattctatgaggggggagggtgtttaatgcacgttggcgtcgtctgagtgccactcatccacatcggcaagtgtgaatgtacagagtgtgcaggatggttaatgccagatgactaggtgtgtctttcctgctcacgatgaagactgactgcattagtgcctacagggtccgtacagcaccagacgctccggtgcgttggcttctgagacttctctggtctcgttatcactgcgtggatattgtggaaactaaaactctagttcacagcttaacatttgagagcagcgttcaaactggagctattagaaaactatgaaataattttctacttgatacataacctagattcaagatggagtaagacagtgctggtaagaattattgtagcagctgttcactgagccattgccatgtgctcagtctttaaaaacatacctttggtaacaataaataaataaataaataaataaataaataaataaataaataaaatgaatggcaaacaagttaacaaaaacctcaaatacccatatctttggtaatggatgtccaacaataggaatgtacttgtgatggtaatcttgttagtgtgattagagtaagagacatgtagaagatcagtgcagtccagttcaaactttttatgtgtatgtgagttttttctgtatgtgtatctatgtgccatgtgcatgcctggtgtctggggagaccagaggaaggagatggagcccctggagttacagagacttgttagccacatgtgggtcctctggaagagcggccagtgcgcttatctgcagagctgattaatctgcccagcttcctgaatagattgttatagtatgaaagtcggactgtttcttatccccaatccaacccttccagagagaaacaagtgataatgcatctttaaatcatgtcaggcctgtctctggagacagacacagaaatactgttctgtgggtttgagaaatttgagtagcattgtactgtgttttgagtagaagccaaagaatctcctcaaacacctgtgtagattctaaaaataataattgcatatatttttgacacattctaatgtagtttttttgttctagccatggaacagttttaactattagcttcttatttgagttaacaaattcctttatggtgttagtttcttttgttttcctcagatactttgtaatttagataatattaacatttttttctgtaacttttatgggttttgagtggctcagggtatctggggtttgtatagcctttcctcaagctcaacattgtattttcacactatagcagggcaacatctagaagaagggtcccagcagacagggggggcatgttcacatcctctgttgagaacagccacctcatttgttttatctgaacaacgaaaataagactttgtttgagaataaaatttcatgttaaaaagatttgaaagttactgggcagtggtggtgcacgcctttaatcccagcactcgggaggcagaggcaggtggatttctgagttcgagaccaacctggtctacagagtgagttccaggacagccagggctacataaagagatcctgtcttaaagctaaattaattagttaattaattaagagtgaaagtcaatgaataaaataggtgggaatcaccctccacggagcatataggaatatctcagtgtgacttttcaaaatgttatcacttataagagaaaacacactttaatttgtaagttagtttgatattagattctggttaaaaatcttcatatggaggctggagaggcagcttagtgtttctgagcactggctgctcttctggaggatcccaggttcaattcccagcatccacatggaatctgtaattccaggggatccaacaccctcttctggcctttcatggacaccatacttacgtgatgcatagacacacttgggcagacactccacacataaaataaaaataaaatttaaatctaaacaataacataaatccatatatggtttaaagtgcaagtcactgccattattccaaattaagacaactttgagtattggaacaagatcttaagtgatcttaccttttctgttttgaagtgtttacatgtattacacagaagtctcattgggatggagctagagcagctacaccagtagcagcagtaatgagaaggcaggaccaagacggtgtcggtgtcttgtggcaggtgctgctgtcagtgggcttttctacaagtaacaggaaggtgttagctccaggggagcctcttctaggatgcactccctgatgctgtcttcctgctcacaccttcactgtggccttctccagcatatgctatgctgacagcagtctctgtggaccgttatagtctgtagcgctcttgagctcacaagtcaggaaacagtaaagaccacagatgcggcttgggtaccagacacttggaatgaaagcttccttgcttccttcctccctcctcccatcccctgcttccatttctatctacatggtttcattgtgcagcctaggtggcctggaacccaatatatagaccagggtagtctcaaacccacagagatctgcctgtccattgaaaagttgtttgtttttgtttttgtttttttttaaatcagactatgaatattaacaaatgtcttggcactattttgtaagcctcagttgatgagaaaaattaatcattcttcaccctagccatggctgtttacatcttcaagtagttttatattcctgatcacaaggttaaatttgctatttaatatggtagcctgtagccaattcttttggtgtgatattttgccatttttttagtcaacaatctaagcttgtaggctatgttcccagggttttcattcagattggagtatgtcttttgggtctaaattcttttaaagcaccaaatgaacctgaagggtgtgtacattcccctggtccatgggttgagaggtcaccgttgggtgcagcccattgcacccacttccccaccatcaccagacgctcggcagttcggaaaatgtgcttagtcaaatactattataagcagctttaaaaacagccaagcatttcattctgcagccaccaccagaaatcctagagctaaatagggaagattatgaaatcttctttaaggacttcaaagagaagcagcgtggagataagggaatcctggcaagatctgctgcagctgtcagttcccgaaaaattgggaaccaaattttgacacttgtggttgaatcatccgcccttccaagtgagccgaggcaagcctgcctgcctgccgtatttttagagcctttcaaatcgcattgttctctatcatagcagggcctatgggtcctaaaatttcctaagacagagaacaaaattggaccaaataaatttggctcagcttactataatagaagtagtatgtgatgcaggcaatattagattttcagcttttttcttggaacattaacggcaggtgaagcgttcattagagtgagctgtgagctggtggtctgattcctaggagaagcacagagacttgggagggcgtggtccgctctcttaagatagacattcctgggccagcctctgcttaaggctgattgcaaccagcacatataacactgttcattttagactgtaaagagggcacagctaactagctactaccatatgcacataattacatcgttcatgcttgcctgctgagattttctaatttaaagtttaaaatgtaatactaacaggttgggaaaggttgggatagtatttgtgtacgtgtttatgttacactggttatgctgggtgttgtgaacagacggccattttagcagaaaacaaaggttgctttgaaacattttctttttgcttagagtaggtagcagctctgagagcaaacttctgagcctgtgagcggaaaaatagcctgaccaatgggaatgctatctttggacacagcatgtcgtttgtacatagtggcatcccgtccctgaactctttagctccctcaagcctatttctatgcactttttatttaaatatcatttgaccagacaattggcaaagatgtgatttaattgagacatggaaactagcacgggggttggactaatgggatttgagaacagacagtactcattctggtccacttgtaagaagaaacttgagagcttggtggaatttctcatttctcctttaaactatgcatggctcttcatagtcctgagcagcagaacgttcattcctattgtgtagctgtcttgtgaaacccttccagcttaattgctcagaataaaattttcatgctggatattgaagcaaaaaaaaaaaaaattggagtaggggcagattcttgttttcaggtaagtgttcagaacgaggttgaaagtccagtaattgttttgtagttcccggtgggcttgcgaagtgtcaggaataggtcagcccagattctgatcattactgtaaaaggttaggaacacagtaagcagataaaaggagaaagaacatttgtcaaattccatttcgatcatgaaggagctgagtctataatattgttcctaaaggcacagctagcactgtaaatcattaatccattacccaccccagtgcctgcagatagattagttccacataagagcgtgttcccttagcacctacggcctaaaccgaaaagcatgaatcctactgacctaagcattcacagtgggggctgctctttcccaaatgacaacattggattccatgtatataatggtacacaggattgatgatagtactgaattgcacttttctacccaatggcaggcttggagtttcactgtaatgaggacacatttgtttgggtgacctattacagtgcaaaatgggaagcttttatcttaatcttgcacaaatgtattgcttatatcctatgcctttattttccccctttaaaatgacttgtttttttcaaacaagtctcttgactggtgaaatagctcattggttaaaagcacctacttgctctttggaaggaccagaatccacatcaggcagctcacagccacctgtaactccagcctctgggaatttgatgctgttttctggcctctgggaacctgcacacacacttaggcgcatgtgcacacacacacacacacacacacacacacacaccccaaatgatgatgatgatgataatgatgatactactactactaaaatcgtttaaagcctggggatggcactctgtttaagcttttgtaaaagacccaggttcaagttcccatcatccacacagtggttcagaactactcctagctccagttcttggggacctgctgccttcttgtgacctccgcaggcaccaggcacacctttacaattttgtttgtgattggcaaggtggcacagtcagtagtgtttgctgctgaaacatgagggccccagtcagtgtcctccaccaccaaataaaatcctggtgtgatatcagccacatacatgtgcaagttcacacacatgaacacacgcagtgaaacactgtgtctttaaagataaaatgcttaaattttggaatgacttcctttggaagtcattcttttcattttaaatttaccttttcatttccttacatgtgaatatatctgtgtgcacagagcacctgtggaggtcaggggatggcatgagggaggcaaatctctccattcactctgtgggtcccagggttagagctcaggttgtcaggcatggctgcaagtgcctcattagcatgaaactgatttcttttaataaaagacttgcctattaatttgagtgtgtacacatgcacatgcccagcacaggcgtagacacaggaggaagcttctgggagctggttctctcctcctgcctcctgtgcattgccgtctctgttgtttctgagctgcacgattctccgctctgcttcctggcacttttcagacatgctaggatcacagatgtacacggacacatggggctttctgcataggctctcgggacggaacctaggccatcaggctcaaatagcagggactgtttcctgctgtgctgcctgccagctgcttacagtgattcttggaaacatctactttggaattattcttctttagaactattttaaatagcctcttctacattttaaacatttacttattttaaagtgtataagtgtttttctacatgtgtgtttgtgtagcacatgcatgtgtgtgtgtctatatgtacatatacatgtatgtatgtatgtatgtgcctggtaccctcagaagttaggagagggcaggagatcccctagaaccagagctatgtggttgtaaacgcccatgtgactgctaagaccctaagtgcttgtaactgctgaaccatctctccagctccactctagggcatatatttttaaaacttttataactaagcatagaacatttaaggtttttaggcagtggtggtggagggtttttttttgctgttggttttgttttttgagacagggtttctctgtgtagccctggctgtactggaactcactctgtagattaggctggcttcaaactcagagattttcctgcctttgcctccccagtgctcagattaaagtgtgcgtcaccactgcctagtcaaggttttatctttcaagcataatctaagaagaaaaatttcaactaattttttatgttaagatgcattcatttgccagatgtagtagtgtacttttttaatcgcagcacttgggaagcagaggcaggtggatctctgtgtttgaggcccgtctggtctggtgtacatagtgagttcaggacagccagagctacatagtaagatccagtctcaaaaaatcaaaacaacaacaacaacaaattatttataacagtatatgtgtgtcattagcaaaacaacagccctttcatttaggaccagtgtgttgttatttacacaatggaattgcactgttgatattttaacccgtgtttgctgacagaaataaatataaaagtcacacaactttcattaccacctcccttccctctaaaggtcatttacttacctctttgatcagtctggcttgtaaaattcagcaatatttttgaagtatgtccgcagttactttaatgagaacactttgaagcactttttcccaagtgctcacagacccaggacggtggtggtagcagcaggctccttttagcctaaaagtgggaggagaagtctttcaaatcttatttttaatgatggttcttaaatgttttagcttcccttttagcctatagcccaccagaggtagtgggaaagaaagaaaggatacagagtgggagggtggagaagtgaatctacttatagaaaggttctttggagcagctcctatctgtgttgtctggaaatcggcagttcagtttacaggttagcagtgacagctcaatccactggcaaacacttcatggatacactaatagtctaattcagtagcaaactcgaatcagcagcagtacctagcagagagaaacaggcatcagtcttggcacgagtcagtaggagggatccggagggacatcaggagaagttttcagtttgtatctcagcgggcaaagagcagcgaagacaaaagaccagcaagcatttaaggctacctcagccaaactcagcctctgtcactgttcatcagccaaactcagcctttgtcactggtcgttctttttataatccctccaaatttcacatgtcctccatgagtcttgcctcagcatgtgcgtctgtctcagctgacatcactctgccaatcagcctgagtctgcagaagcatcaagaagctgtagcacaccaccagaaggtttttggtgcgtttctatggagtcccaacaaatgcagctccactacacaatgtaaggcggaccaatacatgtgcgccattagcaaagactcttgcatcatgtgtcctttcacgtgcttgctttagcagaacagcctttctcctgtgtcttcagcagaatgttccttcatgagtctgcctgaaaaactccttcgcctgtttgccccagcaaaacaccatccaacacagctgactttccaaagaacccttaagtttccatttcaggggcccagaaagggggaagggagagtatttcagaacagccagtagatctgatggagaaaggcagatgcagaaacatggactgtaggcagggaatggagctcctgtccctgtcctgtcttggatcagcgtgccagccaagacaggggatggggtctcatcagttctttactccactatcctgatggaagaatgcattagtgacttcctttgtggccacttggggatgagttgtctctgtgccagaggccaccaggcctacagttgctcctcagtgtccttgccatcacaggtgacaccactgagtgtgatgcagacttcctgcagcagtcttgccacactggtattcagggatagctcgcttctttcccttcttgttcacctgagagaagagctcgtccctgcctgccgtggatttgtcgtgcttggcctcaatgcaggcctgctgggcctccatgtgactgccattctcacctccttcctggttcccaggatatagctggggacattccctctctggctccacagtggtgagcctggtgagatgggcatgcagctcgctctcctgctggatgagccactcctcgttactgctctggcgctgccgcctgtgcaaaggaggctagtgatgtcatcccggaggttgggctgacgctgctccttgggcaaggtgtaggctcactgcagattggcggggggggggggggggcaggcagtggctgcatcctcactgcatctccagctggcactgcccaggaagaagtgcacctccacagactgccgatccagctccaggacacactggcactcagcagctgtctactaaggctattcttgaatccccaggtagtataggcccccacagtgtgttcccagcaatgctgctgccacagcaggccaccacctctgggtactttttgtgcctagcaccacacctctatcctttccctcctggcccagttaccacaacctgtagaagcaattcttacagtgagcaaacaccttaagataatgttgaggtgtatttcaatagtaaaagctacaacaaaggtgagaaatgacaggaatcataattcctagtttacagaacacatcacaataaaacattctttttacactggttcctcctcaattatttgcagaggtgccttatgggaaccataatgcaccaggctttggttctcagttgcaactaccactttaaaatcttcccaccataaatataaaacaagatatgatgaggctggagaaatggctcagtgcttaagaacatttgctcttccagaagacctgggatcgattcccagcacccgcttagcagctgacagccatccacaattctagttctaggagagcaggttcctcctctggccacagaaagtgcacatacatatgtgcagacaaaccattcatgcaaataaaagacatcagttttggtcttcaagaaagggtttctttgtatagccctggatatcctggaactcactctggcctcaaactcacagattcatctgcctctgcttccaagtgctgggactaaaggtgtgtgccaccacacggggcaaatctttcccttcccttcccttcccttcccttcccttcccttcccttcccttttcccttcccttttcccttcccttttcccttcccttttcccttcccttttcccttcccttttcccttcccttttcccttcccttttcccttcccttttcccttcccttttcccttcccttttcctttcccttttcctttcccttttcccttcccacatctgctagtccttataatcctttcaaatagtaccactccctagtgactaagcattcaaagataggagcctacgggcgctattattattcagactactacagcatctatttttatgtagttctggatatcaacctgtgtttcatgcatgctgggcgagtgccctatgcactgagctacatccttactgactttgttttgctttgctgtgctttgttttgcaatggtgttcatctagctcgggctggcctcaaattcaggtttgtttgtttccctcagactcctgaatgtcagaattacagatgtgtgccactatgcctgtattaatgagtcccctcacgcagtgcttaatttagtcaacataccaattactccagcttcttcttctatatgtcatccacatatcaatcttgtgccccacaggtcatgttatcaccttggtatgtttatttcccatgctctcactgagccttccctatgcctgcgactgactagtctgtgtctgtgtcatttcagcccctcaattctgtccatcactctccatccttggaatccagcctactgatcttacttccataaacattcccagtctgctcagatataacctctgcaggcttcctctgtctattcgattccctgtctttagtgcctggacactctgactgtgccactttgctcctgagcctttgacattggccatccttccaggcaccattgtcaccgctctgagagaggagcctgagggagagcttactctgaccatctctggtacacagttgcgcttacagagacttcctgtgcaagcatcctacgggagccagagagcttgtgcttgcttttttgtgttttagactttgcggtacaccatagtgctaattttcatttctagtgtggtaaacatcgataggtaggatctacataaataaaatcttgaaatctctgatgattttaagaggatcgctgggcatggtggtacatttctgtcatctcagctcttggaagaatgagacaggagggtgatgagttcaagaccagcctgagccaaatagaaaagattatataaagggttcttgagaccggaaagtttgagaatcactgttacagatgcagcagcaaaacacagcagactggtgacaagatgagtcagaggcaagcaggttgttccacaagatctctgcaggtgctcaagaaatgatggagagccaagcttcctaataaagaagtatgggctaaagagggcaattggttcactttttagatcgattataaaaatattataaatagccttctgaagagcagtgtggcagaatatcagaaatgcatgttccttttgactatgtctggggaaaatatcccatagaagttaagaagtgtatatttaatgtagcatggtgacacaaagctgtaatcccagcactcagaagatctgggttgaaggctggcctctgttacatagcaagatccttgtctcaaaaaaataaagtgtttgaagagtcagtgtttttgtactgttttgtatattatttaacagcccagaaataacctaaagttcaagtggtaattaggagcgtccaggaatgagaacagggtgatgtgtttccttctccttagttagccaggagcagcagagcacttagaaggtcacctattgcttctttgtatgcaactgtgattcatgtgaccccgctgtaccctcccctaggtacaatgtacaatgaaggccaaataataactggttctcatagagtacggtgagtaatctgtgaggttgttcttccaccaacagcatctctggcttttagcttttaaaaatagttatggagcccaagctagagaagggagacgggcctagatgttacacggggtaccagatgagcagggctgatattatcctgggcgctttgcccaggacacttttaatagaacgtatagttactcgggattctgaggctgggcttatagctggtgtacacatttattcttgaaagggagaattagcaagttattagaattagactctgggtactttggattgctcagattttttttcagcagcttttgtaacccagccattgaaaatttgctgtgtgggggctggattcctgaggagcaaggctaacttaattatagagaaatatttgaggagccagtcatggtgatgcatgcttgtaatcctagcctcggaaagtggaggcaagagtatcagttcaaggctagcctggctacaggggtcatcccctacctccttccccctccccctccccgtccacctnnnnnnnnnnnnnnnnnnnnccttccccctccccctccccgtccacctccctctccctctgtctgattctgtctttctctctgtgtgtctgcctgcctatctgtctctctgtatctgtctcttccccatcccgtccccatataatcaaactcagtgtgttgtcacctgcctgtagttccagcactaaggaggccaaggccaagtgtcatgtttaggttcagtctagcctggactacataaggagaccctatctcaaaaatccacaaagaaaacaaaggaaaagtatttttgaacttccttgctcttaggctcattttctaaaactgtggatggcaagtccatgggatgctgtgacagggttttaaagatacacacacacacatacacacacacacaccacacacacacacacacacacacacaccacacacacaccactcacacacatacacacacactgacacaacacacacatacacacataacacacacatacatacatacatacatgcacacacaccacacacaccatcaccccatagctcacattgaatatcattggcctgttaagaattgtaatgtttctactgcccatacaaaattttttgctgtatagccaggcatttggtggccttgaatcacaacactcaggaggcagaggcaggtgggtctctgagttcaaggccagcctgatctatagaggccagccagggctacacagagaaaccctgcctcaaataaataaattaatttaattaaattaaatgctgttatagaaacacagtagtctggttataggaaacaaaaacttcatatttccccaccatcactcctcagtgtgtaaatatcaaattaatttatctttggtttgtattgtgttatgtgatttgatcttaaaaatggctgtctgagttgctatcttgagtctcattgaaaaatgttgttaaattaactttagcccaggattaagacaaaattttcaacagttctgagatggccataaacatactactgccattttgtcctgtgtgtttgtatgagtagcattttcaccatggttgatggtaataaaatcaaacattgtggggctgaagagatagctcaggggttaggaacactagctgttctaacagaggaccatgttcaattcctagcacccacatggtggtcacaaccatctgtaactctacttccaggcaatctaatttcctcttctagccttcaccagcatcaggcaagcacacaatacacagacatacatgcaggcaagcacacccatacacataaaataaaattttaaaaaaatcaaatatttaagtggagcatggtgacatcacacacacctttaatctcggcattcaggaggcagaggcaggcagatttctagttcagtatcagcctagtctacaaggccagcagggctacacagagaaaccctgtctcgaaaaaccaaaaatattaaaataaatgtataaatcaaatatttgaagaaacccaaatatttatcagctctgaaaattaatgatgatactctgtatcctctagtgtatctcaaatattcaattgagatctaattagttattttattcattcatttatttattttgatttttcgagatggagtttttctgtgtagccctggctgttctagaactcagtctgtagaccaggctggccttgaactcacagagatccaattacctctgcctcccaaattctcaggttaaaggcgtgtgccatcagtcctctgctgagatctaattctttgggtaaaaatagcatatctttctcatcaacaacaaaggaccagcttagaagaaaaatcctcattggtatagtgtctttgaactttatctttctctcatttctaagattttattcagtagtatagtcatgactttacttagtatgttatttactaaactcaccatcttaaaaattagttttaagaagcaccatacagctggctctcatgcccttaatcctaacactggagggacagagacaggaggatctctgtaaattcaaggtcagcctggtctacatcataagctcaggacagcaaaggctattatatagtaagaccctgtctccaaaactcaagaaacaaaacaaaacgaagcacggtgtattctctgaggttggtaactgtctcaggtgagggggacaggccacctgagaagttatatggaagtggtgtgcatatggcagcctggtccctacgatggaattttcaattctatatgtaatgaaatgcctcttgtattagagacgttccacagcaggagaagacctgggcacggtagaagtgggggtcagtgttcctcatcagcagtttcttgtgtgcctccaacctttccttctcacactgagcagtacccatgtggagccggtgtctcaggctgtgcacaggctgctcctacttcctggaatgctagtcacggcttccttctctgccctttaaggcacttccatgccttcacttttggttaaatgtaacttattccgggaagcttcctatgagcccctcctctaacctgcgtccctatttctgacctttgtcccagcgcaggtttagctactccgtgcccttggggtcccttcagttttttataaagctcaccagcattgtaaacctgggtgatttctttcagcttggtgagtagagagccttgttcagagtagtcgtctctgccgcagttccataatatgtaataagtaatgtttatcatacgactttcttgaatatttgatttcacttggcttttcagcctccagttggtatttcttttttttttttttaagatttatttatttattattatatgtaagtacactctagctgtcttcagacacaccagaagagggagtcagatcttgttacggatggttgtgagccaccatgtagttgctgggatttgaactctggaccttcggaagagcagtcgggtgctcttacccactgagccatctcaccagccccagttggtatttcttaatactaggtctttagtgagtgtagtgtagtcatagcttggctatcacatggaggtaagtggcccaataggtgactgagttcctgccctaatgttcagtattcttaagttcttccattttaggatgagtccctatcctctgcctgcaatgcttcctaaggaaacaagcacaggcatttctcaggtggcaagtagtccctgtggctgactccagttctcagtgtcgagcccagtgagtccagtgcactctagcagcacacagtcattcacaagactccatggcgagaccagggccacagccactcggagcagcttccttctgctttaggccttccgactgtcatgggttcaatggctgggtgggttttttgtttgttcattttttttttaatttcttatttgtaaagtttaaagtgaagagctttttatatgaggactcagaatatttaggtgagttcaaaaatgaagatgtatatatattgtttaattaagcagttagtcttaaggcaggagagatggctcagtgattaatagcacttgttgcttttatagaggaaccaggttcctagctgggtatggtggcacatgcctggccagcctggtctacatagcaagttctaggacagcctgatcagaaaaaacagagaagagccaggttcagttgacagcaccaatgtggtagctcgcaacaaccatctgtaactccagttcctaggggtctgacaccttcccctgacttctctgtctctgcattgcatatggtgcatacatgctaagtgcataaatattaagcaattagtctctactagttgtctaagaaagctaagtttttatgtattggtggttcacggacagctgaaaaagataagaaaggctttctaacacagtgagtttatttctaatgtttgggttctttttgcagttcaagcgatacgtcagtaaacttcgaagcaaaagcacagttttcaaaaagaagcatcagataatagctgaatttaaggctgagtttggcctcctgcagaggacagaagaacttctgaagcagcgtcaggaaaccattcagcatcaactggtaatacagcctcatgtattacgtggctgctaaaatacagatatcaggaggcttgcttatggctcagagctttctgctgaggtcactgttttcactggaaaaatcatccaattattaactttctttgattaattacagagatgtcatataagctgattcatttatttttaaaatacagcagtaagcactgccttttaaaaaatgtgtgtgcctactttggagttattaatagaagttggaagtccaagtgggtttttcttttggttagctagttaatatgagtaaaattatcattccaagcgagtgactataaaacatttatttatcatggcttacacatgcgctctctaagagctttggaaagaaatgcccagggaaggtgctgtgtggagtttgcctgcaggcttggcacgtgatagctgaagcattgctgttgagctgctctgagctccaggtccctgcagctctcttggggtgacattttccctccttttccccatgggggaagctatttcatcaggacgttgctgtgaacagcaatcctggttgaggtcaagggcatttcatatgttgcagttcgacaatatgaacttttcagtgttgtgataatgaacagtctgtttgtagagattttaagactaaaatttactgtgaaccaaacatggatcctgacgacactagtttgaaaactgacaataatacctgcattattgtttagacgattttctaatttccacttggatcccttagccttgacttaaaaatcaaacattgggggcttttcagtttcctcttgtgctgtggacttgtgattccatgtggctgcatgggttgtcagtgtctctcccccctcttacttggactcccgtgacatctgtattagttctagctgccactgcccctgttcctctgttattggtgttacacttgtttgtttagtttagtgttgtgctcacgtgcatgtgtggatgtcagaggatgacctgtaggagtctatcctctccttccaccacatgggctccagggatcagactcacgacatcaggctttgcagcaagtgtccttcccctgagccacctcatcgtcctgtttttttgttttttttaattaattatgtgtatcactttttgtttttttgtttgttttcatttctcagtattgtttcttgcagggatttaccttgggttgctttattgtcttgtcctttgtaccttcttttgttcttagattgatttatttttatatgtataagcatatcctgcatgaatgtgtgtgtgccccatgtgtccgtggtgctcacggaggtcaggaaaggtaatcttagaattagagttaaatggttgtgagctgccttgtgggtgctggaccaaacctgcttcctctgtaagagcaacaaatgctcttaactgagccatctttctaggcctgtttttctgcttctagttcattaatgtgtgtgtgtgtgtgtgtgttgtttatgtatgtatgccagtttcatgtttaaaacatttataaagttcttaatctcagttaatttgtttttccatctttgagtttcctgtttattctgttttatagatcctagttcgtggtttcaaagttcctgtctactaagtttatacagacacccatttctcttctctatttttttttcttgtttttttggggacttggttctgtttctttatccataatatttattggatgtcagaaattatgtgtaattatagacttgtggccctacctatattaattaccttccaaaggaagatttaactttttttcctgaagatttctttaatccaattgatggggaatgttagagctgatattcttctaatttttatttactcataaggacagtccttataccacaagcagagactttattcctcggaattggttgttactattgggcctaggtctggctgttaggttatccctataatctctaagatgcagccctctgaggcattagctggaagccggggcatttacaggccacctatatgttgacaggtgttgagttctacctatgtgtcatagtaccatggaaatgctaaaatctgtgtctgtctcttaagtggtcacacccagtcccgctcagtcctagtgtcttcctcctcagtgcccagctgagggcttggattgctgcccacagatgaggcagcttgcagaactgtatgctacttctccctgattccttcttctctttttatgctagtcctattggtagcccagaaatccaaccctttggaatattcttcaatgatactttttatttttctttgagatagggtcttactgtgtaggctcggctgccctgaaactcactgtgtagtccgagctggctttgaagtcatgatctccttcctgccttagtcttctgagtgctggaattacagtcatgtgccactatgcctggcttccaatgaggttttaaaacttgccattgcacagaaacttctcattaggtcacaagtgccttcaattttaagtatttgtctccctctctcttcccctggcccttctctcccctcctctggtgttttgagacagggtttctctgtgtcgcctgggccatcctaggacttgctctgtagaccaggctggcctctgcctttgagtgctgggatcaaaggcatacaccaccatccagcttgagttcttttcttactcagccttttagcagcatttaaagtagctgcccattctctcttccctgaaacatttttaatagcattaggagctggctcagtccgtgcttgccatgtagtaaggagggcctgagctcagtccttaacaccatagcacagagaagcacaccagtataagcctggcccccgatgcagagactcagtgagctccagacactgtctcaaaaaacatgggagggagtgactgcgaagacacgggggtctgcctctgcacacatgtgcagcctcaaacacgtgtgcacccacacacacattgttccacttgtctaggatgttgcacttgtgtgttttcttccagtctaaggttgctactccattgctgggtcccacttccatacgcccagcagagctttgctcagatgtcatatactttctgcagcaaatctgttctcaccttgagtgtattctacttacttgtttttttattgtgtatttttcctactagaaataagctagttttagaaagaaccccctcctttattatgctcaccctgcgtactagtggctagaactgtgctcagaaaagctagtgcatacggggcagcagataagtggatgagttcactatcacttacgagtgtgtgcattctttacagagctattgggtgcatcgtgtgtttcatagcctacactaagtatgtggcgttatttgaagatctgaaattggatgtacttcctctgcatctccagacagtatggcaactttgagtacaggtttatagtgtataaagacctgtttctggatgagataataattgaagtaaatgcagatggtccattaggattctgaatgactttatgttcttcacaacttttcaacagaaataggaagtgtttcttatgggaagaagatgccaatactcatggcctattcatttcttatagcgaactattgaagaaaagaagggtatatctggatacagttacacccaagaggagcttgagagagtgtcggccctgaagagtgaggttgacgagatgaaaggccggaccctggatgacatgtcagagatggtaatggagcctctctactgcttgcttgttgacttactctgtgtgtgtgtgtgtgtgtgtgtgtgtgtgtgtgtgtgtttaattttcagttaaacattcaaatattcatctctatacaatgcttactttctattcttttgtcatacatgcttgtatggtatcagggttgacctcttggggcagcaagggaaggaacaaaggacagacacacagacacataaatagaaaagcgggaatcaggtgatccaggctctaagaagctgctgctgctgcatacccacttagctgtttactatgcacagaggaacaaggaggggcttagctagtcttcttaggagcagtctctgtagggtatcaatcgttaggcgtaaactctatgggggaagctatggtggacattttctacacactgtcaatttgcacactcaggccagaggaaggatttgcctagagaaggccttacctcactcaccctcaggactcaggctccactcacaccgacagcagcacaccgttgcttgagacttcactctcccgaattcttgcatctatgtggtgttttttatcaaggagttgttccattgtaatgttcagcttaaaacagtgcttattttgtatcttgatgtaacattaaagaaatatctatattaaaaataagaactagaattatttcatctttgtgtatgtctttgatattctagattcggggctgctatcacccaaatacactgggacattttcatcaagcatgatattaaaatcttttcttatttattagtagatagtaatcccagcactcgggaggcagaggcaggaggatttctgagttcgaggacagccagggctatacagagaaaccctgtcttgaaaaaacaaaaaaaaaaaaaagaaaaaagatagttgcatccccaaactcaaagactttccagaatgtatcctacaaactttctggatttcgcccaaatctagtttctaaaaatacttggtgtttagtatagaggaggcctccaggaccccctcttctgtcaggttattcacattacatatattgaaaatcacccgtgcatatttgtgttcatttatgtgacctcctgagttgcacatgtctcatagacaataacattataatggcacacaggtaatttgtagttgctttgtgcttcagtgttagattgcagacatcttctcagcatggtgtgcggtcatgataactggcatttagaaccaataagtggccctgcactttgctacggagttcacatctattaaccagacctcgggcacacatctataatcctagcactggggaagcagagacaggcaaatctctgtgagtttgaggacagccagagctacatagtgagaccctatatcccccaaaaaataagaaaaaaagaaactaacatctattcaatctctttcctactatttggcactaaagtaattaaaagttttatttctttaagtctttacttgactgcagtagtatttttatgtatgcagcactttttttcattttttaaatgacatgtcttttgctttaaatgacaggtgaaaaaactgaattccttggtatcagaaaagaagtcagctttagccccagttataaaagaactacggcagttgcgtcagaaatgtcaagtaagtttgatgtttttgctgtcttgcttaggtggactcttaagtattttttaagggagataatggaaaggaaactagtactgaactgacgcagcataaggcagtgatggtggggcccacaaatcagtgagggctggggagaaggaattcaaactgaaatgcaaaatgcagccagatgaaatttgtaaaaatcatttgcatttgagtgctgtaagtattaaatctcattcttgtgtggccaagtgaggcagagtatcccagcaaggcagccttagatggatgggcttactgttctggcaggcacagcgggcaaacggcaggaggctaagcacaagtgccattacttggaagctagttgtaaccagggctttaaaggagaactgtcagaggtaagtgccctgcacagcatgcacgagccagcggccagccgctaggttttggcagtagtgctgctgcttcatccgtctccggagtaattgtaagtgtgagtgtgagccatcttgcctgtgcctgaggacggaactagaaacccagttctacatgaacaccatctgtcagagttagctccagagtagaaaatcacatagactttgaagtcagctatagacatcatttcctttttatagaaaatgccacacagtctgagataggtttagaagcttatccagacagacaaatgggagactcaaggaagggtcttactttagcctgcaaattcccccccccccccccggggtctttctcccattttgcatagctctggctgtcctggaacactatgtttacaccatgttggccttggatttaaagagatccatgtgcctcttccaagtgctagaattaaaggtgaatgctaccatgtctgcatgtcctgcctaagttgccttatctcagtctatctcattacacactgctgccatcacagaggagatcgaagagacagccctgctctctcaggtttatgctctaagcggtatggtagcagcacataaggaaattcaagcaagataaaagaaatcacatctaaagagcaagtaatgtatatattacttagtatattgtggaataggccagagggatgctatgaaaccagaaaagctgtacgagtgttagcaatggggacttatagatagtgatggtaaatttggtattaacaatatttattaagcactagctatgtaccttgtactctgacatttctcattggacctgacaaacaatccaaagagacaggaacttcctttatggagagaaagaaaggaacagaggtggggagggaggcaggcaggcaggcatagagactagtgacttgtctaagattgtatagtggcagacggcagagcaagtgtctctaacactgcactagtaatgtaatgtgacccctgaatctttggggatcttcctctattcctgccaccttcaagtctttttaccactgtttcttttttccccgtatcatggtccccctcctcctcctgtgggaattagttacgcctccaaccacacgatggcctttctagtcttgttataccagtgttgactactaacttctctgttgcccttgatttatttgtgtgttttgtggtggtagagatggaatccagggcctttcacatgctagacaagcactaaactaggcctgccactaaactattccctagcctttcagaggtttttgtatgttttgttttgttttacttttctgatgctgcagatggagtcccacatttgacacttgctaggcaaagcattgtgttggtaaactacatccccaagtcctaacacccattgtttacattcagattgttgtagttgcccagaactcaggagctaagggaatcccgcagcctttgaggctgtgcctttttattttgtttttgtttcagtttgttttaagtgaagatctcactatgtagtcctggctggccttgaacttgtagagctcagcctgccccagtcccaaagagttggaattaaaggtatgtgccaacatgcccagtgacactatcatacatttaaagaccaagagtattttaaaatattgtatacttttaactttaatgggctatcctcagttatttctattgtatttggaatgcattctaaaattaagttttataactacttaaaatcaagagtatcaccaactcaagatttacaccttaacatttaatcatctgtaactagaataacaccttgaaaagtttgttttcttagaggcaattctattgctgtgtaattaaatggaataactaattacatgcaattgtaattgtatactcagtttagagtatacaatctaatagtttagttttcttgaaatactttttattgattgattgtaaaactcagctggatgtggtggaactggaagggtaagaggttcaaggtcatctctggttacatccacatgttgaacttgaagccatcatagactccatgaaagatcatgtatccaaaaaccctacaaacccccaaattacacatgattcaagctgtgcagcactgtctagggggacgtttggagggactaggatgtggcactcagttggtagagtgcttgcctaacatgccagagcctaggtttaatccccagcaccaagcagagctgggactgtgacaaacactgtaacccagcacttgggctgggacggggtggaggatgattgaggtcatcttgaccatagattctgctgctatagaggggtgcagccgcaccccctacagctttctctccatcctaggcctaaggtgtggccttataccccagcttcaccaagctgctaattcctagcacacagaagccccggattaccttgtaggccttatttctaggcccagccttctcccctttaaagtctcaaggtggcttagagcacttgctgctcttctagaaatcagagtctacatcagagcacccacacagcgcccagtaactttagctccagggttctgataccttcttctggccaccatgggcccctgcacatatgtgacagatgaccacagagacatacatacattgtcttagttagggttttactgctgtggatagataccatgaccaaggcaactcataaaaacatttagttggggctggcttacaggttcagaggttcaatccattatcatcgaggtgagaacatggcagtatccaggcaggcatggtacaggcagagctcagagttctatgtcttcatctgaaggcttctatgaggagactgacttccaggcagctaggataaaggtcttaagcccatgcccacagtgatgtacctaaggccacacctctaatagtgccactccctgggccaagcatatacaaaccagcacattcctgtacatttaaataaaagtaaatctcttttttgtgtgtgtgggggggttcgagacagggtttctctgtatagccctggctgtcctggaactcactctgtagaccaggctggcctcgaactcagaaatctgcctgcctctgcctcccgagtgctgggattaaaggcgtgcgccaccacgcccagcgtaaatctctttttaagtctataaaagtaagaaattgcctttgttctgtggctctgcccaacttgtgagtgagcaagcagtgttgctaaggcgctgtctcggtgcttctctgctaaacccaaagggatcttcattagagagaacaagttcagttgagcgtggggctatgcgactttatcccagcactcaggagacagaggcaggaggatctctgtgagttcaaagctagcctggtctacatagtcagttccagaacagccagaacaattatacagagaccctgtctcaaaaaacaaacaaacaaacaaacaaaaaacagttcaaggccagctaacgctacctgaggccttgtctcaaatatactatttttcctgtctgccccttcatcagagaaagagaatataacttaatagggccttaaatattttccagaagttttatgggagttagtaagtagattttatttgtttatttgtctgtatgtctatttatttacttgtttacttattggcagagtctaattatatagccctggctggcctgaaactcactatgtagaccaggctgcctttgaatttacagaaattcaccagcctctgcttctgcctcctgagtgctggggttaaagacacacagtacagacgtgtttttattattattattaattattattattattatttagttgtgtgtgtgtgtgtgtgtgtgtgtgtgtgcatgcggcaggagtgggacaacgatgagagctagaagaaatcctagaatcctctggatctggattgtagaaggttgtgagctgcccagtgtagatggttgtgagctgcccagtgtagatggttgtgagctgcccagtgtagatggttgtgagctgcccagtgtagatggttgtgaactgcccagtgtagatggttgtgagctgcccagtgtagatggttgtgagctgcccagtgtagatggttgtgagctgcccagtgtagatggttgtgagctgcccagtgtagatggttgtgagctgcccattgtagatggttgtgagctgcccagtgtagatggttgtgagctgcccagtgtagatggttgtgagctgcccagtgtagatggttgtgagctgcccagtgtaggtgctgagatctgaacataggtcctgtaagctgtctaagtacacacaactgctttctttctccacttaagagacatatgattgttacattcattcatttatttattttgttgggtgtgtgtgtgggtgtgtgtgtgtgtgtgtgtgtacatgcacagatgtcagaggtcaacttgtgagagtcagtgtgtggctcccaggggttgaacttggatattaggcttgtcaacaaatccattaccccccaagccacctccctggcttctgctttagctcagtgtgacccatagggtagcggctcctctctgcagctttcgctggtctagttacaccagccgtatgcagtcccaatccacagagacagcacaggcagcaggactctggcctgcaaggtctcagcatgtgcccctgtgtccagggatgctcagtgtgtgcccctgtgtccagggatgctcagggtgtgttcctgtgtccagggatgctcagggtgtgcccctgtgtccagggatgctcagtgtgtgcccctgtgtccagggatgctcagggtgtgcccctgtgtccagggatgctcagcgtgtgcccctgtgtccagggatgctcagtgtgtgcccctgtgtccagggatgctcagtgtgtgctcctgtgtccagggatgctcaatgtgtgcccctgtgtccagggatgctcaatgtgtgccctgtgtccaaggatgctcagggtgcgcccctgtgtccagggatgctatggctaaccacggttgtcttcaggctgatcataactcttccttcttaacccttaaccctttagaagtttcctcattgagagcagcttgggtctacatagggtcctcagttccacctcctcgcctggtgttcccagtgcttcccctaccctgtggctggcattatccctctgcagtgcagactcctttccccaagatagcactgctagtctctgcttcccaagactgatggttctaattccttggcagttcagttcagccttggattttacgagacatttgcttctccttagcaagcatttgcagatactaatcatcactgtgtatttgctagagattttcagattatctccttcaaaatatctaaataaatgtggaaactactaaaagagcttgaattcaccctgcctctgcccttcatagcagtataatctcagcaaggcactgaccttcctgcatgttctttaagctttatgtcagcacctccttcagtattgaagatttaattactgtccagggttctaataggattcagagttcttatcacagcccacgtacatcttcctcctcttctctccctgttctcagattcagtccaaaaatggacactattcacacatccctgaatttttgttctcccttgtttccaatcctttacacacagtgttccttaaaaaaaaaaaaaaaagcatctcctttcccttgctcaccttctaattattcttactaatacctcattctcggtttagatattggtttctccaagatgttgtctccactgatccccaagcctagattaggtttgaaagtcctgtgtgctcctgcacaggtcacactgcagcccgtggctctgggcatcactgaggctccagcagcccgtggctctgggcatcactgaggggcgtgctgtttgttcactgttgtatcccagctcataagctagagcctggcacacagatcagtacacggcagccattgttcttatcagcacctccgcctgtcataattcttgactgtccagttgttgtataaataactcgtcagcatgccaggaagcttagagttaagttacaggactgacaaggacgcgcattgtttccgaggcatggtttctgcctttgttttccacttaatcatctgcccttttcaaactaggaactaacccaggagtgtgatgagaagaaagcccagtatgatagctgtgcagcaggccttgaaagcaaccggtccaaattagagcaggtaagaagagggcttctgttttaacagtgcagccaatgctgcccacctgtgcacattttcaccccctgagtcatgatgttcttacatctttaccgctgccttctagcatgcctccacagtaccagaaattctatttctttaaacttgaatttttctatctgtatgaccaatgcctaaggtcatctcctagagcagacgtgatatcatatataagccaccctccattggcttcccagtacacttgaagtaaacctaaccttcaggctatgttgtatggggttcctgctgctggtcaaggtcatatctgtgtcctgtagtcctcctccttgtccagcatggtggtctgtgtctgaactccaaactggccaagctccgttctacttccaggttactgtgtgtgctcctgtctgcctgggacactcagtgtcttcttcccccttatcctcagcacatagatctcagcctgaaagtcagctcctactgatccctctgcctagagattcccactccccgccgcaggctgacacaccttacagtaccatctccccagggctgaggtgtccacatgaacctgcacccatggggaccactcttcattcctgtttccttgtctatgagaggaagaaccccatttcttcctcactgctatgtccctaattcttacaagagtgctagacacacagtaggacttaataaataaatgagtaactgctgctgaggttagaacgcactaggacgagtctcaggacccgcggtgcggctgcgcagtcatcataaagcagcagtcctgaggagctggttctgacgcttgctcttctgctgttcatctaaagcaacgagtcttctgctctttcaatcattggttgcccctgtaacattatctactgtaggaagtgcgaggacttcgtgaggaatgtcttcaagaagaaagtaaataccactatacaaactgcatgattaaggtaaggcaaggagtggggtcagaggctttcttgacaaaggttaagtttttttcttttgtttgtttgtgttttgagacagagtctctctgtagtcctggctgttctgaagcttgctacatagaccaggctggcctcagattcacagaaatctgcctgcctctgcttcctgagggctggaatcaaagatgtgcaccaccataactgtcctaaaaattattttattgattgtgtatgtttgtgaacatacacaccatgtgccctggtgcatgtgaggagatcagagaacaacttacaggactcagcattctctttctactgtgtgggtactggggatggaactcaggttgtgagacttgatggctcttgcctttacccactgaaccagttttaggccccatctgagacctccctctaagtattaacaacttcctgaaacttgttttatgttacatgtagaacctagaagttgagcttcgtcgagcgactgatgagatgaaggcgtacgtctcttctgatcagcaagagaagaggaaagcaattaggtaagtgatttttattcttatatgaatgattctttctctttaactatacaagatttgtaaataagataggaacatagagaatatttcagctgtcagatgctaagctgctgttgaacactgaatcttaggatagtctaaccctcctaacaggataggagtacatataattgtgctgcttgcttgctttttttcatgtagcaaatatatatttgtataaaatataaaatgtgtcaccttagccacttgtaagcatgtgattagtggccctgattacattcactgtgctgagccatcaccactgcctggttccaaagcctttcacattgcatgaatcattagcccccctccaagccccaggaatatgtgtgcttttatatttgctttctgtaagcattagcgttttaatgtcatctcgttaagcacacatggctgggactctggtcatctacctgctaatagtgcagtgtggcagctgccttttagctagaagcatgtgactgcggtatgccagcctctgaaataagaactgtatgtaaacactgcttagtccttgaatggggagtttatttgtagtctcaactgtgttgtagtcttgccttaaatcaatttgaatcaactcttgccttaaaataataaatttgtaaaacatttgcaagttgtaataaaatgcagtcgtgggagcgtatccttcctcactcaccatcacagctatgtcttcttcttactcgccagtaagaacactaaagggaggagtcatttgtctgagcctgcgcttgagatttcgagggaccgtgcttgcattagtgttaccagaaggagcctgggaacttgtctgttgtagaagctgtctgttgcagagtctgtagtgtgctggcaggcgaggcagcccggagatgtcctataaatagagagactttagtacatactcttacacattaactataaaagtcctcatttagcttcatttacacaacgtaaactttagggttctccttttctttttctcaagacagagtctcactatgtaccccgggctatcctggcattcactctgtagaccaggctagcctcaaactcacagagatccacctctctctcatgcctcccgctgcaggggtgtggcctggctctgcttgtgctgctgggtttctcatcttatcttgctaaattcttctaataggacaatctaagtttgcacagaaaaataaaacatatttgcattgaaatataagagctagccaggcatggtgacacgtgtttcatcacagctcttgggaggcagaagcaggtagatctctgagtttgaggccagagatgttacacagaaaaaccctgtttcacaaaaccctaaacaaacaaacaaatatacagagtctaaagactcctcccgtgttccttgtatagttaaggtttctattgctgtgataagatgccatcaaccaaagtcagttgatttcagcttataggtgttgggaagtcagggcaggaattcaattagggggaaagctggaggcaggagctggtgcagagctgtggaggacggctgctcactggcgtgttcctcatagcttgctcagcctgagtttgtagaccatccaggactgacagccctggagcagcaccaccacactgagcagggccctcttacatgtattgctgattaagaagatgtgttcctggcttgcctgtggctggatcttatggaggcattttctcagttgagagtcctttttcctaaacgactatcttgtgtcagattggcacaaactactctggacacttccatctgttccttaatcctttgaccttaatatgtcacctactctaaattgtgctttttttcttaaacaccattaaaatataattgtactgtaatttttcaatactttgaatttttcactttaaatgagcttttagctcataaaaattatctgtaaaaccaaaaagtaatcattataagtagaaattcagtgctttccagacaaaatgtggtgagcatagcggcagatacctgtaacctcagcactgggaggctgaggctagaggatcgtggggttagggctggcctgggctacttgagtttgaggccagcctgagaaaaatggcaggaccttgttaaaggtgtgtgtgtgtgtgtttgtgtgtgtgtgtgtgtgtgtgtgtatttccagcactcagaaggcaaagcagacagatcgctgtgggctcaaggccagcctggtctacctaggtgaattcaaaaccagccagatacctagtaagaccctgttgaaagaaaggaagaaagaatgaaaaaaagagggggaaaggggagggaaggaaagaggggaggtgagggaaaaggaaaggggaaaggagaggaaaggaaaaggaagaaaagcaaaggaaaggacctattgtgtggtgaaacaccactgtaaactccagcacttgagaggtgaaggcaggtggaccagtaattcaaggctagctaagtgtgagattatactgggctctgtgagatctttcaaaaagggcagagaaggagatggtgggtagaggatgactggagagatggcttagagcagtggttctccacccttctaatgctgcaacactaatactgttcctcaccttgtggtgacccctatgcagacaaaatacccaaacctatgaaataaaataaaaatgttttaaagatgcaggccatattgtcatggttcatgctttaacagtctactattaatgctttagtgtacactgttccatattcaaccatgaaaatgctaatatatctgcacatgtgcatgttagccaatacatgggaaatatatgtatacatacatgtgtgtatgcaaaaataatattaaattatctcttgttaaacttttttattagatttatttattttgtgcatataggtacaacatagctgtcttcagacacaccagaacacactagaaggcatcagatcccattacaaatggttgtgagccaccatgtggttactgggaattgaactcaggacctctagaagatcaatcattgttcttaacctctgagccatctctccagccccaatattaaattatcttaatattcatttagaattttttccacttcagtatgtatagatttacctcatttttcacaactctgtgttactcctttcaatagattactataatctgcataaacatttccccatctatatgcatttagtcttccagctttcagtattctatacattggtgaaataagtagtatttgctcttatgtttcttaagttgtggagttcttcttcaggctgatttcctggaagcggaggtagagtcagacacttatatagttaatagactctaaaaggcaatgtgtaatttaagcacacgggttgtcaattttaagggtagataatcagaactagtaatatatcttaattttcttaacttaatttcctatataaggcttttaaattactgtttactggaacagaaatttaaacatgaagaaaaacgaagtatctgatgagttccttcttaattctgttgcaaactataaatgtatatagatgtgctaatttataattttgttgtgtgatgaaatcattaaagctaagattgaatattctgttgactctctagggaacagtataccaaaaatattactgagcaagaaaaccttggtaaggtaagaattactttttaatgtctctaattgaggctttttcttgcatggctctgacacttattcttctggaaggctacctatttcaaggggttgttacttcctttcttaggaaagtaaagggaccagagaggtggtgctgcatgttagcgtgtgataaggtcagtctccaggactcacacagagagccaagtcctgtcagaggcctctgacctccagacacgtatcaagtgtacacatacacaggatgagagagagagtcagagagagagggagggagggagagacagagacaaagacagagacagagagatggagggaaggaggaaggggagagagagagagagagagagagagagagtgagagagaacttgtcagttctatatcttatttctttatagcagtggttctcaactttcctaatgctatgacccatcccctcatgttgtggtgacccccagccatgaaattatttgtgttgctacttaataactgtaattttgctactgttatgagtcataatgtaaatatctgtgttttctgatggtcttaggtgacccccgtgaaagggtcacaacccacagtttgagaactgctactttaagggtggcacaattgcattaaaaaaggaagcaaatggaattttatgttagaaattaatgtattttaattagtgtatataaaccttcatttacattaaccatagattgtttagatttttagtatgtttttcagtaggctttcatctaaagagtccacgttatattaataagaaactattcccctttttttcttgtttaaaaatggagctggagaaatagctcagtgattaagagtactacctgctcttccaaaggacctgtgttcaattcccagcacccacatggtggctcacaatagtctataagtccagttccaaggaatcccatgtcccttctgttgtctgtgtgaaccaggcatacatgtggtacagacatacatgtaggcaaaacacccataacacatacagatacagtaatgtgtttattatacattttataaatatcttattatataaatatatttattatatattttatacctatattatataaatatatgtatatttaacagctcatataaccataatatatactataaatatataagtatatttatataatatataaaataatttataaattaatatcatatgttatattaacatattgatatcttaattaatataataaatatataaatatacaaatatatgatataataaagatatgaatatatgtttctgtgttcattatgggttatgacatatctatataatcttttaattaaaaatatctggatggatgttgatgtgtatagacacacttataaaaccttaaatatctttataagcttaatttctaaatccaattacagctgtttgttgggctgtgaggctcagtgatagtgcagtgctgaaagagcctgcaaaagcctggtttccgtctacaacaccaagaagttctcgctccttccagtgtaatgtttttctttttttgtagtttttggctttggttttggttttggttttggtttttttcaagacagggtttctctgtatagccctggctgtcctggaactcaccttgtagaccaggttggcctcgaactcagaaatccgcctgcctctgcctcccaagtgctgggattaaagacatgcggcaccatgcccagcataatgtttttcttaatcaagatcttggggaaagctgtaggaacaatcagatataaagtatttttaagcagaatgagtcagtgactaacccataacacaatttggacacttcttcctcctctcacttctagagtgatttccaaggtagccctgggtaaggtagtgtttccgtgtgtgtgctggcacacacagaggtccggggccctgtgtgtcctctgccgtcgttctccacctggtccctgtgagctcccagggccccctcaccaaggccgaggtcctcctgcatctgtccccctccccgtgctgaggttacagatgtagatactggggatcccaattgaggtccccatgcctgagcagcaagtacccttccccactgagccatctcttccaccgctggctgcttctttaagacattcctatagattgctcgcatttaggggtgagaaattatttcagtaatacaagaaaaattttaatttagatttaccatatctgaaaaagtcatgctgagaactcctaaaattcttagcatacttgagtggtcttttcaaatacttttaatttgtgaacagcagaatgtttgtggtgacatacatttctcccaacataagcttacatatactaagcctgtgcttttctgtaagcctgtttttaaatggttagctatattacagttatttctgaaaatgcccctgcgtgctctcacattgcttctgttctgtttgctttcagtacccataactggggtgggcagtatttaatcagtggtttaaatctcgctttcatcccggttctttctcttatttgggcaagcatcagccaccagcattctcatttgtcctgaagatcggtagatgagccgtgtcctaaaagaggaaagatgagtgtgtcccgggtggcggctgctgtgtgcctgcttgtctctctccctcctgaagattttctcacagtgcatctgttggcgtttctgtcacagtggttccgtgtgtgtacactgccaccccgcccttctttcttgctgtctttgttctgactcctcttttctgttagccttccttcatttacagaaccaaaatataattttgcaattcattgaaaacatttttcatgtctatttataattatagtcaagaagtaaacaagttttagcaggtggaatcatctcatctggacagtaacaaaaataattctgggggctggagagatggctcagtagttaagaggatccagattcaggtcccagcacccacatggctgcccacatccatctgtaactctagacgggtgatctgacactcatctgaccttcatggggaccagacatgtatgcagtgcacagacatatctacaggcaaaacacccatatatgcaaagtttaaacaggagctcctctcctctcctctcctctcctnnnnnnnnnnnnnnnnnnnnnnnnnnnnnnnnnnnnnnnnnnnnnnnnnnnnnnnnnnnnnnnnnnnnnnnnnnnnnnnnnnnnnnnnnnnnnnnnnnnnnnnnnnnnnnnnnnnnnnnnnnnnnnnnnnnnnnnnnnnnnnnnnnnnnnnnnnnnnnnnnnnnnnnnnnnnnnnnnnnnnnnnnnnnnnnnnnnnnnnnnnnnnnnnnnnnnnnnnnnnnnnnnnnnnnnnnnnnnnnnnnnnnnnnnnnnnnnnnnnnnnnnnnnnnnnnnnnnnnnnnnnnnnnnnnnnnnnnnnnnnnnnnnnnnnnnnnnnnnnnnnnnnnnnnnnnnnnnnnnnnnnnnnnnnnnnnnnnnnnnnnnnnnnnnnnnnnnnnnnnnnnnnnnnnnnnnnnnnnnnnnnnnnnnnnnnnnnnnnnnnnnnnnnnnnnnnnnnnnnnnnnnnnnnnnnnnnnnnnnnnnnnnnnnnnnnnnnnnnnnnnnnnnnnnnnnnnnnnnnnnnnnnnnnnnnnnnnnnnnnnnnnnnnnnnnnnnnnnnnnnnnnnnnnnnnnnnnnnnnnnnnnnnnnnnnnntccatatcatctttttccctccccttcctttcttttccttccctctcccttttcccttcctttcccatctttctcatgacttttttgtttgtctcttacacttgatcttagccagaaggctgagaaacagtatgtttgttttctgtggatgaatggtggcctaagttgatgcaaatataccaaatgtggactggtgttacagatgtttatgagctaccatgtggttgctgggaatcaaacctgagttctttgcaggaacagcaggtgtttctagcctctgagccatctctccagccccctttcctgacctttttaatgtcaggttattctacatacaccttcaatttagttaacttttaaaatattcttagtgttttagaagtgttttagaagagagcatatttgctttattaacactcatgaactgtataaaacataccatactcctttgcaacatgacgacagaagtaaatctctttaaccaataatttattatacttggtgttttgttttgtttaatgatagaaactccgggaaaaacaaaaagctgtacgagaaagtcatggtccaaacatgaagcaagcaaaaatgtggcgtgatcttgaacaactgatggaatgcaaaaaacagtgctttctaaagcagcaaagcccagcttccatcggccaggtaattcaagagggcggagaggaccggctggttctctgagccctgtgttggccgggcttaagtcgcatctgcgtaacgtgatttcttctcggaagtgacttattcatcctttgctttcagactagccgtcccttctcagttgtcttggaaatgaagtgaaggcagatgaggttttaaaggtctttttaactgcaggagaggctttcgttgtttgtttagcttagtcgtctagtggtgtctcctgagttttatgggaaagggctaagtttgctctctgtaatgtaagcatgtgtccattaagaaccacgtagcttctcaagctgtgaggactgacgggtaatgctcttctcagtctgtctctgacttggaggactcttttaggaactaggagttcatttgaagaagcttttgtctgaagtcagcagtcgctacagtttcacttcagtttctttctcttctataaaatacaaaccagttaatgttgtgaaaagcaattgtgatgtgatgtgattgcaaagtaaataaagcctgcggtggcctgccgtagctgttgatcttaaagaacatagttgtgtcaagattgttttaaagtattttataacattcatgtctcatctcaggattctcactcattttcatcaaatgtggacttcataatacaatacttgcattgtcctgaggactgttattataaatataaaaattgtcataaaatatacatgcaacataggctggaaagctaacacaggattcctagtgaaattaagactctcatgtgctcccagcctctgttccatgtggactacatacttacagatttctttggttttcattaaagaaagatattaaacttgtatgttctctttttacttcatttttgcttcagtctgtgtttcaaaatgtctttagagtcaaaaacccagattttaaattgttagtatgtcctttgtaggctagttctttttaactacccttgaaaaaaatgtaatgaaaatttgtgttgtgtaaaatatacagacatggatctctttctcccaagtttaatctactcttaatatttgtttgaaagcttttttgttagtaatcagaatctcagcgtccacctctgctctccacacatccgtgtacacacacacaggcgtgcacacacatgcacacacacacacacacacacacacacacgagaggaggcgggaggggaggaaggagaggatgagcattctgtgtctgtggctgactctggtcctcagtttggttgccctcttatctgggcagtgtcaactcccagcattgtctttccgccctttggtagatgggaagctccaagaggaaaggctgtgtgttagtgtatggaaagaaacccttcttaattcagtaatcatttttggacaccaaggtagattatgctcctgtcagatcagctgtaggcttggcatgtttttagtagtataaaatgctccattagccagaatgtgaattctgtaacaaatacttgaaagactagatggcatttcaaaaaggcactttactccccagaggaaacctcacaaggtcgttatacctagaagctaatctgttttttagctccatactccgtcattctcttcttaagttctggaattgagaagggcagccccaggcccacttcagattctgattgattctcacattccaccttcactctgcacagagcaagagtgtggattacacaccaaggcaaagcagaacatccttatcacttcaagaaaagcaaattggaaaaacctctaaaagaacaagttatttatagcttttacataacattggacacttagtaacgcagcttaatgggtttcatgcagactttccttccactcgcccatgacttgattggaacattaagaagctttgactaaccctgacagtttttgacagcttgtacttagtaaagaagagcttgctccattattttctttcaaggttaatatgctaaccggctaattgatgagcgcacttaatcattttagaaaataattgtgtctttcacatgatggcccaaataaaagagaaaaatgtcgcctgcgaatctgcctctgcagtcagctttccttctctggggcttgggctgctagctgttgtgaggactttgactgtcagtggcaacgccctcttgctcactattggttcaggaaataatcctgtaaatatgccctttaagaagaatctagaagtcggatgtacttcctgttacaattggctgaattcaaggtcacactttgcagtgctggggagcaagctagaagacctcagaacactggagagtgaagggaaaggacccagagactgtgaaccggctagctttccctcaggctgctgctggctgctgccttgctttttaattcagcaggcagcaattctaaaacaagccattgagtcacacttgtttttaattgatgtttgtcattctgctgaattcttagcatgcatgacatttatactttttttttggaaaattttaaggtctatgcactttccaagtgtatttcttaagtttttaatgctaagatgataacaagcatttttaaaaataatttgagtaaaataagaggctatatatgcactcaaactaaaaatgtgtaaattggcaggattcttggatctgaatttgggggggggggtgcatcatgagtaacacagaaaaatctgtcttcacagaggcaaagtttatattaaaaaataactgtgtttctcagagaaacctcatctcacacaggtcctcgcccagcgctggtgaataacaggtttgttcccacaaagagttctaggtgcttacatcatgcctctggcttggcagaaaggggtttgcctctgggagcaggtaatgggtgcccacttggatgcttggccttcccataacctgcttgcccacagttgggccctgttgtggtgtgggaggtgtgaagcatgtgtagtgcactgtcttcagacagtctccagcagccaggaaagagacagagctgcacctttgtcaccagtgtaattacctctgtcctcatgctgaccgaggcctccctccgtctcccctaaacgagggcagtctaattagagttgtttgcggtggcagctaggcatgtggtgactgtttcgtctggggagggtagagatggatcattaaaggtgctctgtgtgttttgatgtttgactcttctgtcttaagaccgtcttctttaaaaaacaaagcaagttcactgggcaagaatatggcttattcttacccagtccttgcaaaagaaataataataattatataaaaaaaaaacccagagtccaaataagtagttttttggggttttttttgttttgttttgttttttgagaggcctggacaaacacgtgctttctgctcccaagctccctcttttggcaaactgggagtactttcctggtcactggtcattgcacaatttcctttctagaaccagaagccttgcgtcactaagctaaggtttgctgctatggaaattcacaattcagaatatgcggggaaatgaaggattcctgcttcccagtgaggtcttaagtttccacttgagttccgggtgtgacagtcggtccctgtgagttgctgtttagtgtagcactttggtgggtagctttgagatcagcagagaacagcaggctctggtgcttgaatgactcacctgcatcttcctttgttggagggacctctgagggagccctgccagccaccgcaaagccggtctgctgctgctcttgcagcagattgccttcctgctctgaagagcaatgcagctccctccttaaagaggctcaggcacagtactgtggtatccaaggatggacttaactaaagcattcattaaacaaagcaacaaattagcagatactatctcccagagctctgcagtcatgataaagaagaaagggcatgaaccgttgctgagtgccaggcatgtgccaggcatagtcccagaagtttctgtggggaagcaaggtgatgctcacaatgaggcaggccaggtagacttcacactatgacccaggtgatgactgtggcagagcctgcatccaagatgtatgctcttagttgctgccttggtgcagagtctgttgtaagcagtacttatttgtaaacagttggtgtctgtctctgaactattgcatgcattaaattctttttggtaacataaacttagaggaccttgttaaagaatggatctggggcccggagagatggctcagtggttaaaaggactggctgctcttgcagaggacctgggttcaattcccaacacccatctggtggttcacaaccatctgtaattttttaaatacaaacaaacaaacaaacaaaacaaaacataataagcgagactataagatatgcttattacatttattcaatcaaaattatttttactactttataaacatctcttgccattttttttttaagtgccgagacacagcttctttctgaactggagaatatttacttatctataagtattatcttctgtgtgtgactctttactaagttacaaaatgtaaagtctacacgacctcatttttgctctaaaaacctcatagccagacaggcgtggtggctgagcaggtaaagacttgccaccaagccaggtgatctgagatggcccttcaaacccttacggaaatgaaagttgtatacacaataaacagaattttccaaacacacagactctacatagaaaagtaatgctatatattttgaatggtttgaggaataattttaaaaagagttgaggcatgtctagatttgcaagactgtgttaagattttatggaaatctgatgaaagttttttggaaaaaaatggaagctatacatttaagtcctggagagatgctctgcagttaagagcactggctgctcttacagagggcctggctcgggttcccaccacccgcgtggaggcttacaactacctccagcatcatagcaactgatatcctttttctcttctcctggagcaccacacacacacagtccacatacaaacatgcaggaacacggacacacatacatacaaacacaagagcacacccataactaagtttaaaattcacttaaggatatgtatggcatgttcaggaaatgatgagagatctcagtgtgtggccgggttgccttgccttgtgagagaacggagcaccagtatgtgctaagctcctgtgttctgtacaccagtccctcctgacccacagatctgctttttgatgcttcaattgcatttggtcagctgtactccaaaacttatcaatgaaaaacatcctaataattcataaacttgaactagcttttatcatagtatctgattttaagtcatattttattcttactgtcattaaattaaaatttatcatatgtgtgaatgtatagagaaaacggcatacaataagaaggatggtttggtactgcctttggcctcaaggacccaccagggggcctctgagctagactgtaggaaaaggcacaggagactaaaaggtgtgtctgcaggattaaacagacctaaaatacgttgagcatcagtaaacatccagaccttatagccaggtgttaaatatgctggtgctgtggaagttcattcaaaacaggcatctagaatattcctccctaagcccctcccactctggagagctctttctcagtttccctaactaaatcatagaaacaaaacaaacaagcacaaaacccccaagtatctggatccggcacagtggtttatgcgtactgtcctgcttcttgggagctgaagcaagacaagggggcccaaagctcaggagttcaattccagcctgggcaatgatgagataaaagtgggtggagaggtggcaaactgaagacgtgaaaagatcaaaaaccagggatctaaagaacaccagaaaatgaaaaaagccaagggggcttccttaacgaggtggggactgactgagctggaggtgacatgcgtgggagaaaagcatgaagtctgggtatcaatacaagcaacggggcccacaatagaaatggcttacagtgcttgtttagccaataagcagaactatcccagattgcctgaaaactgcactatttcaagatatcaacatgtattacagagagcagaactccactggacttccagacactcactttgtgacttaggttgggtggagggcactgctatccttttggggtttaagagctctaaggaaccaatgcagaaatcaaaaggaagaaaagcccttttggctgagtaatctttggcccgcccaatgaagagaaacacccatgattccacctcttctggaagcacgtgtagaatctgacttggagaggagcagagactccatggggcgtatgaaacctccagaagggaattatcctgtggtacaagctggagcctaccagggatgagggaggggctgctgggaaccagatggcgagagctctgtgctgcagctccagtgattgatgggcagttccagtgattgattgatgggcagctcctgtgattgatgggcagctccagtgattgatgggcagctccagtgattgatgggcagctccagtgattgatgggcagctccagtgattgatgggcagctccagtgattgatgggcagctcctgcgattgatggacagctccagtgattgatgggcagctcctgcgattgatgggcagctccagtgattgatgggcagctccagtgattgatgggcagctcctgtgattgatgggcagccccaagtctcctgtggtcttggttctctatctgtcccagcttccttatagactttgatgaaatggaggttctctatgtagagaacacgtgatcatctggggcttaaccacggagttgggaggagcagtatagacaggcagccagttaattaatgtgtttattatattaaggggaggagggtattttcacatcaatactaagacccagcctttaaggaggtatcatccaatcttttttataaaaaaacgatatgcaacagttgggatttgtgtgtgtgtgaaaaagatttgatcactctaaggaatttagctgaggaacagaatctctcaaagggatatttttgttgggaaagatttttataagtttatatgatttcctgtatttaaaaaagaaatgggagctggtgcctcacagtgcttgatttctttcccttgagagtcaggagagttttcataggaacaatcacagcactgccagggagagccctagccatcaagaagaccacttgccagggacttggccgtgtcaaacaaatgttcagcttctattctgacacttctcgaagaatttgattgaaactatatatgtccagataacactcagcaaagtggccttcttacatttgtttcaagatatatttggcaacaagagagatgaccttggactcagctgcttttccaatttaggacttctccctgggtctgctgcacaatactccccaacactgcaaattcaccgaatggaaaaacattcttgttactctgtgccttaagtcctgggacggatggaggacatttccccagcagtatgttctgccttaaaggcgggctgtggtttatccacgaactctatgttggctgtccaaccatctacttcaaaatacagtcagggagcacatttgttcttcatcagaacaccttttgctaatctaaattgagctgaacttgggtttcaaaatattttagctcataagaaataaaaactagccaaccttaaccctttgcatttgttctctggccttcaaagtctggtttgaagccagagttcattgcagcttgatgtaaggtctaaagaagatgtcagaggcgtcgagggccccttctaaggttatgaccacccgtccaggatggcagtagaagtcctactggtccaacttccagctcaatgccaacgttagcttccagctgaatctgcagtttgcctgtagaggtggatggctggtcctttcttcacagtgacagcctctcagatgctattttgcatattttgaaggcaattcctttttcagttgttgtcatggcctttaaaagttttgtttagatttgcttattttattttacatgtgtcagtattttacctgcgtgtatctctgtgtactacatgcatgtctggtgcccacagcagtcagatgggattgttggagttcctagttcagggacttgtgagccaccatgtgagtgctgggaactgaacccaggtcctctacaagagcagtcagtgctcttaaccactgcccttatcatggttctaattcgtgatatagatagcctccttgataaggtgtatttatttttaagcaaataagaattacagtctgattattgttttacctagcatatcatcagggatagtgcagtctgacgttacttagcatatcatcagggatagaatcatctatttttgtatggtttcctagtgtgttacgggcaatcagagcatttacagagtcggttatgttgtgggcaacagtctccagcacacacgttacgttaatttccactaagatgctatgcacacccataccgcatgtggaaataaagacgccatattgtaatattgtaaggatagctggttcgcaagaagtccctgttgtttgctttggaatcaagcattgcgtcagctgttagccacaaggtaaatgatcttgactggatagaaagtcaacacaaaattcatacctatgatacttttcaaagatgacccttcccatctgatgatgggctcatccgcagtgtttaattatgacagatggttacatcagccttactttgtaatttcccaacttgaaagctgaaaacgtttcttgtttaatcctttcctcctctacaaaaaacaagcttcgcatggcgggcggctgccctgtgtacatttccattattgtattgatgttgaaccagggcagtggctaaagtcactccactgacccaattaaacaaataagagcttgtggttgcccgggctgattgatctgcgcaggataagcagtaaagtttccttttcctggttcgagagactcctcctattgcataacttgtgaactgtgatttgagtgatacagaaaaggaaaataaagatgttctacaaaatgttcccgagatctggagtgcttagaggaaaattttcataaggagcatgcccccagaggaaggatagaattttatatgaagttagaaaaatgtgaagtttgccagatatttttcagaaaacgttgtttttcaaaaatacacattttcctcaccaaacccagggtgtcacacctgctaggcaggtgccctctagtctgagtcacatcctcagtctttctcatcctttctccaaaactgcacacagggctgaggatatgggtcacagtgacgtgtacagtctttgtgccccaggtcctaggttcgatccccaggaatggaataaacaaacgaacaagcaaacaaaagcccacaaacctttcagccttagacttgaagcgtcactgtggtttaagaggtctgactgttttaagggccccattctccagctcttcttgttttcagattctcttggccaagtaggtattgtcagaattcaatgggaacaagcacctctctattatctcccatcatcttgtgatggagttccagaactcagggattagcatgcatctctaagctcgtttaatgtgtgtcttccagagatggaacccgagctgtcctcagatcaatgaagagtctggttgccccaaatacgcaaagccctgcctaaccagtagtttctaaaatgtttttagacttacttattttatgtgtatgagtgtttttgctagcacgtgtgtgcatcatgtgttcatctggtgctttcagaggtcagaagatggtgttggatggttgtgagccatgacaggtactgggaaccagaccctgatcctctggaagagcagcacgtgctcttaaccacctagctgtttattctccacggaccgaaaggcttctttttctttttctcatcctgcctgtacatcttatctcaatcttttgatacaagagtccgtatttgtttacttaaggaggcaggcctagtgtgtgttcgttttaaaaatcttaatttttttcctgaccctttccgtcgtttttctttacctgccatacagttatgtgtgggtccatgtgaggtcatgtgaggggagggttgcatatgtgttgagtgcacgcacatgcaagttgaggccagaggtcacatgactgcaacaggtcagattcaggtccccatagacttgtggggcaagccctctactgacagactgacctcccagatgggacaccctttagtggtagttgcttttgtttgctgcttttgctgttgttgtttttactcctgcatttttcctccctgttcatgtgtatcggatggttcttataattcaaacctttcgatcttctccctatagacagcttcttatagctaagtgactctggaacatctctcagaaatgttttctatttttaaggacatagaagccatgtatggtggcgtccacctgtaag

SEQ ID NO: 417 - DNA, 2652 bp, Mus musculus
ccaaggagcggtctctaagaacccgcaagcgccccagtgcctcccgagggtggggaggtggtttcgtgaggaggatttgagttttaagctataacattaatcatgagtgaccaaatcaaattcatcgtggacagcctcaataaggagccttttaagaagaattataacttaatcacatttgattctttgggaccaatgcaactattgcaagttctcaatgatgtcctggctgagattgaccccaagcaagatgttgatatcagagaggagatgccagagcagacagccaaacgaatgttgaatcttcttggtatccttaagtacaaacctccgggaaatgccacagacatgagcaccttccgtcagggcttggtgattggaagtaaacctgtgatttacccagtgctccactggcttcttcagcggagtaatgaactaaagaaaagggcatatttagctcgtttcttaataaaactggaggtgccaagtgagtttcttcaagatgagaccgtggctgacaccaataaacagtatgaagagctgatggaagcctttaaaactctgcataaagagtgtgagcagctcaaaacatctggattctctacagcagaaatcagaagggatatcagcgcaatggaggaggaaaaagaccagctcatgaagagagttgaacggctgaagaagagggtggagaccgttcagaaccatcagcgaatgcttaaaatagcaagacagcttcgagttgagaaagagagagaagaatttcttgcacaacagaaacaggaacaaaagaatcagctgtttcatgcggtgcagagattgcagagagtgcaaaatcagctgaagagcatgcggcacgcagcagcggatgcaaagcctgagagtttaatgaagaggctagaggaggagataaaatttaactcatacatggtcactgaaaaatttccaaaagaattagaaagcaagaaaaaggaattacattttttacagaaggtggtttctgagccagctatgggccactctgaccttctcgaacttgagactaaagtcaatgaagtaaacacggagatcaatcagttgattgaaaagaaaatgatgagaaacgagccaattgaaggcaagctctcactgtacaggcaacaggcatccatcatttctcgtaagaaagaagccaaagctgaggagctgcaggagaccaaggagaagctggccagccttgagagagaggtgttggtgaaaacaaaccagacccgggagttcgacggcactgaggttctgaagggagatgagttcaagcgatacgtcagtaaacttcgaagcaaaagcacagttttcaaaaagaagcatcagataatagctgaatttaaggctgagtttggcctcctgcagaggacagaagaacttctgaagcagcgtcaggaaaccattcagcatcaactgcgaactattgaagaaaagaagggtatatctggatacagttacacccaagaggagcttgagagagtgtcggccctgaagagtgaggttgacgagatgaaaggccggaccctggatgacatgtcagagatggtgaaaaaactgaattccttggtatcagaaaagaagtcagctttagccccagttataaaagaactacggcagttgcgtcagaaatgtcaagaactaacccaggagtgtgatgagaagaaagcccagtatgatagctgtgcagcaggccttgaaagcaaccggtccaaattagagcaggaagtgcgaggacttcgtgaggaatgtcttcaagaagaaagtaaataccactatacaaactgcatgattaagaacctagaagttgagcttcgtcgagcgactgatgagatgaaggcgtacgtctcttctgatcagcaagagaagaggaaagcaattagggaacagtataccaaaaatattactgagcaagaaaaccttggtaagaaactccgggaaaaacaaaaagctgtacgagaaagtcatggtccaaacatgaagcaagcaaaaatgtggcgtgatcttgaacaactgatggaatgcaaaaaacagtgctttctaaagcagcaaagcccagcttccatcggccaggtaattcaagagggcggagaggaccggctggttctctgagccctgtgttggccgggcttaagtcgcatctgcgtaacgtgatttcttctcggaagtgacttattcatcctttgctttcagactagccgtcccttctcagttgtcttggaaatgaagtgaaggcagatgaggttttaaaggtctttttaactgcaggagaggctttcgttgtttgtttagcttagtcgtctagtggtgtctcctgagttttatgggaaagggctaagtttgctctctgtaatgtaagcatgtgtccattaagaaccacgtagcttctcaagctgtgaggactgacgggtaatgctcttctcagtctgtctctgacttggaggactcttttaggaactaggagttcatttgaagaagcttttgtctgaagtcagcagtcgctacagtttcacttcagtttctttctcttctataaaatacaaaccagttaatgttgtgaaaagcaattgtgatgtgatgtgattgcaaagtaaataaagcctgcggtggcctgccgtagctgttgatctt

SEQ ID NO: 418 - protein, 679 aa, Mus musculus
AITLIMSDQIKFIVDSLNKEPFKKNYNLITFDSLGPMQLLQVLNDVLAEIDPKQDVDIREEMPEQTAKRMLNLLGILKYKPPGNATDMSTFRQGLVIGSKPVIYPVLHWLLQRSNELKKRAYLARFLIKLEVPSEFLQDETVADTNKQYEELMEAFKTLHKECEQLKTSGFSTAEIRRDISAMEEEKDQLMKRVERLKKRVETVQNHQRMLKIARQLRVEKEREEFLAQQKQEQKNQLFHAVQRLQRVQNQLKSMRHAAADAKPESLMKRLEEEIKFNSYMVTEKFPKELESKKKELHFLQKVVSEPAMGHSDLLELETKVNEVNTEINQLIEKKMMRNEPIEGKLSLYRQQASIISRKKEAKAEELQETKEKLASLEREVLVKTNQTREFDGTEVLKGDEFKRYVSKLRSKSTVFKKKHQIIAEFKAEFGLLQRTEELLKQRQETIQHQLRTIEEKKGISGYSYTQEELERVSALKSEVDEMKGRTLDDMSEMVKKLNSLVSEKKSAPVIKELRQLRQKCQELTQECDEKKAQYDSCAAGLESNRSKLEQEVRGLREECLQEESKYHYTNCMIKNLEVELRRATDEMKAYVSSDQQEKRKAIREQYTKNITEQENLGKKLREKQKAVRESHGPNMKQAKMWRDLEQLMECKKQCFLKQQSPASIGQVIQEGGEDRLVL

SEQ ID NO: 419 - DNA, 115617 bp, Homo sapiens
  misc_feature (1)...(115617): n = A,T,C or G
cctgctgctcttgtccgcttccaccaaacttctcctgcatgattctcagcttcctgatagcccaaaatgcagctccactgccggttacccttaaatactccccctgaactctataaatacaccaaacattcagctgggaaaaaaagaaacttgaaaggcatctgaaatgaaaatacactttttttcccagcattggccaagtgttttctctccatcttccccctctttgattttgggataagcgcttggatttcaaaccattagctatacctgggtgtgagaagagcttccttggcaaagcccttgtaggcacagaagtccaggcactgtgttgatgtggtccctcccacacagaaaatccctgtgcctcccacctcagcagcctgatttatggttctttcggtctctgctgggccagtttggagccagtttaggaggctgatgaaaatggctttggaatcaggcagacctatgtttgaatcttggctcagccagctaccagctctgcgaccttgggcctctgttaactctctaggtctcaatttccttaatcataaagtggaaaaaaataatactgtggctgggtgtggtggctcacgcctataatcccagcctcttgggaggccaaggcgggagaattgcttgagcccaggagttcaagaccagcttgggcaatgtagtgagaccctgtctctaaagaaaaatgcaaaaattagccaggcatggtggttctcgcttgtagtcccagctactcaggaggctgaggcaggaggatctcttgagcccaggaggttgaggctgcagtgagccatgatcacaccactgcactccagcctgggtgacaaagttagactgtctaaaaaaagaaaaacaaaaaactgtccttgcagacttgttgtgaagattaaatgagattatgtaggtgcaggcagtgtgccgaaatgaaattaggcctaactcacataatgcctggaacttcagctagaagagagaagtgcagcttggaagacatggggctggattcactgaccccacaaggcctgactgcccatcattttgattgtgtaattttatctataaagtcagtctgcccctccggatccacattgctgtggattaaattaaaaaaaaattttttttgagacagagtctcactctgtcacccaggctggagtgcagtggtgcaatcttggctcattgcaacctccatctcctgggctcaagcgattttcatgcctcagcctcccaagtagctgggattacaggcacataccaccacacccagctaatttttgtattttagtagaaacagggtttcaccacgttggccaggctggttttgaactccttacctcaagtgatctgcccacctcagcatcccaaagttctgggattacagatgtgagccaccgcgcccagccccactgttgccatcttcctccccctctttgtccagggaggcgcatctgcatggatgacctcaggggagctccctttccctttggctctctgttgggtttagctagtgaggagccaagcaagaagagatcagaggataggacagtgggattgggactggctgcgtcagaggctcttgttaggcaactgtctctgtagggctgatctgtcaggctttttgtgtttgtcctcttctcttcctgcttcaggcttaggggcagcaatggctgcctttggtgctggtctcttggttgccctaaatgctgtccacacctttataaatagccctttattaagctatcctcaattgcccagagtttgccatctttatcctgccaggatgctaactaatacagaagttatcagttttagtccacgactcagatttgcaggaggaaggacattgttttataaccaactgaaatccaattctgagcccccattctgctaggttggagagaaatgtaatcttgttttgagcatcccccctcccccaacacacatcctaggggataccaagtcccggggctcttttgcagtgatgtagctttgggcaacacctgcagtcttctgtcagtggcccaccctagtgactgcttggtcacccatcctcccaggctacaggtcctttcaggtccaatagcattgatccttccatgtcaggcctgagacaaagaaagctttggtcagactggaaggcactggacttgtggtgtggcctccttagggtatttctcccttcccagaagctgctctggacttatcaacttgtgacccttcccactctccataacatctgtcttttctcttcttactcttgttttgtctcattttgttttgttctgttttgtgttgttttgagacagggtctccctctgttgcccaggctgaagtgcagtggcacaatcctggctcactgcagccgcaacttcctaggctcaagacatcctccagcctcagcctccccagtagctgagactataggtgcacgccaccacgcctggctaactttttattttttatagagataagggtctcactatgttgcccaggctggtctcgaacccttggactcaagtgatcctcccaccttggtctcccaaagtgctgaaattataggcctcgacctccgcacctggccccaccttacccttgaaggaacccccctctccactccccgcctgaggacaaccagtacaatttcccctaaacacttcaattcttcacacgcctacagggtctgtaggaagtacagatgtactgggcaaagtacagctggattttcaacctgcagaagtcaagacaataaaaattctttcaagaggatgggaaacagaaggggtacacacataaattaaaatttgaataaattctgacacatatttgaagtatttagcaaagttcctgacatatagtaagcactcaataagtgatgatataatgataatttcagcccactaagaatgttaggtgcatcctggctaggcacggtggctcacacctgtaatctcagcactttgggaggccaaggtgggcggctcacttgaggtcaggagtttgagaccagcctgagcaacatagtgagacctcatctctaaaaaaaaaaaaaaaaaaaaaaaaaaaaaattagctggatatggtggcgccacctgtagtcccaacttttcgggaggctgaggccgggaggtacaggctgcagtgagttatgatcacgccactgcattccagcgtgggtgacagagtgacatcgtgtcactgaaaaaaaaaagttagatgcatcctatatttcaatccatactgatgactaaggagttaatatgaattgcgtattattttggctattctacattgcccattaatctcatcagcaatttccagcctttgtgaaccatagcacatttataaatacaaaacccattttataaaagccatctgagaaaaatatagtaccaggcacacatttaagaagacctctggaatctcatccatttaagttgagtatttcacatattatttatctttttaccttttaagaaagcacattctgctactaaacatacccacaagattaaattgtcagaacagagacaatttaggatatctgcaaaatgcaattcaggtttccgttcaaatttaatttctttcctctccaagtaacctggatggcaaaggcattaaatgacaattaatggataacagaataaccctcttctgaatttgtttctgcgtctgggtcatttttcccagttttaaaagaatgagataaagtgggcagcctgcagaatagccccagatgggatagcatcttgaatcctggcactcgctgaatactcgtgcagaatccagaaatatctcatggtcaggatgaaaggtctaaatttaataccaaaaacagaaaattggcttggcttccctgtactctgcacaggaaagttcttgtttggaagttctgaaatgagaagggattggagacattatattcatggccatcctcagatgtttgtgggggatccggagaggtctgctgggttatcccaagaccttgtttggcccacagtggaagaccacattgaagaaagataattcgtggaaggaaatcagggagaaggttctcattgatacagatgctctctgccacgagtgcaggctcattccttcctcttccggtttttcttatgcagctttccagatttaccagccttccctgaccacctggtcttccctgatctactggtcttgtttgcatagcatctctatctctgataagaggatccagcacttcctttgggtctgacacacttcagaccaatgagagtgagccctggaaatttgctgaaactattggattaaaagttctactttttttctttttcttttctttttcttttttttttttttttatttgagacaggatctcactctctcacccaggctggaatgcagcagtaagatctcagctcactgcaacctccgcctcctgggttcaggcgattctcctgcctcagcctcccaagtagctgggattacaggcacctgccaccacgcccagctaatttttgtattttttttgtagagacagggttttaccatgttggccagggtggtctcgaaccgctgacctcaagtgatcctcctgccttggcctcttaaagtgctgggattacaggcatgagccattgtgcccagcctaaatgtctctttctaagaagctggaattgtcagcctctttttttcacttctcagcttcctcagaccttgggggtaggtttgcataggcctgctcacctcagaacaacttcacaattacatgagataaaacctcttctctttattttttatcttataactaaactgaggcttgaaaaatacactttaccaggagtaattttccccctctgaataatcggaccaaaggttcaaaactgtggataccccttattatctacgcagttaaataaggagataagaaggggcagcttcaagtctttctcacctcctcctcaccttgcctcaccctctcctccagtggaagatggtgaacatttgaagcccatccatgtaagcagcatcttcttatcagatggcttctggtgagaaacagattgggaattctagtgctttggtagcaagggatgagtaggtttcagtaacaggtccgttataaccaaaaactactaaaggctccacatcttgggtcctgtaatctacaaccatgggtacccaacaggccaaaaattaacaaaagttgaaaggaagagacactgtaagaatgaatcctctctcccgtcctgctgatgtatataccctgtcacctgacctaggcaatggaatccttattcataagggggcgaaagtgtgtatacaaatgttcatagcagattattcatagtagcaaaaaagtggaaccaactcaaatgttcaggaatagaaaatgcgtaaagaaaatgtggtctatccatagaatggaattatttggcaataaaagggaatgacgggctgggcatggtggctcacacctgtaatcccagcacttcgggaggctgaggtgggtggatcacttgaagctaggagttcaagaccagcctggtcaacatggcaaaaccccgtatcaactaaaaatacaaaaaattagccaggcgtggtggcgcacacctgtagtcccagctactcaggaggctgaggcaggagaatcgcttgaactcgggaggtttgaacccaggaggcagtggttgcagtgagccaagatcatgccaccgcactccagcctgggagacagagggagactccaccttaaaaaacaacaacaacaacaacaacaaacaaaaaaacaaaaacgggaacgggaatgatgtattgatccatgttactacatggatgaatcttaaaaacattatatactaagcaaaagaagtcagacacaaaagatcacattttgtgtgatttcatttatatgaaatgtccagaaaaggccagtccatagagatggaaaataaattagtggttgcctggggctgtgaagtggggagattttcattgtgagggtgatggctgaagggtacagggtttctttttggtgtaataaaaatgtcctgggattagatagtggtgatgattgcataactttgtgaatatgctaaaagccattgaattgtacacctttttttttttttttttttttttgaggcggagtctcactctgtttcccaggcttgagtgcagtgatgtgatctcggctcactgcaacctctgcctcctgggctcaagcgattctcctgtctcagcttcttgagtatctgggattacagatgcccaccaccatgtctggctaatttttttttttttttttttttgtattttcagtagagacgggatttccgcatattggccagggtggtctcgaactcctggcctcaggtgatctgcccgcctcagcctcccaaagtgctgggattacaggcgtgagccaccatgcccagcctgaattgtacactttaaatgggtgaattgtatgtatgtgaattatatcttaatagagctgtttcaaaaagagagtaaggaaggagtgggaagctttcagaaaggctgtcacatatggctggaacttccctccctctattaaaaatgtcaaatatagttcagccaaaaggcattgttgggagcttacagagaagactcaacatagcatctaaggaggaaaaaaaaaggcttcacgggtagctcagctgggaggagatcagcaatgcctctgttgttgtgaaattgttgctgacaattccctcttagactcttcaacgaatccacccaaggttttatgttaaatgaatcaggcggctgggcgcggtggctcacacctgtaatcccagcactttagggaggctgagacaggagaattgcttgagcccaggaggcggaggctgcagtgagccgagattgcgccattgcactccagcctgggtgacaaagtgagactccatctccaaacacaaacacacacacacacacacacacacacacacacacacacacacacacacacagaatcagggggtggtagccaatcttcctttggcctcggggacccaatatatgcagttctcttttttactgtaagtcggaacataaatttttcaatatacagattccaggaagcatgctgactggcttcaagttcttccccgtgttccagagcaaccatattaagcataaaatctattcaagtttgagtccaaagagtggatcctcttgcttatttgaatttatacaggattgcagtctcataactgaaaggtatagtgtttgtagaccaggggcaacagagagaggaggaactaaaagctattagataaaccactcctatctaggatttctatagcctatacccataaaccctatagaaggtgcaaatctaaccatcttttttttttcttttttcttttctttactttttcttttttcttttcttttctttttttttttttttttgagacagagtctcactctgttgcccaggctggagtgcaatggcgtgatcttcgctcactgcaacctctgcctcccaagttcaagtgattctcctgcctcagcctcccacgtagctgggattacaggcatgcaccaccgcacccagttaatttttgtatttttgatagagatgaggtttcaccttgttggccaggctggtcttgaactcctgacctcaagtgatcggcccatctcagcctcccaaagtgctgggattacaggcatgagccattgtgtctggcaaaccatcttatttttaaagttttattcaaaaaattcttttacttcttttttttttcttttttcttttctttttttaaagatggggtctcactgttgctcaggctggacttgaactcctgggctaagactgtcctcccacctcagcctcccaaagtgctgagattacaggcatgagccaccatgtacatgcctcatttttttaaaaagaaaaaacataaatgtcttcagtgcctcccaatgttgggcactgttgtaatcactttacctgtatcaactcccttaatcctcatgtcaaccctattgaggaaggttttattatagccacgttttacagatgaggaaagtttagcaagataaagagagggtacacaatggcagatgcagaattcaaacccaggtagccagggatgtctcctaacacacccaacaggatcaatgaattatataatcccttctacaaatcttgtattgtttctgtcagtattatgtaagttatttaattctttgaggttttgagtgttgcttcccctaattggttgtggggtggggccagttttagtttctctccaggagccctgcagggtacctacgcttgatatttcaacagtcagagggcagccaacaaagggactggtcttggaatgttgtgttgcctctgcccaaaacactctcccttttcctgtttggctaatttttactgatcctttttaagagatgggggtctccttctgttgcccagcctggagtgcaatggtgccacccctgaccaatttttgcttttaattttttgtagagaaagggtcttgctctgttacccaggctgatcctgaactcctgggctcaaagttatcttgttgccttggtctctcaaagtgctgagattacaggcgtgagccacggtgccaggcctaatttttactgatccttaaacatcactccatttgacagaaactttcctgatggtatggcccctttggcaccaccctccccaaataaacttgaggcccttaatctgggctcctaatcattggcttctcttgttacagcatttatctcaattgtattggtgttgcccctttaataatctctgccggcactagactgtcagctccatcagggcaggggccaggtaagtcctgcccttctgcatttccagcagcctgtacagtacagggcatataggaaatgcctaatacgtaatctgttattttttgttgtggtaagtctgatgctaaagctatagttggtttctcctatgctgtttgagcaggcaactaagttttcaaggtatcaataatttgattttttttccttctctttctttcattgccagctgatatcactaagtatcgtggtctctagtctaatagaggttggttcaaaataccatttgccaactaaggtctcccacaaaccagctagtgcaaattccagtagacttttaaacctcatcagtgactgggcacaaagatctccctgcgtcctgcgtgggatgtgaactccatgaagaccacaaggaggatttaatttatttctgcagtcacctaaagagagcccactcagaagccaaaggaacattaggacacttagttctcccacaccccctttcaggctctcagcatactcaaaacgtattgggtttaaaaaaatttaattcccagtacaggcaatgtggcccagtaatgtgacacagaagctgaaatctctatgatgaatgtgtcttcttttaatcctgccagagcctcactacaattgttcctatgcataacctaatttggagatacttatgtcaaaaacctaaatttgaagcactggccaaatgcttgctcatcccaacccccctaccacccagccctgcctcaaaaacaaacaaaaatcatcacccacgtttggcgcatgaatgcatgcatgcatgcatgaatgaatgaatgaatgaaacatcacacgcatttaacataggttaatcatgcagagagtattttgtaaactgcgaagtgcaggactttcgggaagcttattgtagcgcgtctaggtcggagtaacagtcccaaatgccctcggctgtctgcagtggctcagcacgtgggcccgctttgcaagtaagcccggctcccgtccgccccgtccgccccgccccgtcccgccccgtcccgtccgctccgccccgccccgccccgtccgctccgccccgcgcccgtcctccccgccctggcccggccccgccccccagctcgtgcgcgcgcgcgcgggagagcggccgctcgcccggaagtgacgtaactctacggcctagcaaccgttgccaaggagctcgactctgggagcggtctagagcccgggcgcctcctggggggtggggaaacggtttcgtgaggagaatttgaggtaacctcgccaactcgcggtcggaagctcctctgaaccccgaaataggagagagctcccgtcctctctcggtcctgatgcagcacctcgcaagtggaaggggtcgtcgcggttaagcccccggataggggaatcgggccccttctgggattcgagcggatccaggccgctccctggagggatgaactgtcgaggggcccagggcagcccccgctagaggcccggtcgggtgtggggtcccctgtcccctgtcccgagcccggggagggggacactatttctggtactcccaggaggctgcgggtcgatgctcgtgccagcctgggacccaggcagcacggtttctctcccaaattgtgccagagaacacgcacgtcctggttttcattgttccccgcctcctgcgactcgtttgtgggtgagtgcttgggaattagcgcggcgacttcgcgctagaagagggacagtaattgcttttgctaattttagagcgcagagcccgctgggcacagacagccttcctgttcagtacatctttgtccttatcgagtgaccatttttgcaggctggtgggcgacttggggggaacccaactggtttattttgccttcctggaaacgttgtactagtttatccagatttttttttaagggaaaaaagagtagacctatagataatttctaaatcatttaaaatgaaatacatatttctgcacgcaaaggttatgacgtggacttttacttaaaatactttaaacaatggaaaacttgcacttccaatatggattttaaaaaaaaacttacgtaaaggttttccttttatagcttaaaggaaacctcagatttattataagccatggtggttatccttcctatcctcttttgacttatttcttagcaataataattatttgtgcgtaatttttcatcattgtggagaaattatcttttttattttattttttctgttgagacggagtctctctctgtcccccaggctggagtgcagtggcgcgatctcggctcactgcaacctccgcctcccgggttcaagcaattctcctgcctcagcctcccaagtagctgggactaccggcgcccgccaccacacctggctaatttttgtatttttagtagagaccgggtttcaccatgttggccaggctggcctcgaactcctgacctcaagtgatctgcctgcctcggcctcccaaagtactgggattacaggagagaacgacagctcccggcagcaactcattgcttaattcatttttaatccttaaagcatttacctaggtaaagctgtttcagcagttaataaatcagatattcagttttttaaaaagttatgatctttctcactgccagcctgatttcctttagatttaggcttatgttgtacttgtgcctgtgaacaagttcattcaatctagtggaaggaatcactgttttagacacaatggatgttcaaaaatggaattggacacagatacggaatttacagtttagcagggaagagaagatgcgtacctaaagaactagcacaagatcggccaggcgcggtggctcacgcctgtaattccagcactttgggaggccaaggtgggcggatcacgaggtcaggagatccagaccatcctggctaacacggtgaaaccccgtctctactaaaaatacaaaaaattagccaggcgtgctggcaggcgcctgtagtcccagctacttgggaggctgagggaggagaatggcttgaacctgggaggcggagcttgcagtgagccaagatcgcgccactgcactccagcctgggcgacagagcgagactccgtctcaaaaaaaaaaaaaaaaaaagcacaagatcaaaagtagtgctaggagagaagcacagataaagtgtggtcagctatgaaggacaggtgttggcactgctgcagaacctggaggatagcttgagaaaggtttcctgggggagctggcgtttggtgggcatggcttgaaagatggttgggggggtttgtgcctcttgagatgaaggaggggtgcgcagtcattttaggcagagaaagcaacattaactaaaggcagagtgatagaaaaactaaggagcagtgactgtttcaataggctgaagtttgaaggggtagaaagatgacaatttggaaataaagttggaaagggataagttgtgccagatcataaagagtctggaaatccaagaagtttgagctgtattttgtgcgcaataaggagcatacagatgatttggaatggggagaggtggagaccagagaacaagaggctgtggcctcattgaaggccaaaggaaatgaaggcagagtggatgcctaccggccacaccaataacagaaatggaagaagggtacttgaagtgtgcagcctctactcagatgcagttggttgtgggcatgcacaaatgtgggcccacggttgccagatctgattttcaagagaaactggaaatacagattttaaagtaaaaaatctctcaatgttttttgggagatttgggagaaacatctgttaggcttgcagtcaggctcctaaaatttaggagcatgtttaattcctgggtagaaattatgcaccggtatgggagagatgttaatgtagggaggatttattattcatttgtccacattaactcagatgattactgttacaccagatgcatatacaaagcatttgatgttaaaattaacagtatatactgcagttttcatagtaaagccattatacttggatttctttcaacaaaataacccttttcacagcattttgtatgccatgtaaaattatacttttcatgcctacgttgtatgaacttaattctggtttttacccaggacttttgttgccagtattaaggatttttttttctatttttactctttagttaaaattataagacctaattatgagtgatcaaattaaattcattatggacagtctcaataaggagccctttaggaagaactataatttaatcacgtttgattccttggagccaatgcaactattacaagttctcagtgatgttctggctgagattgacccaaaggtaagagttttctctttctttttgatgggtagcagaaagccaatttctccctctaaatagctgtgagtcttgggcacattatttaacctctctgagctttattttccatgtctgtaaagtaatagtaaataatgcataacatttctctgctagctcaaaaataaattatctattggtaccttatttcaaaattatttatccacttccagacataaataggtttggttagggaatgaaaattcttttacaaaaggttttattgtattgcaagttagttcatgtctctcatacactggtccattccactggatactttttttgaagcttaacattcttaatgtgaatcttgatctgacttgggtgtaccctcacttggaatctgggggcctccatccttaatctgttttatgaagagaccattgtgctgttaagctctagcagaacaattttgtcagtgagtttaaatattgtcctttgttacatatacaacaataacatgtttttttcaatttctttgttagcaacttgtggatatcagagaggagatgccagagcagacagccaaacgaatgttgagccttcttggtattcttaagtacaaaccttcaggaaatgccacagatatgtaagaatctgatcacgtattgagtttttaaaattatgctttaatatccaaaccttcatatactgcaatcaatctttgtaggtaatacctggtttccctcatttgatggcctgagaacatcactgagtttcaaaataatcttaaaccttctataaacaaactcagaagtcttaagagggtcagttctttgccttaatcaaactgtctggtaaatccactataccattttatcctttatctgccatcctagataaaaacagcttaaacacaacttccttggatatgccaatgatatattgagggccaaatttttctaattttctaactaatgtacagactgactttagaatagccttggggccaggcatggtagctcacacctgtaatcctagcactttgagatgccaaggtgagaggatcacttgagctcaggagtttgagaccagccagggcaacatggcgaaacgctgcctctacaaaaaatacaacaacaaaaaatcagctgggcatggtggttggtgcctctagtcccagctacttgggaggctaaggtgggaggttcacctgagccaggaggttaaggctttggtgagctgcgttgtgctcaagcctgggcaataaagtgagaccctgtctcaaaaaaaaaaaaaaaaaaaaaaaagattccttgggtttatcttttttaaaaagttacagaaagcaatttggacattgtaaatcagattttgagaaaatgctgtctctcttcaaagtttaccgttaagtgcgtgtgtgtttgtgtatgtgtgtttctctcttaggagtacttttcgtcagggtttggtgattggaagtaaacctgtaatttacccagtgctccactggcttcttcagaggactaatgaactgaagaaaagagcatatttagctcgttttttaataaaacttgaggtaccaagtgagtttcttcaggatgaaactgtggctgacaccaataaacaggtaaacaatacataaatggtacattgaaactgtaatggatttcaaggtgtatatattcaaatacatgttactctttttttatttgctgtctttgtagttccaagtggcacaagaagataaaactgtatcagctaatgttcaactatggccacatctcaagataatggcttttgcacacaaatactgttttagtgataggagtatgtgaatagaaaaaaaaaaaacctgatactaagattttagaataatttattacttagcaattgtgggtaaatagaatcctgggttaagtctgcacagcactttgttcatcagtaaggtgactacatagttttttatccaaatttgagagaaacagactatcataacatttaaacaccaagacaaatggtttaaattgacactatcccaggcaaattgggacatgtgaggtcctggaaagaagcaggcaaagaacctaggcttgcagtctcaaagcacttcccaatcagacaaagggtagagatagattccggagtttgaaatctcagtgcacctttcttgccaaggttttggagtaacattgggctctggcataaggtcttaaagctcttgagtactgaggattctggctggtctggcttctgatcctgagatccctaagcacattgctggtcaaagactgtggagagaaagaaactagactcagatttaaaaggactttgatttttttttttttttaaaaagtgcttctgtttagtgtttcacacttttattccatagcacttacatagactgatttgtgccaaattgttgtgaatagtttgtcaatctgtctttcccaataaattctgaggcccatagagacaggtgccatgtcttatccatctttattttcttccagattttgtatagtcacttctaatgttagctcaatatttggattgaatcgcagtaaccaactgaatatttttatttttatccatatattttgctatttggggtagacatggcagtaactcaaaatagagtcaatattgatctcttaagacagtatttatgcaaataattatgtcagatgtcacagtagatgccatgggagaagcacagcagaatgagaccacctgtccttacctttgaatattttacacaatgtgggaaatagagaagtgtaaatgtgtactttctccttcctaggctcccaccatcgataaatctgataaaaattaatttatctagaggaagttgattaagtcttttttttttttttttccgagacagagtcttgctctgttgcccaggctggatggagtgcagtggtgcaatctcggctcactgcaacctccgcctcctgggttcaagtgattctcctgcctcagcctccttagtagctgggattacaggtgcccaccaccacacccagctaatttttgtatttttagcagagatggggtttcatgatgttggccaggctggtctcgaacccctgacctcatgatctgcccacctcgggttccaaagtgctgggattacaggcgtgagccacggtgcacgacctgattaagtctttgctaaatatgctcagctagttgatgaaagaattaatggtaataaagacatacttgttcttgaagcatatctgacaggtatctctctctatatatatgtatatacatatacatatatatataaaatgagaaagagatatacacacacacaatgatttacaatatataatgatttacacatttagccagtcatttcaggaatcctaataaaaatacatattatcttttggaatgaagggtcttataattaataatttgtagatttaagatatgatcaatcaagaaaaatattattctgtcattccccatcaaaataactttttggccaggcacagtgtctcatgcctttaatcctagcactttgggaggccaaggtgggcagattgcttgagctcaggagttcgagaccagcctgggcaacatggtgaaacccatctctacaaaagataaaaaaattagcccagcatggtgacgtaagcttgtagtcccaattacttgggaagctgaggtgggaggatcacctaagcccagggaggtcgaggctgcaatgagctgtgatcgcaccactgcactccagccagggtgacagagtgaaaccctgtctcaaaaacaacaaaaaaaaactattttaaaaaatttttaggtaacaggatttttttcattcattcaattactttttttttgtttgagacagagtctcgctttgtcacccaggctggagtgcagtggtgtgatctcggctcactgcaacctccacttcccaggttcaagcaattctcctgcctcaagctcctgagtagctgggattataggtgtgcgccactgtgcccagctaattttttgtatttttagtagagacagggtttcaccatgttggccaggctggtctcgaactcctgacctcaagtgatccatctgcctcagcatcccaaagtgctaggattacaggtgtgagccacctcacctggcccattcaactactttatattaaacacctccatgggttatgcactgtgctaggccctagggatacaagggtgtacacaatgaatatgattcttttcctcttggctctcactatatgatggagggagacagacagaaaattataatagtcagttataattgtacatgatatctactctgataggatagataaagggccagagaaggcttctctgagaatagtagaatctatgtgaagacttgaaggatgaaaaggagttgcttaagttatgggtgagggagtcatagatgtataagctggacgtgagagcatggaatgttcaggaactcagacatcaacatagctagtgtagagtgtgaagcaggaaagtaaccagaaatgaagatagagaagtatttagtgttaagatggtagagatgtacttttttgtaccctatataaatgtataaggatgtgtttttgtgtttttaatgctgttcttacaatgacttaagtaatcgctgtaagttaatagataacctgattaagaaaactctatggctaggcgcggtggctcacgcctgtaatcccagcactttgggaggccaaagcggatggatcatgaggtcaggagttcgagaccagcctgaacatggtgaaaccccgtctctactaaaaatacaaaaattagccgggcgtggtggcgcgcgcatgtaatcccaggtactcaggaggctgacgcaggagaatcgcttgaatctgggaggcggaagttgtagtgagccgagatcgtgccactgcactccaggctgggcgacagagcaagagtctgtctcaaaaaaaaaaaaaaaagaaagaaagaaagaaagaaaactctactggatctagttattagtttataatttcttaacttattcttctagtatgaagagttaatggaagcctttaaaactttgcataaagaatatgagcagctcaagatatctggattttctacagcagaaataagaaaggtaaaggaaagaaaacatagtaacaatttttttgggatttgaataatattggatttagcattttattaattcagtatgagtcttaagactatatggagactagtgatagcaaatggcacattttactttgtggggggacctttggtagttccttactgatgaaattgatgagactggggtaaattcacgatgagtagttacttacagtacggaagaagagtgatatatgtccatctactattcctccattatgtcctgtaagtaaaccagaataatgacaagaacctagagtctatattttaatttattcattattactaaagctttctctctcttttttttttttttttttgagacagggtctcactctgtcattcagactggagtacagtggtgtgatcacagctcactacagtctcgacatcccaggttcaaatgatccacatgcctgagcctcctgagtagctgggactacaggcatgcgccaccatgcccagctaatttttgtatttttttgtagagacgggattttgccatgttgcccgggttggtcttgacctcctgggctcaagctatcctcccaccttggcctctcaaagtactgggattataggcatgagccactgctgcacctagcctttatttcttgtttaatcatattttctaaattttctacaaagcatatgttcaagaatactttagtaggccaggcatggtagctcatgcctgtaatccaaacactttgggtggccgaggctggaggatcatttgagcccaagagtttgagaccagcctgggcatgatggcaagattctgtctccagaaaaaaaaaaaaaaacaaattagccaggcatggtggtgcacgcctgtagtcccagctactcaggaagctgaggcaggaggatcacttgagcctgggagttcaaggctgcagtgagctatgatcataccactgcactctagctgggtgacagagtgagaacttgtctcaaaaaaaaagaaaagaaaaaataattcactcataatctcgttctccagagacaactatggttgacattttgataaatatatttaaatctttttcttggtattctgtagataaatgttgtaatccgcctctttcaattaatgtcatttcatgactttttctcatgtcattaaacattcttctgcatgatttttaatgactttcattgtattatgtggtgatttatttaacaatcctcatacattttggtcatttccaaattgtagatgtaacttgcattaatgagaatctttacagaggatgtcttttcatgaatgttttattcggacaaatcatcagatataaaattactgggctagaagggatgaacatttattttaagatttttttttttgagacggagtctcactctgtcacccagggtggagtgcaatggcgcaatcttggctcactgcaacctccacctcctgggttcaagcgattctcctgcctcagcctcccaagtagctgggattacaggcacttgccaccacgcctggctagttttgtatttttagtagagacaaaatttcaacatgttggccaggctatattttaagacttttgatattgttcttcagtacagtgctatcggtaatgagtaagagtgcccatttttccaaattctgtcaatactgactaccgtgtatattttacctttactattactgcgatatttaagctattagttttttagatttaggaaggagtttttttatttgtttgtttttataacaaaatactatgaagctggttaacaggaaggaagtttatttttgaagtctttattttcagagacggaattggttcattggaaaaaccaggtacaaacttatgtcatgaaaataccatagccttaaaaataattttgatggaaaattggcaaaatatatggcttggtatttaacagaacagatgggatgtcagcagctgttgttcatgtatttagacctgcacactttccattatagaaaatttttcaaaaatcatgtgcccatatttggaatcagaacacaaatgtgctggttggcagctttaccttgctgcattataactggtttttgttgcatttctggatgaacaccaagctgccaaaaaaattaccctgcataagaagccctgggggaaaaatagaaatgaccttcatccaaaagaggatcttggttgttaatgctgtggttataaatgatgaaaatgttagatgcataatcaaaataaaaccttatctgtttcctacagactgagaatactttttcttataaggtcttctttgccactttttaggatatcagtgcaatggaagaagaaaaggatcagctcattaagagagttgaacatttgaagaaaagggtaaggcagaattagtactgtaagactttggccccaagtcccaaggacttgcaaagatttaggaatgcaaataaagattcagccaagcatgagtgtacatctgaggatggactcaaataacattgacgaaaagggaatctctctagacagtagcccagcactttcaaggacctggagcctagagctttactgtcatctctagggagtactgtttaccaaaaggaaatgataagtggatgtctgagtcacatgacatgctaatttttttcttcaaacctgacagtaacatgtactacttattcccttactgtaggttgagacagctcagaatcatcaatggatgcttaaaatagcaaggcaacttcgagttgaaaaagagagagaagaatatcttgcacaacagaaacaggaacaaaagaatcaggtatccacataaaagtttatattctcagtatgaaggaaatagttccttctcataatccaaatgtaaagaaaagagttttaaaattgtagacgttcacgttccttttgctaacataatggaatactcttttaattaagataaatatttcaggccgggtgcagtggctaacacctgtaatcccagcactttgggaggctgaggcgggcgaatcaggaggtcaggagttcaagaccagcctggccagcacagtgaaaccctgtctgtactaaaaatataaaaattagctgggcatggtggcacatgcctgtagtcccagctactccagaggctgaggcaggagaatcacttgaacccaggaagtggaggttgaggtgagctgagatcacgccaccacactccagcttaggcaacagagtgagactttgtctgaaaaaaaaaaaaaaaaaaagataaatattttgtggcaacaacaataccactttttgggttttatactctgaattgtatctatacactgtcttttggcctatgcttacctcgtgttgttccaacattacagaagagtcattgtaatgttaacagtaagattaactgctaataaaacttctagaatctctacaggatgcttttagattccagggctatgagaccattctttttattccagtgatcacagtaccctctgcagtttactacaatggcaaataagtcatgaaaaggctcaaaatcacctacactccatgtttttaaactttgccttaaagaaaaataatttgctaagaaattattacttttacttattaaaaatctattttaaaatctgagtagacttatacattaaaatatatttcacataagcttcatttactactaaatcagcagtttaaatgtttgattttgctggcacttgacttggcatcgaagtagtttcactgcagcagtaagctgcatcgcctaagccctgaatggttacttggcgttggtttgtgattctgaaacatcactatatcaatgttaacattacttggccttaagaaaaccatgtataacaagaaaaatctggtgtgtgtgtttctttgataagtatttttccttaaaccgcaaattcagtaaataactaaagaaaaatttgtgaaaacttccttaaaaaatgtatgtgaaaaggtattgagagaaccagttacattttgggtttaatatgggaattttccgagttcttattatttgttccttttatatcataagaattatatggaacttgtatttttcattgcttgcctaagtgagaggtaagcttcagtagactaagcaagtaatctatttaattgtattttaaagctatttcatgcagtgcaaagattgcaaagagtacaaaaccagctgaaaagcatgcgccaagctgcagcagatgcaaagcctgaaagtaagtggaaattattatatggtatagatgattagaaaatattaatttaaatcacgatcttcctaaaaaatcaatttgtgagaattagttatcatcaagtgatgtctcagcattttggaacatcatttcctagctggagaaggagagccctgataaagacatccctgggttttcaccagatgtttttaaaaattcctaaccagatggccgggtgcagtggctcatgcctataatcccagcactttgggagcccgaggtggcgagaggtcaggagttcgagaccagcctagccaacatggcgaaaccccatctctactaaacatacaaaaattagcagagcgtggtggtgggtgcctgtaatcccagctactcagggggctgaggcaggagaatcacttgaatctgggaggcagaggttgcagtgagccgagaccgcgccactgcagcccagcctgggcgacagagcgagactccatcttaacagcaacaacaaacaattcctaaccagtttttcacatcagagagtgaagataatgaaaacaactgtggagggaggctgtctggtttgtgcttgtataaaggacttagcatggctgggcgtggtagctcacacttataatcccagcactttaggaggctgaggcgggtggatcacttgaggtcaggagttcgagaccaacctggccaacatggtgaaaccctgtttctactaaaagtacaaaaaaattagctgggcatgatgtcatgtgcctataatctcagctactcaggatgctgcggcaggagaattgcttgaacctagaaggcagaggttgcagtgagccgagatcgcgccattgtactgcagcctgggcgacagactgagactctgtctcaagaaaaataaataaataaataaataaataaaggacttagcatggacgttgtgaaaatgatggttggaaaaattatgaatcattgttttaaagccagggctataaagaaaaagaatagaatgctggatccttaaaaccgagtgtttttcatattttggtttgtagaataacagtgctaatgacgtaggtatctctggctctgttcttacattagcttaacacagaggataaactgtcctaacagcccagattacaccaccagatccatcctaggcattttacaaagcatttttgcttgtcagaagaaagaccacgcaaactgaaagagcagtggaaagctctcatttgtactggagaactatcccaatgtaaatagctgatagagggttaattcatctttctgtagtaatctatgaaattctacaagagcagggagcaggaggttaaggagttcctacttcgttgacatctttctgggaagtggaaagtgatctgttcacagcctaggaaaagggtagattaaacatatttaattgatccaggtatttagtttaataagctctaacttttcagtaacaaaaaaggcttacaaaagctaatgtttacttaaataacaaaaagtacttttagtatgacagtataatttgtctttttgcagagtaacagctatattataaaacattcactgaggttaatcattttttttttttttttgagatggagttccactcttgttgcccaggctggagtgcagtggtgcaatcttagctcaccgcagcctccgcctcccgggttcaagcgattctcctgcctcagcctctggagtagctgggattacaggtgtgtgccaccacacccagctaatttttgtgtttttagtagagacggggtttctccatgttggtcaggctggtcttgaactcccgacctcaggtgatccacccgcctcagcctcccaaagtgttaggattataggcgtaagccactgggcccggctgaggctaatcattgttatactccacacatttgtgagatttattacataaaagaagacactcatttgattatagtaggatcagtgagatgttttcaaagggtttttaatataaaagtttgctgacatcttagtgaccttgtatttaatttacccaggattttgaaagataatgcttttaaaacttttcatagaaacatatgactatttttcaaggtctaagttaaattttttaagagagtaatttaaaatttgatggaaacttggtttttatgttttaaacagctttattgaggtaaaatcgacatataataaaccacacaaaccctggtgcagtggttcacacctgtaatcccaacattttaggaggcaaaggcgagcagatcacttgatcccaggagttcaagaccagcctggacaacatggcaaaaccctgtctctacaaaaaaatacaaaaattagccaggtgtggtggtgcacgcttgtagtccagctactttgggaggctgaggtgggaggatcacttgagctcaggaggtggaagttgcagtgaactgagattgtgccactgcactccagcctgggcaacagagggagactctgtctcaaaaaaaaaaaaaaaaaaagaaaaggaaaaaagaaaagaaaaagctgcatgtatttggtatggttcagcgactcacacctataatcatactcctttgggaggccaaggtaagaggatcacttgagcccaggagtttgagaccagcctgggcaacatagcaagaatctatctctacaaaaaataaaaaattatttgggaggccaaggcgggtggatcacaaggtcaggagagcgagaccatcctggctaacatggtgaaaccctgtctctactaaaaaaatataaaaaattagccgggcatggtggcgggtgcctgtagtcccagctacttaggaggctgaggcaggagaatggcatgaacccgggaggcagagcttgcagtgagctgagatcacgccactgcactccagcctgggcgacagagtgagactccatctcaaaataaacacatacatacatacatacaataaaataaaataaaataaataaaataaaataaaataaaataaaataaataaaataaaataaaatataaaataaaataaaataaaataaaataaaataaaataaaaaataaaaaattagctgggcatggtggtacatgccgatagtcctagctgtccaggagcctgaggcaggaagatcacttgagcccaagagtttgaggttaaagtgagctatgattgtgccactgcactccagcctaggtgacagagtaagactttgtctcaataaataaataagtagcacatatttaaaatgtattaaatttttttttttaattttactttaagttttgggttacatgtgctgaatatgcaggtttgctacataagtatacatgtgccatggtggtttgctgcacctatcaacctgtcatctaggttttaagctccgcacacattaagtatttgtctgaatgctcttcccctttcctcccatgccctaaagtgtatccttgattacttttgacatacgcatacactggtgaaaccatcagcttttaatcaagatcacaaacctatccatcaccccagacatttccactgaccctttttaatgtctcactcttgcccccttctgcctttctgtccctccccaggcaaccatggatttgctttctgtcactataaatcagtttatatttgctagaattagaaacttttttttaaatagagaaaatattatttgagaattttaaatctttaaaaacattttagtctttgattccatgcatctctaattacatggggtacacttaagaacctgaggatggaaaagctggtcatctaacagacaaagaagtcaggatgtagatttaatcgaaaaccacataggaatgactgactaattacagtgtgatttatttatttttattgtttatttacttatttatttattttttgagatggagtttcactcctgttgcccaggctggagtgcaatggcgtgatcttggctcactgcaacctccgcctcccaggttcaagccattctcctgcctcagcctcccaagtagctgggattacaggcatatgccaccacgcccggctaattttgtatatttttttagtagagacggggtttctccatgttggtcaagctggtctcaaactcctgacctcaggtgatccgcccgcctcagcctcccaaagtgctgggattacaggcatgagccaccacgcctggcctattttttattttctgagacggagttttgctcttgttgcccaggctagagtgcaatggcatgatcttggctcaccgcaacctctgcctcccgggttcaaacgaatctcctacctcaagcatctctacagcctccagagtagctgggattacaggcatgggtcaccatgcccggctaattttttgtatatttagtagagatggggtttctccatgttggtcaggctggtctcaaactcccaacctcaggtgattcgcctgccttggcctctcaaagtgctgggattacaggtgtgagacaccacgcccagcctacagtgtgatttattaaacactttctcttctcttcctttctctaatcctgaaaaaagaaggaatagtgaagtaatgaatggaaaacttagaatttgcagttaataaaattttacatgttaatatatggttagcacgatggaactaaaaatagttttaaggctttgggccagatgtattatgctttgggccagatgtattatgcaatctattacacagattacttaaaccagaaagcccatgtgttaaaaatttgagccaggccagacgaagtggctcacgcatgtaatcccagcactttgggaggcccaggcaggcggatcacttgaggtcaggagttgcagaccagcctggccttaacatggtgaaaccctgtctctactaaaaatacaaaaaattagccgagctggtagtgtgcgactaattccagctactcaggaggctgaggcaggagaatcgcttgaacccaggaggcagacagaggatgcagtgaacccagaatgcaccactgcactccagcctgagtgacagagcaagatttcatctaaaacaaaaaacaaaaaacattcaagtcagaatttgtaaatgtgtaaatggaaagatatgaaataaactttgtaaatctctctaggctgggaatttaaaacaagatggttattcactgaaaatctgtgtgtatagttgtccaactgcaaaaataagaaaactaaaatcttaaaaatataaattgccacttaactgtaaactaataatactttacaaaataaaaaataccaaaacatggaaaacttaaaacatttatgtgtaggtagatactttgtttcttttttcttttgtttttttgagacagagtctccctctatcccccaggctggagtgcagtgatggtgacacgatcttggctcagtgcatcctcttcctcccaggttcaagcgatccttgttcctcagcctcccaagtagctgagactacaggcatgtgccaccatgcccggctaatttttgtattgttagtagagacagggttttgccatgttgcccaggctgctctcgaactctagacctaggtgatccacccacctcggcctcccaaagtgctggaattacaggcgtgagccactgcacctggcctgttactcttttttagattttaacttgtggtgcttttagtaatgtcttcattggcttgaagctgacaaatgataatgaattatcatttatgaactgttataatagaaatataaattgttctgggtacagtgtaatcccagaactttgagaggctgggatcacacctgtaatcccagcactttgagaggctgaggcaggtgactgctcaagcccaggagttagagaccagcctgggcaacatggcaaaacctcgtctctacaaaaaaaaatacaaaaattacctaggcgtggtgatgtacacctgtgatgccagctacttccagctactcaggaggctaaggtgggaggatcacttgagctgtgaaggtttaggttgcagtgagctgagatagtgccactacactctagcctgggtgacagagcaagaccctatctcaaaaaaataaaaaatacatatgtatatatatagcattaaaagtattccaaaagaaaaaaaatacatgatcatctgtataaaagagcacctgggttagattttatttgtgttatcatttggttcatgggtctcttaaatgcttagaaggtaaaatatgacccaacaatgtatctggctcagcacatgttatttttgcgtattgcgggatataaaagaattaggttataatttgaaagggtcataatagcactttttctataattatttaaatattcttccatgtaaattatgtttcttcattttcattgtaattaacaataaaatatttcaatggccaatcttttattgtactatgctatatattatacagtttgttttcaacaaatatgccgtatccaggtcttatatttaaaatagtatacagaatatcactgtacctactcttttgggctgaatatttatttattttatttttaaaggtttaatgaagaggctagaggaggagataaaatttaatttatatatggtaactgaaaaatttcctaaagaattagaaaataagaaaaaggaattacattttttacaaaaagtagtttcagagccagctatgggccattctgatcttcttgaacttgaatctaaagtaagtgagaatcatctttttatagctctcaattttatctgatccccagtcctataaaattatgtgaactgctttctgtagtatcccactattgactcttaaattaacctgtgctaagagttgacaactcttatgaggaattgtcctttatgaggaattatagaatgttatgctattacttaatccacatgatgttatgaaaacataatcaattgattagcaaatgaagtaacttaaatatgtaaattaatgcatatgaattgaccagtgggtttatgtcttcataatgtaagcatttagatgggaaatttggaaatattttaattgtcattaatttttatttccaagcaaaatattatagcaattttatatttaaagctaatatttttattaaccttgtatacctgccttggaattactaaatattgtaatgcttattgaaagctggtatcaggttatacctttttttttttttttttttttgagacagtacttgctctgttgcccaggctagagtacagtggcacaatcttctcagctcactgcaacctctgcctcctgggttcaagtgattatccagcctcagcctcccaactagctgggattacaggcacgaaccaccatgcccggctaattttttgttgttgttgttgtttttgttgttgttgttttgttttttgtttttttttgagacagagtctcgttctgttgcccaggctggagtgcagtagcgtgatctcggctcactacaacctccgcttcccgagttcaagcgattctcctgcctcagcctcctgagtagctgggattacaggcacgcgccaccacgcctggctaatttttgtatttgtagtagagacagggtttcaccgtgttggtcatgctggtctcaaactcctgaccttgtgatccacccatctcagcctcccaaagtgctgggattacaggcatgagccaccgcaccaggacttgttttgttttttgagacggagtcttgctctgttgcctagactggagtgcagtggtgagatctcagctccctgcaacctctgcctcccgggttcaagccattctcctgcctcagcctcccaagtagctgggactacagatatgtgccaccatgcctggccaatttttttatttttagtagagacggggttttgccatttgtccaggctggtcttgaactcctgacctcaggtgatctgcccgcctcagcctcccaaagtgctgggattacaggtgtgagccactgtgcttggcctgattataccatttttgttccctagaattaaaatgctaggtcaggtgcagtgcctttttttttttttttttttttttgacggaacttgctctgttgcccaggctggagtgcagtggcacaatctcagctcactgcaacctccaccttctgggttcaagcgattcttctacctcagcctctcgactagctgggattacaggcgcacaccactatgcctaatttttttttttttttttttttttacacggagtctcacactgtcacctaggctggagttcagtgacatgatcacagctcactgcagcctccatctcccaggctcaagtgatcctccacctgagcttcccaagtagctgggactacaaggtgcatgccaccagttctggccaatttttgaattttttgtacagacagggtctggccatgttgcccagcatggtcttgacctcccagattcaagagatctgcctgcctccgtccacctcagtctcccaaagtgcagggattacaggtgtgagccattgcactcagcctaattgaaatgttttgacttgctaattctttagtgtgcttactatgtggttaatagccactacaattaaatacataattctgactgttttggttttttttgtttttttttttttgagatggagtgtagctctgttgcccaggctggagtacagtggcgtgatcccggctcactgcaacctctgcctcctggattcaagtgaattctgcctcagcctccccagtagctggaattacaggcacctgccaccatgcccagctaatttttgtatttttagtagagatggggtttcactgtgttggccaggctagtctctaactcctgaccttgtgatccacccacctcagcctcccaaagtgctgggattacaggtgtgagccaccgcgcccaggcctgactgttttattcttttaatttacttagaaaaattaaatgtccaagtcagatctggctaaaattttgttttgttttgttttgttttgtttttgagatggagtctcactctgtcacccaggctggagtccagtggtgcgatctcggctcactgcaacctccacctcctgggttcaagtgattctcctgtctcagcccctggagtagccaggactacaggtgcatgccaccaagcccagctaattttttgtatttttagtagagacggggtttcaccatgttggccaggctggtctcgacctcctgacctcagatgatgcacccgcctcagcctcccaaagtgcttcaattacagatgtgagccaccgtgcccggcctaatctggctaaaatttaatgtcacagaattagggttagggttagagagaactctaatctttcaaaggatggatacactgaaaaccatggtttttgttttgatatgttgaggaactatatgcttctgtcagatttattcagttttattacattttggaaagatttagattaatgattaggataaatgatagttatcgaagaatcacagattattagcacaggaagggtgttatccctgtcaactgtcagctgggttcatgaatcattgtaataaatccctggtgcatatttgttcacatttgctttatcactttcagtgacttgaagtcacaacgtaggtgaggggataacttcagatttttagaaagcatctttgtggtaatgtataaatatttcatgtaaaatactttaggataatttagacatagatgattaaatctatataagtaatcaaactgtgtaattatatgtcatgaaatgtaaattgtttctaaaggtaatcataacaagctccccataacattaatgaaactgttttgcccatcagagacttaatgttaagaactgtaaattccagatgggtgccatggctcacgtctgtaatcccagcactttgggaggccaaggtgggaggatcacttgagcccaggaattcaaaatcagtctgggcaacatagcaagaccccatctcttaaaaaaaaaattagtctaggtgaaactgagaccttgtctttaaaaaaaaagaaccataaattcaaagctggtttggccagacgtcacttagtttgtgtacttatagggaaagttttaactttttttttttgctttcatgctattttagataaatgaaataaacacagaaattaaccagttgattgaaaagaaaatgatgagaaatgagcccattgaaggcaaactctcactgtataggcaacaggtaagaacattcttttggctcacatatttagatctgtaagcatattcatgaaccactggctgtgttatctatagtcttaaagtgagaaggaagtagagaataaatgttgttctgtcactgctaatctccatagtatatcaaagaattagtggaaaagccacaaaagatgcttattcaagtttgaaattacgatacccctaataatgcttagtttccttagcatgtacgaactgtggtaatagagctatttgtgtttgtatctgtgactgtggaatttatttttaaaatgaaaacttaccttaggtggtataaataaaaatatttataatttttaatgagttaataacagtatgctttttcaagtttaaagttagtttgcaagtgtagaataaattaaattttagtgctaaagcatttattattttatccacaactaaattgtcacttagtttttgagggtacttatcttgttgtatatttctataaaagattcaaatgaaggccatggcttatctgaaaagaaccaaggcaggaggattttagtgtgaagagcactctacaacctcagaaaatactaagctacataacaaagcattatttaaggacattagaattttttaaaacctttataacggaaaatttcaatcaattacaaaggtagaggcaaattgttcaataaaccctcatgtgtccctgagctacagggctcatggccattcttgtttcctctatactgccaaccccaactatattattttgaagcatatcttagacttcatcataacatttcatctataaatgtttcagaatatatatctaaaagataaaggctttttaacttaaccacaacataccacatctgaaaattttaataattccttaatatcagaaaatattcagtcagccaggaaatcaatgacattcccttgtctctctttttttcaattaagatccatataggattcatatattgcatttggctgataagttatttatttatttatttattttttgctgtcacctatctgtcccagaaagtttgtctcttttaatccatatgttctcttcccatcgatttatctatttagtgctttttggcaatatatgtgttgacaaaactggttcatttttcccatgatatttctaacagtttgtgttttactgattgcaaccctatggtgttgttttaccatgttcatttgtttcccgtatttcctataaattagaactaggagcttgaacagatctggtttgatttttttttggcaagaaaactttctaggtggtattacatacttttatttggaagtgataatgctcggttgtctgagcagccacttactattattgctcattgcttatccattaattttattataaattataaaatattcatattttgattccttcttcatttattagctggactactttttttttttcttttgagatggagtctcactgtcacccaggctagagtgcagtggtgcgatctcggctcactgcaacctccgcctcccaggttcaagcaattccctgcttcatcctcctgagtagctgggattacaggtgcccaccaccatgcctggctaatttttgtatatttagtagagacagggtttcaccatcttggccaggctggtcttgaactcctgacctcatgatccacccgccttggcctcccaaagtgctgggattacaggtgtgagccaccgtgcctggccctggactacttttataaagagaaaacctctcatcaactatttggttatcctgagttatagttcatataggataggcagggtacatgctttgtttttatcattatttatcagttttcataatgaatttgtttcctctaactcatttgcatcctccaacagtgaagtgatcaattagggctattttttgttgttttttgtttatttaatctcattatgaatcctagacattataagttttaaacagtatccttaatgatgctcaaattgtcccagttttggctaatgggaggcttttcaagttaacttttgacttcttttcagattctagtggtctttgataatttccttgctttctgcattatttaagtcatttctaggctcatcgtttacatttcctactctagacctggaattaggctttcttctatgaacctggtttgttttagcaggaaatggtatttagaaactgaaacagggaaagttcccttgtccccatcgcagggcatgtgacagggggagtggctcgcttctttagtgccccactgctcaaacctctagaggaggtatagacaggcaggttgtggggctctgtccccacagcagtgtctaagggtgaatgtttacagcggaagccccagtgggcatgtgttacagtgtgctcttttagtttagccatccataggcggcttgtgttagtcagctcaattagacccctaccttatcacaaggacagagggctttctgtatccctggggttcttgtcttggtgtaccggaagaacggatcacatgtgctcttggagaatgggtgtaaggttttatggaagtagctttcagcagataggggagcccgaagggagatggttttcccttggagtcaggccgccgagtggcctgactcttctttgaccaccctgactcttctcccactgccccatcctaactctgcgtcgttctgccagtcaatggcctaggtcagtcagtggcctgccagtgcctgtcggtgtctctaggtatcaagccacttgtgtcttcttcagccgatctcctcttgatgtccggccacttgtgtgtctgcctgctagggtcccgggggtttttataggcacaggatgggggcatggcagaccagggtggtctcgggaaatgcaacatttgggcatgaaggcaggagtgcctgtcctcacctaggtccatggggacagacctgggggtggagccctcaccagggaccatgccctcctctacccagcacttccctgccccacttctgtatcaaaaccacagtctgggtgttaggagttctcgttgattttttgtttgtttgttttcttttcttttctttttttttttgagacagagtctcgctttgtcacccagccgggagtgcaatggcatgatcttggctcactacaacctccgcctcctgggttcaagcgattctcctgcctcagcttcccaagtagctgggattacaggcacattccaccacgtccggctcattttgtatttttagtagagacagggtttcaccatgttggtcaggctggtcttgaactcctcccaaagtgctggaattacaggtgtgagccaccgcacccggccatgtttttaggcagccattgtttttaggtcttttcagtggaccaggctaggaggtatttctttctctttctttttcataaagtacaccatcagtgcatactaatccttccagttcagattcaggactacttggttttacttagtctcgtcaatctcacatctttttccttatcccacgttgaaaatcttggttcttagtaacatcaacataatttaattcataatttgcttttgtccagtggaaccaacataaatttatcatttttataatattaatccacattttacacacaacagtctcagaataaaagtaccagtaataccatcaagaatatgattactactgaaaattggtctttagttcattttgtttttggggtatatattcaaataagtttccagcatctattcctgtgcttccaccctattctttccttcccacataggtattttttaaatttcacactttattattccattagaaatattatatagacgtatatactcatatctcacttcttagggaaagaagaacatattaaacacactcttcttctccttgcattttttcttcttaacaatatatgctggtgatcattccatagtagaaaaaattttgttcctttttaaaaataccttgattgagatataattcacataccatataattcacccatttaaagtgtacacttcagtggtattttagtgtatttatagtttgtgcaaccatcaccacaatcaattttagaacaattttatcacccctaaaagaaaccccaaacacattagcacccactttccatttctcccctaaacccccaatttcaactgatttgagacaaaatcagtctctatagatttgcctgtcatgcacatttcatataaatggaatattttaatatgttattccttgtcattggcttctttcacttagcgtaacatttttaaagtccatccatgttgtagtatatgtatcagtacatcattcctttttaattgctgactaatactccattgtatagctacatcatgttttgtttatccattcattggttgatggacatttaggttgttttcactttttggctattatgagtaatgctactatgaacattcttatacaagtttttgtgtggatatatgggattttaaaattattttctaaattgacaaatacaaattgtttatatttatggtatacaacatgatgttttgaaatatgtatacatcatggaatggctaaatcaaactaataaacatatgcattacctcacatacttattgttttgtggtgagaacacttaacatctatcctcttaacaattttcaagtgttaagatacattaactataattatgatattatacaaagatctcttgaatttattcccccaactgaaattttgtatcctttgaccagtatctttccaatctgtatacctccctaatcccctgataaccaccattctactcttctgcttccatgagttcagctttttaagattccacatgtgagtgagatcatgcactatttgtctttctgtgcctggcttatttcatttaacatagtgtccttcaggctcatccatgttgttgtaaatgacaggatttccttcttttttaaggctgaatagtattccattatgtatataccacattttctttatctattcattcactgatggatacatgggttgattccatatgttgaccattgaaattaatgctgcaatgaccatgtaaatgcagatatctcttaaatatactgatttttatttcccttggatatatacacactagtgggattgctggattatatgctagctctatttttaatttttgaggaccctccatactgttttctataatggctatactaatttacattcccatccacagtgtaccagagttcccttttcttcacattgtcaccaccacttgttatcttgtgtcattttgatagtagccattctaacagttgtgaggtgatagctcatttttaaatttacatttccttgatgattagggatgctgagcattttttcacatacccattggccatttgtatgtctttaataaatgtctctttaggttctttgcccattgtttaatcaggttatctgtttttttgatattgagttgagttccttatatattttggatgttaaccccatttttgaattgggttgtttggttttttgttgttgggttttaggagttctctgtatattctggatttttttttttcttagagatagggtctcactctattgcccaggctggagtgtgtcatcatagctcactgcagccttgaactcctgggcccaagtgattctccctcctcagtctcccaagtagctgagactacaggtacctgccactgcacctggctaattttttgtagagatgggatcttcctacagtgcccagtctggtctgcaatcccttcaagagatcctcccgcctggacttcccaaagtactgggattacaagcatcagccaccatgcctggcttattcgggatgttaatcccgcatcagatatatgatttgcaaatattttctcccattctgtgtgttgcctttttactctgttgacagtgtcttttgatgcacaaaagttttaaattctcatgaagtccaatttgtctaattttttcttttgttgcctgtgcttttggtgtcatatccaataaatcatcgctaaatccagtgttgtgaaacatttgccctatgtttccttctaacagtcttatgctgttccctaacagtaatactggcctcagaaaatgagttaggaagttatgctactcttcaacttattgtaaaagtttgagaaggatttgatgtttgttattttttactgttttatttttgagacgaagtttcgctcttgttgcccaggctggagtgcaatggcgtgatctcggctcaccgcaacctccgcctcccaggtttaagcgattctcctgcctcagcctcccaagtagctgggattacaggcatgcaccaccatgccagctaattttttatttttagtagacacagggtttctccatgtctctactaaaggtcagggtggtcttgaactgacctcagccgatccacctgcctcggctgccaaagtgctgggattacaggcatgagccaccgcgcccagcctggtattcgttaatttaagtgttgggtggaattcaccagtgaggacatcaggaccagggcttttctttgttgggatattttctttttttttagacgaagtttcgctcttgttacccaggctggagtgcaatggcgtgatcttggctcaccgcaacctccgcctctcaggtttaagtgattctcctgcctcagcctcccgagtagctgggattacaggcatgcaccaccatgccagctaattttttatttttggtagacacagggtttctccatgtctctactaaaggtcagggtggtcttgaactcccgacctcagctgatccacctgcctcggctgccaaagtgctgggattacaggcatgagccaccgcgcccagcctggtattcgttaatttaagtgttgggtggaattcaccagtgtggccatcaggaccagggcttttctttgttgggatatttttttttagacaaagtctcgctctgtcacctcggctggagtgcagtggcatgatctcagctcacggcaacctccgcctcctgggatcaagcaattctctgcctcagccttccaagtagctgagattacaggtgcctgccaccacccttagctaatttttctgtatttttagtagagacggggtttcaccatcttggccagtctggtcttgaactcctgacctcatgatagacctgccttggcctcccaaagtgctaggattacagagcttgcaatgagccgagatcacgccattgcactccagcccaggcaacagtgtgagacactatctcaaaaaaaaaaaaaagtatttttggccgggtgcggtgactcacgcctgtagtcccagcactttgggaggctgaggcaggcagatcacatgaggctaggagttcaagaccagcctggccaacatggtgaaaccctgtctctgttaaaaacacaaaaattagccgggcatgatggtgcatgtctgtaatcccagctactcgggaggctgagatggaaaaattgaacccgggaggtagaggttgcagtgagtcaagatcatgcctctgcattacagcctgggtgacagagcaagactctgtctcacaaaaaaaaaaaaaaaagaaaaagaaagaaagaaaaaaatgtatttttaatttccacaaatttgtgaatttaccagttttatttctgttgatgatttctaacttcatcctgttgtagtcaaataagatactctgtatgatatctatcttttaaaatctattgaaacttttttttggccacagtctcactctgtcacccaggctggagtgcagtggtgagatctcagcctctatatgtctcagttttctatatgtctgctaaatctagttgatttattttgttgtttaagtcctgtattttctaacttatattctgtttgttctatccattattgagactgaatgttgaagtctcaagctattattatacaattgtctttttctgtgttcaattctgtcagtttttgcttcatatattttgatggtctgtcattaggtgtgaaaatatttataattgcttataatcttgctgtattgaaccttttattaataatgtccttctttgtctcttgtactctttgaaaatttaaagttatttcatctgttattaatatagtcactctgttgtcttttgtttactatttgaatggaatatctttttctatcctttcactttcagtttagttatgtctttggatctaaaatgagtctcctgtagacagcattacttggatcatgtggtttcttggggggttttttttgagatggagtttcactcctgttgcccaggctggagtacaatggcgcgatctcagctcactgcaacctccacttccctagttcaagcgattctcctgcctcagcctcccgagtagctgggattacaggtacttgccaccatgcccaactaattttttgtattttcagtagagacggggtttcaccatgttgaccaggctggtcttgaactcctgacctcaggtgatctgcccacttcggcctcccaaagttctgggattacaggtgtgagccaccgcgcccggcctggatcacatgttttttgtccattctgccaatcactgtcttttaattagataatcaatctatttatatttaattactgataaacagcaacttctgtcattttgctatttgctttctatatgcattgtagcttttttgttcctcgtttcctgctttactgtcttttgtgtttagttgatttttttatggtgaaatgtttaaattcctttctcatttcctttgtgtatattctatagctattttctttgtggttaccatggggattacatcctgaagttatatcactgtaatttgaatttatacaagtttaacttcaataacatataaaaactctgctccattacagctccatccccacccctttcagttgttcatgtcacaaaatgacatctttacacattgtgtgccccaaaacataaactaacaatccttttaaatgcattaatctcttaaattatatcttttacacattgtatgcccaaaacataaactaataattcttttaaatgtgttaatctcttaaattatatacaaaacaaaatgtggagatataaaccaaaattacagtaatactagccattcagctattaataataattgtgttgttttaaatgtatagtctcttaaattatgtagagaacaaaaagtggatttacagaccgttgttacactaatactatctttcataattgctcatgtatttgcctttattgggatctttctttcttatacagctttgagttacttcctagtatcttttcatttcacctttcaggacttatttgagcatttcttccaaggcaagtctagttgtaacaaactcccttagcttttgcttatctgggaatgtagcttttgtttatctgggaatgtcttaatttattccttactttttttttttttggagatggagtctcacttcatcgcccaggatggaatgcagtggcatgatctccactcactgcaatctccacctcctgggttcaagcagttctcctgcctcagcctcccgagtagctgggactacaggtgtgcaccaccacgcccagctaatttttgtatttttagtagagatggggttttgccacgttggccaggctggtctagaactcctgacttcaagtgatctgcctgccccagccttccaaagtaccaagattataggtgtgagccaccacacccagcctctcccttacttttgaaggacagttttgccagatatatgattcttggttgacaattctttctcttagcatcttgatatattatcccactgctttctggcctccaaagtttctgattagaaatttgctgatgatcttattgaggatctcttgtatgtgactagtcagtctcttgatgccttcagaatgttctctttgcctttggcttttgacagtttgatttttttttttttttcagagcaggagtagaagtttattttaaaaggccttagaggccagacacggtggctcatgcctgtaatcccaacactttgggaggccgaggcaggcagatcatgtggtcaggagtttgagaccagcctggccaatatggtgaaaccccgtctctaccaaaaaatacaaaaattagccgggggtggtggcgtgtgcctgtagttccagctactcgggaggctgaggcaggagaattgcttgaacctgggaggcggaggttgccgtgagccaagatcatgccattgcacttcagcctgggcaacagaatgagaccctgcctcaaaaaaataaataactaaataaataataatcataataataaaaggccttagaaaagaaaggaagtgcacttggaagaaaccaaagcaggcacatgaagtttaaagagagaagatcaagtgccaacagtttgattttaatgtgtctcagtgtatgtctctttcagttcatctttcttggagtttcttcttcttcttagatgtttatatttgtatttaatcaaattgatgaagttttcatacattatttcttcatatattctatctgtccctttctctttgtcttttccttctgggactcccacagtgcatatactggcctacttaatggtatcccacatatcccttaggctctgttcacttttcttcaatatttttctcttcctatttctcagacttgataatttctattgtcctgtcttcaagttcatggattcttttgtctgccttcccaaatctgcctttgaatacctctagtgaatttttaatttcaatattgcactttttagctccaggatttctttttgctttctttttaggttttccctgtattggcatttctattttgttaatacattgttttcttgatgttctccacatcttcatgagttctttgagcatctttaagacagtagttttaaagtctttatctagttgatctgccatcaggtctctttcagagaatttctattcattcattttattcttttgtttttatttttatttttattttattttatttttgagacagagtatcactccattgtccaggtggagtgcagtggcatgatctcaactcactgcaacctccacctcctgggttcatgcaattctcctgcctcagcctcctgagtagctgggattataggctaatacaaaaattagccatcacacctggctaatttttgtatttttagtagagacaggtttcaccatgttggccagactggtcttggaactcctgacctcaagtgattcacctgctttggcctcccaaagtggtaggattacaggcatgagccactgtgcctggcctgttttcaaatttttttaacaattttattctaaaaaatagaaacagggtctcattatgctgctcaaactggtttcaaactcctggccttaagggatccttctgccttagcttcccaaagtgttgggattataggtgtgagccactgtgcctggcctcatatttttcctttagatgtgtcatattttattgtttctttgtatgctttgtgatttttttttttctttttgaaatggagtctcgctctttcgcccaggccaaactgcagtggcactatctcggctcactgcaagctccccctcccaggttcacgccattctcctgcctcagcctcccgagcagctgggactacaggcgcccgccaccacgcccgtctaattttttgtattttaattagagacagggtttcacctgttagccaggatggtctcgatctcctgacctcgtgatccacccgcctcagcctcccaaagtgctgggattacaggcgtgagccaccgcgcccggccaattttttgtatttttagtagagatggggtttcaccatgttagccaggatgatctcgatctcctgacctcgtgatccgcccgcctcagcctcccaaagtgctgggattacaagtgtgagccactgcgcctggctgtgatttttttgattgaaaagtggacattggaatctcataatgtagtaactctggaaattaggttctctcttttcccaggggtttactgttttttgttatagtttttgtttttttgattggtgtagactgcaccaaaggataggctaaagtgtaaagttaagataggctgggcacagtggcttatgcctataatctcagcactttgggagaccaagatgtgtggttgagctcaggagtttgagactaacctgggcaacatggcaaggtctctactaaaaacacagaaatatacctgggcgtggtggtgtgtacctgtggtctcagctacttaggaggctgaggtgggcagattgcttgagcctggtaggtggaggttgcagtgagccaagattgggccactgcactccagcctgagtgatggagccagatcctgtctcaaaaaaatctcaggtcttttctgagccagtgcatttccccggacatgtgtcatcactttctaaattttcccatatatgcagttgctttttaatgtcttagtcttaaatgtctggcttccaaaaggggagaatgagaaaaactaaagggacagaaaaaaggatccggacctataattcctctagaagtcacttcagtaagagggggagggacttgcaataatggtggaagatgcaacaatggcctccctctctttgtctgcacctctgtgatcagaagcagcgcatagatccccagtattggaggactaggtcttttctgttcacacttgctccagcaagctgtgtgcatgctgcaccaggaacatgtgtttggggctggaggtgggggatgggacctgctattgtgctaagggttgaaattgattgaaattagcctcactttactgtccaagctttccactggatgttgcaagcactcagtattccaacaattacactggtagaatctgtgtgatgtaattattttggaacaccagagaaactgttcactaggtgaggagacagattttgggtgcttcctactccaccaccttctcagaatctcgcctcctcaaacggtttcgaaactcttttttgtaaaatttatgcctacctattgtattagtcagggttatcctaatcaaccatatatcctattggttagtcagaactaataggatataggtatatataaaagggaatttattaaggagaattggctcacacagttacaaggcaaagtctcatgatagaccatctgcaagctggagaaagagaaaatccaatagcggctcagtccaaggccaaaagcctcaaaaccagggaagacgacagtgcagccttcagcctgcagccaaaaggcctagagccccaggaagctgttggtgtaagtcccaaaagctgaaaaacctggagtctgatgtccaaggacaggaggagaggaagcatccaacatgggaggaagaaagagagccagtagactcagcgagcaaagctatcccaccttcctccccctgccttgttctagcagcactggaagctgattggatggtgcccaccacattgagagtgggtctttgtcttccagtccactaactcaaatgtcagtctcctctggcaataccctcacagacacacccagaaaaaatgctttaccagccacctaggcatccctcaatccagtcaagttgacacctaatagtaaccatcacatatatttactttcatttttgcttttataaatcagggcttttctttccttatgtcttccgactgattttgtctatgaaagctattgatttggtttctgtagtttttctattcttttgatcttttggaaacataattatataaacatgcaaattccaatttttcctttcaaatttttatgcttctaattgctttctcatgtctattagctaatactttcaatacagtaattaaactatagtaaaggtagtgggcatttttttcttgttcctgagtttagtgggaaataccctcatatttctctattaagtaagatcctggtttggggatgaagtttatatttattttatcatgttatttattttattattgaagtatactatcaattcttatagagtctggcgttctatcattccttcttcaccacttttttttttttttttttccttttgagatggagtctcactctgtcacccaggctggagggcagtggtacaatctcggctcactgcagcctctgcctcccaggttcaaggaattctcctgcctcagcctctcaagtatctgggaccacaggtacacgccaccatgcctggcttggtgtatttttttgtatttttagtagaaacagggttttaccatgttgaccaggctggtcttgaactcctgacctcagataatccacccaccgtggcctcccaaagtgctggtattacaggcgtgagccaccacgcctgacccactttttttttttctttgagacagggtctctgtcacccaggctggagtgtagtggcatgatcatagctcactgcagcctcaacctcttaagctgaagtgagcctcctatctcagcctgccaagtagctgggaccacaggtgtgcatcacaacactcagctattttttttttattatttatttttttgtagagtcaggatctcactatgttgcctaggctggtcttgaactcctgggctcaagtgatcctcccaccttggcctcccaaagtgctgggattacagacgtgagccactgcacccagcctccttcattttttaagctagaatagttctatggagtaaaacattgcttcatgatcacctgtcttttcattttcttaaaaaaaggacaatagaatttttttaaggatttgtgctagagatttcgctctcctgtcaaatttccttgaaaaattatttgtatcatttctcttaagacagtttggctaatgtttttcttaaactagtacagctatggttcgtttaaggaaatctcccaagagttactagctaatataaaatgctgctaagagtagccatttgcattttgtaaacatttgcctaattctggtgagtcagatgtttgattttgaacctgcattttatttattagaatggcccaaatatgatagatgttttaacatttcattttaaaagtacggatattgaatttagtaagatgacctgtgttgtagttttgagaaaaaagcatttttttcttccaataaagggaaacccaccatgtaaaaatacggtagacttggtgttaccttctattgacttgaactaggatgtattttcattagcatttgagtgttatttgagaagactttaatatttttctttttttttttttttttttttctgagacagagtctttctctgtcacccaggctggagcgcagtggcgtgatctcggctcactgcaacctccacctcccgggttcaagcgattctcctgccttagcctcctgagtagctgggattacaggcacacaccaccacacccagctaatttttgtatttctagtagagatgggttttcaccatgttggtcaggctcttttcgaactcctgacctcatgatcctcctgcctcggcctcccaaagtgctgagattacaggtttgagccaccatgcctggcctaatatttttcttattagcacatttttgtttctctgctgatatgtcttacattttcagagctttgtcttccaaagtgtttgtaggttggtatttaatatacattgtatgttcatattcaatataattggtgatgatgagtagtagggcaaggagtattggttaagagaggccaagctgatattgaaaatataacttggtaaaatctaaaaaatagataatttcacaagataatagaaagttgattgtatatcttattataccttcatatttaatgctcaatcaggcatctatcatttcccgtaaaaaagaagccaaagctgaggaacttcaggaggccaaggagaagttagccagcctagagagagaagcatcagtaaagagaaatcagacccgtgaatttgatggtactgaagttttaaagggagatgaggtaagctgagccatctcatgggacaagggtatgagtattgtttttatgtgaaactattagtgtgtttgactttcttagtgtgaatgttaatattgggacgttaatcttattttataaaacatatttaaaactgaagagtctttttgcaataatactgagattatttttttctttttctttttttttctttttgagatggaatttcactcttgtcacccaggctggggtgcaatggcgggatctctgctcactgcaacctccgcctaccaggttcaagtgatttttctgtctcagcctcccacatagctgggattataggtgcctgccaacatgcccagctaatttttgtatttttagtagagacagagttttaccatgttggccaggctgctcttgaactcccgaccttgggtgatctgcctgccttggcctcccaaagtgctgggattacaggcgtgagccaccacgcctggccatactgagaatttcttgatgtaaaatggcagatatgttaatgattttacgagatattatgttccaaattttcactttttttttttttttttttgagacggagtctcgctctgtcgcccaggctggagtgcagtggcgcgatcttggctccctgcaacctctgccttctgggttcaagtgattctcctacctcagcctcctgagtagctgggattacaggtggacgtcaccaggcctggctaatttttgtatttttagtagagacggggtttcaccaggttggtcaggctggtctcaaactcctcacctcatgatctgcccgcctcggcctcccagagtgctgggattacaggtgtgagccactgcacccggccccaaattttcacttcttaattaagtgaatttatattggatttaattatttataaatattaaattataaaagtgaaaaacgttagtagcaaacagataatacaaaaatctatatttgttggtaaatgcatttccataaagggctaagaaaatatcattaagttattttgtcagtaatgtatacttgtctggtgggactgacatgattaaaatgacctcatcatagaagcttacaactttaaaaaaatataattgtgtctcacattgcaatatactttaaattttgaacaatgctttaacagcttttgtttcatttatccttctgtcagactcataagattagtgggacaaataatattttttatagatggctaaactcaagcaccaaaaatataattttccatcctcttttcataaaattagcccaggaatgaatgaataaatgaagtcaaatatcttagtttagtgcttttttagcaaaataaagcaataggtcatattttaatttgtaaacattgcttggactttaccaatttttacaggcttttaaattttgtaacagctactagatctcagcaaaagctatcgtggaaagctactcttgtccaaacctcatttttggctttgaaaagttattgaatccatactgttacaaattggcagtgaaccttcactgtgccaaacaaatgaattgctcccatagtaccacttttctctgtggtacttcaggttgtaccctcccaatgtgccttttagcttgctggggaagtagtagattcaggaagtcaacatgtgattgaaaaattcccttggcttttaacatccacttccaaattggtttaagacatgggagtgttttaaatgatatctggaagtcaacagtgtatgcttcatgacatctttgctgtctagagaaaaaaataaaagatcaattatgcagcagtttcgctttacaagagactatgccacctcctagcatttttatcttttcttaagaaaatgctgcctaaatcacaggaaatactaattgttatggccgtatttggcataaatagtacttacaattcagtgttagatgttccctctatgcaaatgtgagggaaaaaacctagtgccaggttattagcctttatttttgagaaatcatggtgaataggagacggatccaatgacagggaaaaaaaaaagcagtctttttttttaaggggaaaaagatgtcatcatttggaaatgataacttaatttttgaacaatgtctggtcggaaaagaacaaatcaagtaaggtatttggcagttacctaaaagaacagaaggtatcggggaacattaagcataattttataaagaacaaatcttggtataccagttttattttctactatgataaagtgataggccatatggacaaaagagaagaagtttcttatatttaaaattatataatacagctggaggtataattcactgaggtgcctgatttagtatcacatggttcactgaggtttctggtttgatatcacatagtaatctccaaaaaatcatgtcctttgccccccatctgttaaacagttggtgagaaggtattgataattagtggcatggtgtttggaaagaacactatgccaggaatcacatgcaaaatgaggaaagggggactcacatttattgagcactttttatacaaagctctgttccaggtactttgcaaatagatacttttttacttcttgtaaaaggtgttgttaccatttccctgtcacagttgagtgatgctcgaggagattgcagtttcacacagctagtaagtggccaagctaagacccaggacctctctaagatctgttgaccttgaagaaattactcgacctccctgaggcttctctatctgtaaaatggggctgattgctctttattatctctaggaaaggcacatgaaataataggtgctaaagcttctgagaaactcaaaggctcagtcaacatataacacctggcatctgaaagtaatcatttgcatgggtggtatgttaactatgtgtgtcagaggcagcatggtggagtggttaagagtggctctagaacttggttgtttgagtgcaaatcctggttttgccgtttaccagctggatgaccttggacgagttccttaccctctttatactcagctgtaaaatgtgaatgtttgtagtatgtaactcctagaattattttgaggattaattgaacatgcttagaacagcactaggcacatagtaaatgctgtgtgttagttcttagtatttgtatatttttgtcaatcacttggatgaagaatttgaaagctagaaatatagttcacagcttaaaagttgaaactagtatttcccagactgggagcaatttagtggaaataaatatgaaatagtttctgtttaggaataaataatttacacaaatttaaaatggaataagatagcattaatgagaataattctagctgccattctctgagcagttactgcatgctcagtcttgagcacttaaaaaatatagctttagtaatggttatacaacagcaacatgaatgtacttaaagccacagaactgtatacttaaaaatggtaaaagtggtaaattttatgttatctcacaatataccctaattcatcctctcagaaagcctctgaagtaaatattacctccattttgtaacttaagaaacagagaaattgaaataattttcccaaagttacacagttagcatgtaagagactattgccatcctaatggcaatattttattgccatcaaatatgattcctaaaatttacccattcctatagtgccttggagatggcactattagaatgggtaaattttaggaatcatatttgactctaaagaggactacactgtgaacaatcattaattgggaagtgtatatttgccagaaattatatgacagccatttgtttggatgtaaaactttattccttgattgtcgatatgtagttatttgattgatcttatcttggaaaaatttaggaacataatgttaatttgcgtaaatgtaacaagttctagacatatacagtgatttatattctttagtcattttctttttagaggtccattagcagtttttagtttggtggtgaagtatacattttgatgcttcctactgccattaaagttaatattccagatgttacatactgtctaagagttttagctcttctgattgcagatgctacagatatttttttctttactaggcctttttattggtatttcattggttttccttattagtaaaagacgaagtttctggaagtacttcccccccattgtactttatcattttaacattttattttcataaagtaaggcagtacacaggaataagcacaggcatgtatttttctcttatctgccagagttctgacataagtaggaattgcttgaacagttgaaatgatcttctcagtgataaaagatacattttcctacccatccagtcaatcttgatttctttcccttcataccagtatttgaaagatgatagaaactacactctattaaatgactacatttagtttagagattacaccctgctaacataactgaaaataaatagtaatgaatattttactgtttttatatctcaaaggtttttatattgaattttaagtatatcttaatataaatctggttgaattgatagtctcaaaatattttgattgctgtcatctctgaggaaatgtacacacaaaaaatgccatggagatttgccctttatcctgatttgtttattattatcaatactttagataaataataattttttaattaggcaattacaacgtgccatatatcatactaggcttcttatatacattattctcatttttgtcattgtacgactctgtaagtacaatttttttttatttaggtttctttttttttttttttttccccagagacaggatctcactctgtcacccaggctggagtgcggtggtgtgatcatggcttactgcagcctgaaactcctaggctcaagtgatcctcctacctcagcctcctgagaagctcggactacaggcacgagccaccatgcccagctaattttctttttttgttttgttttgtagagatgtggtctcactatgtttcccaggctggtcttaaactcccggcctcaagcagtcctcccacttcggcctcctgaagtgttaggattacaggcgtgagcctgcgcctggctgtaattactatacccagtttttacagataaaggatctgagacatgcagaggttttaagctgacttgcctgacaccccattgctagtaagtagtagaaccaggagttggatttagcagtctggctgtagagtcatcaatagtttgcacatgacagaaagctggaagaaatagtcaacctgaaacacatgatggaattataattcagaatcatcttggtagataggggcactgtgcttaaacaaaatgccattaatgggattataataaatataatgtggtagaattcaagttttgtttgccaattcaacacatcatctgttactaacgcagctttaaaaaatgcataaacgattatactacattaatttttttaaaaagtatcctgtttatggtctgattatgcctggagtattattttatatttttgacttcatgttttaagagacaatcatgccagagtcccacatgagggtgactaaaatggacaaaaagtctggaaactttcatatcaataattgattatgtattaactgaaacaaaagactagagaaagacacagtgggaattgattatgtattaactgaggaataaaagactgaagaaagacataataaatagttaaaggattatggaaaagatggtgttcagaaaaaaattaacatgcaggcctgagactgctatccctagaaaggtctgcttgcaaagttggcccttggctggcatctgggggaacttggttcttggatggattcctgccattcactgataagaatggctcaccttgcctaaagtatatgaagagtgtgctttatgtcgagctcctgcttgcttgcctctttctttgtctttctttcttttccttcctcccttccttccttccttccttccttccttccttccttccttccttccttccttcctctctctctctctttctttctttcttctttctggaattttggtacaggctaggcagaatgtgcctagatgatcagctcctagtaaaaaccttgagaactaagtctctaatgagcctccctgatcatttcatgcgtgttgttataactcatcactggaggaattaattatgccctctgtgactgcagtgggagacaacttttagaagtttgcacctggtttcctccaaatttcaccccatgtgccttttccctctgcgattttgcttggtattcagtgtaataaatcatagctaagagtatgactgtatactttgagttctcccagtgaatcactgaatctagagatggtcttggggacccctgacacagatggattagtgttattttttttgtttatgagaaagccaaattaggaccaatgaatggtgattagaatgaaatatttgattgacttcagagaaaaatgtctaccacttgagctttcttcagtaatggagcagcctgacagtctcactctgtcactcaggctggagtgcactgacatgatctcaacccactgcaacctccgcctcccgggttcaagcgattctcatgcctcagcctcccaggtggctgggattgcaggtgcccaccaccatgcccgactaatttttgtatttttagtacagacggagtttcaccatgttagccaggctgggcttgaactcctgacctcaagtgatccgcccacctcggcttcccaaagtgctgggatcacaggcttgagccacctcacccagcccagataagggacatttttgaagtaatgtgtgcactaagtagaagaacattggatctgtattttgggttgggttttttaatctttatttattttatttatttattttttgagatggagtcttgctctgttgcccaggctggagtgcagtggtgcgatcttggctcactgcaagctctgcctcccgggttcacgccattctcctgcctcagcctcccgagtagctgggactacaggtgcccgccaccatgcccggctaatttttttgtatttttagtagagatggggtttcaccatgttagccaggatggtctcaatctcctgacctcatgatccacccgccttagcctcccaaagtgctgggattacaggcgtaagccactgtgcctggccaggttttttaatcttaaaaaatctgattatgccaggcattgtggttcatgcctgtattattttttaaatacctggtgagaaacttaaatttgccatttaatctggtagccttcagctacctcttttggcgtgatttttgctgtttcataggcagcaatctcagcttgaagactttctctcatttactggaaggacgaagaatagaacatgtgcctcttgtaagtagtgccagtagctagtgattttaccatcttagtcaccttgatctctctgattctctgctttcataatttgaaagagcaaacaaaaaatcagtcccaatgatatgcagtactagtacccttcccagagtggtcattcagatgaatgcatgcctttgggatctgaattttttttatagcaataaatgtacctccagttaaggttccactggaactcatgcaatgaaaggtcatccttggtttatggtgtatgggagtattatagtccattgtgttttctcccctgaccatcacaagaagctcagctgttttgtagttacagctacttttaaaatatgcttggtcaaataatatttataagcagctttagaaagggccagccaattcattctacagctactgacaaatcttagagctaaattggaaagattatgaaatcttctttaaatacttcaaagagaagcacaatgaagataagggaatcctggcaagatgtgctgcagctgtcaggtcctgaaaaattaggaatcaaattttgacacttgtaattgaatcatccacccttctaagtgagcctaggcaaacctgtgatatttttagaacctttcaaatcacattgtactctttagagttcatagcaggacctgaggcccctaaaatttcccaagagaaagaacaaaacagaatcaaataaatttggctcagttcactgtaatagaagtgtagtgtattatgcatgcagtctaggtaatgccacacttttaaccccaaattttaaaagttttcatggattttttttttttttctggagaattaactgcttggacagcagtggaagcacccgttagagatagtaacagctgtgtggtggtgatttgatttataatagaagcacagagaccttggatggtgtgattaactgtgttccacagatggatgttcctgtgtcacaaatttcatttaatacagatttctacccgcatatatcatatcgattattacagactctcttaaaagactgagcagttaactagccactaccatatgtagataattacattgcttatgcttgacttggtgagattttctaatttacagttgaaaatgtgccactaacaggttagaaaaggttagaatagtatttttatgtgtatttatgtgggactagttatgatgcgtgattttaaaagactgtcattttagcaaataacaaaggctgctttgaacattttctcttgccttaaaacaaagagcaactctgagaccagacttcagggaatccaaataatttattggagcgtgacatgatggccttttcaggttttcttcaagtctgaagttctgtctagagcacaagacactgacaaatgagcagaaagactgtgggctttgtgtatattcatgccactcctaaacagttggttctatctcatctcgtgcctaactcccttgggccaattcctgtagttgtctatgcttatacatcgtttgatgaaataactgacaaagatgtgatttaattaagaaatggaaaatagcatggatgttggactagcaggatttgaagacaaaagtgttcattctagttattttttctaacttactgaactttggtaagtagtattaatttctctgtaggtttcctagtgcttttttattttaaaaaatggttctggccagacgtggtggctcaggcctgtaatcccagcactttgggaggccgaggcaggaggatcacctgaggtcaggcgttctagaccagcctggccaacgtgatgaaaccctgtctccactaaaaatagaaaaatttgcctctgcctctgcctctgcctctgcctcctctgcctcctctgcctcctctgcctctgcctctgcctctccccatggtctccctctccccacggtctccctctccccacggtctccctctccctctctttccacggtctccctctgatgccgagctgaagctggactgtactgctgccatctcggctcactgcaacctccctgcctgattctcctgcctcagcctgccgagtgcctgcaattgcaggcgcgcgccgccacgcctgactggttttcgtatttttttggtggagacagggtttcgctgtgttggccgggctggtctccagctcctaaccgcgagtgatccgccagcctcggcctccggaggtgccgggattgcagatggtgtctggttcactcagtgctcaatggtgcccaggctggagtgcagtggcgtgatctcgtgtcgctacaacctccaccccccagccgcctgccttggcctcccaaagtgcccagagtgcagcctctgcccggccgccaccccgtctaggaagtgaggagcgtctctgcctggccgcccatcgtctgggatgtgaggagcccctctgcctggctgcccagtctggaaagtgaggagcgtctccgcccggcagccgccccgtccgggagggaggtgggggtcagcccccgccaggccagccgccctgtccaggagggaggtgggggggtcagcccccacccggccagccgccccgtccaggaggtgaggggcgcctctgcccagctgcccctactgggaagtgaggagcccctctgcccgaccagccgccccatccgggagggaggtgggggggtcagccccccgcccggccagccgccccgtccaggagggaggtgggggggtcagccccccgcccagccagccgccccgtccgggagggaggtgggggttcagccccccacccggccagccgccccgtccgggaggtgaggggcgcctctgcccggccgcccctactgggaagtgaggagcctctctgcccggccagccaccccgtccgggagggaggtgggggggtcagccccccgcccggccagccgcctcgtccgggaggtgaggggcgcctctgcccggccgcccctactgggaagtgaggagcccctctgcccggccaccatcccgtctgggaggtgtgcccaacagctcattgagaacaggccatgatgacaatggtggttttgtggaatagaaagcggggaaaggtggggaaaagattgagaaataggatggttgccgtgtctgtgtggaaagaagtagacatgggagacttttcattttgttctgtactaagaaaaattcttctgccttgggatcctgttgatctgtgaccttatcccccaaccctgtgctctctgaaacatgtgctgtgtccactcagggttaaatggattaagggcagtgcaagatgtgctttgttaaacagatgcttgaaggcagcatgctggttaagagtcatcaccactccctaatctcaagtacccagggacacaaacactgcggaaggcctcagggtcctctgcctaggaaaaccagagacctttgttcacttgtttatctgctgaccttccctccactattgtcctatgaccctgccaaatccccctctgtgagaaacacccaagaatgatcaataaaaaaaaaaagaaagaaaaaaaaagaaaaattaggccgggcacggtggctcacgcctgtaatcccagcactttgggagactgaggcgggtggatcatgaggtcaggagatcgagaccatcctggctaacacagtgaaaccccatctctactaaaaatacaaaaaaattagccaggcatggtggcggacgcctatagtcccagctactcgggaggctgaggcaggagaatggcgtgaacccgggaggcggggcttgcagtgagccaagatcgcgccactgcactccagcctgggcgacagagcaagactccgtctcaaaaaaaaaaaaaaaaaaaaaaaaaaaaaattagccgggtgtggtggtgtgcctgtaatcccagctacttaggaggctgaggccagagaattgcttgaacctgggaggcggaggttgcagtgacccgagattgcaccattgcattccagcctgggagacaagagcaagactccgtctcagaaaaaaaaaaaaaaaaaaaatggctttgtgtttcttaaacaatgtaaagtgcttattatatgatagtcttgtcaagtcttcacagctaattactttgaaaatcattttcatgccagatattgagggagaaaatttgcagcaggagcagtaattcttgtttcacataaatatctagaatgatgcctggaatccaataattcttttgagttcctgataagcgaaaagcatttataaatggttacattcttagagaaataaactgcctatccattacaaaagctagcccagattctgatcattactcttaaaggttgtaaaacatactaaatacacaaaaggaaaaagaacatctgtcaatttccattttgatcacaggggagccgagtctttaaaattggtcctgaagccagaagctagcactataaagcattagtccattacaaaacccaaatgcacgcagagataaagattagagtttcacacaactgagtactctctcagcacctgctagcataaaccataaagtattaatcttatttgatctcagcatctaaaatgatagctgctctttcatagaagactaatttagattacaaatgtatatgggtacaaatgattagtaatagctgctataatgggcttccctgcccagtagcaagctttgtagtttactttactgacaaattcatttggtttacctgttatgatacactatgggaagctttttccttaatgttctaaggatttgttgcttacctcctatgcctttaaaaattatttttttcctttatagctaaaggtgactggctgagagttctttataatatcttgcccagctactgcaaaggctgagtggattaatattttggcacactcacaatatttgtggcacgtgcatgtaccagagcataccccatttaggaaggtctgctctggagcagtgctactcaaagtgtggtctgaagactagtttcagtccagagactgttagtttcttctaatctgcagccatataaattgagaggaaacatttagaaacccttatagtcatttgatctcggtattttcgttattttacaaaagtatctgatgcacatatgtttagaaattttttaaaaaactcgtcctttaacagatagtttgaaaagtcctgctacttgtaaaagtggagttggtgagccatagaatatgtatagtgtctgcttcagtagacaagccaagttgttttccagaccattgctctaaattatatatctccctctctacttcctccacatcatcaccaacacttggtattgaaagattttttatttttgccagttgggtaggtgtgaaaatggtatctcattgttttatttatttatttatttatttttagacagagtctgtctctgttgcccagtatcttctctggcattgagaaatttggctccctttttctatattgcatttatttatttgctcaatcaataaacttgcttgtttgctcaatttaaataatctatcaactactccagcctccttctttacacaccaatcctgtgtccccatcccaccaaccacattttcaccctctgtgtctatgtttccacgactcctcactcacccctctgtgtcctcagctgccaggcctgctagcctatgtctctgtgtgtttcctcagcccctaatcccatcattgcatatccttggccattcagcctgttgacctgtacctccattaactccccctactaccctgtgtccccagtcaccagcctcctggtccacacttctgatacaacttcccaagccccctcatttcccagtatctttgacctccggaccctgtaccccgccatgcctctatgcaaccttactggcacctccatgcagctctctatttactgcctacctctccagctaccattttgacccctgtaaaccaggaatggaagggaaaaggagggcaatttttactcttattctcatctgagtgtacagcagagtttaccagaggcttcacaaatgatcaggccattgctctggccgctaatggaatgagtacttgtgttttataagtctgaagatttagcttcaatgtgttcatcagttttgttttttgtatgacattgaagatccaaaaataacctaaaatccaaatgataattaaaagaaaccaccaatggaagaaaaaacattgataatgtgttttcttttttctaattaattctggaatagtagagcccttagaatgctttgatggccacctattgcttaatcgtatgtaactgtgattgatctgacccagactactcttccattagttattatatataatgaatatcaaataataaccaatcagcatagaacacactcagtaatttgtaggtttgttctttcatcaaaaacatttatagctttcagcttttaaaaatagttctggagtacagcaagatagagaaggggaaaattggcctctatattacagaggatagcagatgaacagggttgatttcattttgggcactttgcccaggacacttttaatagcatatatagttactctagggattctgaatctgtggttatgtcaggcttacacatttattctttaaaaggaaaatttgcaagttattagacttcaggtacattagtatgacttaaatttttaatttttaaagaagtttctgtaacgcagtcattgaaaatttgtggtgtgagggctggattccttaatattaaaactaacctaatcatggatagaaaaatattttaaactttcttcttctaaaacacagtgtgttcctcagttctttcaaagtttgtttttttgttttgttttgttttgttttgttttgtttgagacagaatctcgctctgtcgctcaggctggagtgcagtggcacaatctcggctcactgcaacctctgcttcccaggttcaagcaattctcatgcctcagcctccctagtagctgggattacgggcacacaccaccacgcccagcttatttnnnnnnnnnnnnnnnnnnnnnnnnnnnnnnnnnnnnnnnnnnnnnnnnnnnnnnnnnnnnnnnnnnnnnnnnnnnnnnnnnnnnnnnnnnnnnnnnnnnnnnnnnnnnnnnnnnnnnnnnnnnnnnnnnnnnnnnnnnnnnnnnnnnnnnnnnnnnnnnnnnnnnnnnnnnnnnnnnnnnnnnnnnnnnnnnnnnnnnnnnnnnnnnnnnnnnnnnnnnnnnnnnnnnnnnnnnnnnnnnnnnnnnnnnnnnnnnnnnnnnnnnnnnnnnnnnnnnnnnnnnnnnnnnnnnnnnnnnnnnnnnnnnnnnnnnnnnnnnnnnnnnnnnnnnnnnnnnnnnnnnnnnnnnnnnnnnnnnnnnnnnnnnnnnnnnnnnnnnnnnnnnnnnnnnnnnnnnnnnnnnnnnnnnnnnnnnnnnnnnnnnnnnnnnnnnnnnnnnnnnnnnnnnnnnnnnnnnnnnnnnnnnnnaaaaaaaaaagaaagaaagaaagaaaaatcccaatatggtaatagagcttgtgttgagatagtggctttgagtgaacttttccttttttctgttttccaaaatttcaacaatatgttcattacttttattatttataaaattatttattaactatcccccaaaattagctttaagaagcactggacattaaaaaggctaagattcttttttttttttgagatggagtctcactctgtcgcccaggctggagtgcagtggcgtgatctcggctcactgcaacctccgcctcccgggttcaagcaattctcctgcctcagcctcctgagtagctgggactacaggcacatgccactacgcccggctaattttttgtatttttagtagagatggggtttcaccatgttagccaggatggtctcaatctcctgaccttgtgatctgcctgcctgggcctcccaaagtgctgggattacaggtgtgagccactgtgcccgggctaaaaaggctgagattcttaaagaattatctcacattaggtaatatggaagcttccctttgttttggagtgatatgtttaaatatggtaggccaagttcttactatagaaattttctttgtaatgtatttaataaaaagattattaaagcagagaaaataattttactttttgagacaaggtcttgctttgtcacccaggctggagtacagtggcatgatcatagcttactgcagccttgaccgcctgtgtttgagcgctcctcccacctcagcctctcaagtagctgggaccacaggcacgtgccaccacaccctactaattttttaattttttttgtagggatggagtctcgccatgttgcccaggctggtcttgaattcctggactcaagcaatcccctgcctcggcctcccaaagtgctgggattataggcgtgagccaacttgcccagccaaaattattttatatagtacaaaaatctggaaattattagtactcttaatacataagaggaagtgattttttaagtattatgttctgtttcagaaatatcagaaatttctggcattttcttctggcatttgcttcttacattgagcaatactttacagtcatacattgcttaatgacaaggatacattttgagaaatgcacttttttaggcagttttgttgttgtgtgaacatcatagaccttacacaaaccttgatgatatagcctactacataactaggctgtatgccatagcctattgctcctaggctacaaacttgtacagcatgttactatactaaatactgtaggcaactgtaacagagtggtaggtatttgtgtatctaaacatatctaaacttagaaaaggtacagtaaaagtatggtattgtaggccaggtacggtgggtggctcacgcctgtaatgccagcactttgggaggccgaggtgggtggatcacttgaggccaggagttcaagaccagcctggccaacatagtgaaaccccatctctactaaaaatacaaaaattagccaggcatggtggcaggtgcccgtaatcccagctactcaggaagctgaggtaggagaatcgcttgaacctgggaggcggaggttgcagtgagccaagatgatgtcattgcactccagcctgggcaacagaatgagactccatctcaaaaaaaatatatatgacattgtaatcttatgagactgccatcctatatgcagtccatcattgactgcagtgttgttatacagcacatgactatactttcatcgagtcagtgcttcaggacctttacacatgctgttctctcctcctaggatgttgctccttgcctcttcttccttcctctaacacattcctacttcttcagtcttggcttaaatataccttcttccaagaagcttgccatatcccacctcccctacttcccaaccctcgccttcctatcttcatccctacccaggttaaactgttacttatttgcagggtctattcagttctgtgtaatgtttgccatcatcttaaacttcagttcaatatttgttttccccactgttccttaagcttgatgagggcaggacctgcaagtatcttgctctaagcaactctacgttgtatcctggccaacatggtgaaaccccatctctactaaaaaaacannnnnnnnnnnnnnnnnnnnnnnnnnnnnnnnnnnnnnnnnnnnnnnnnnnnnnnnnnnnnnnnnnnnnnnnnnnnnnnnnnnnnnnnnnnnnnnnnnnnnnnnnnnnnnnnnnnnnnnnnnnnnnnnnnnnnnnnnnnnnnnnnnnnnnnnnnnnnnnnnnnnnnnnnnnnnnnnnnnnnnnnnnnnnnnnnnnnnnnnnnnnnnnnnnnnnnnnnnnnnnnnnnnnnnnnnnnnnnnnnnnnnnnnnnnnnnnnnnnnnnnnnnnnnnnnnnnnnnnnnnnnnnnnnnnnnnnnnnnnnnnnnnnnnnnnnnnnnnnnnnnnnnnnnnnnnnnnnnnnnnnnnnnnnnnnnnnnnnnnnnnnnnnnnnnnnnnnnnnnnnnnnnnnnnnnnnnnnnnnnnnnnnnnnnnnnnnnnnnnnnnnnnnnnnnnnnnnnnnnnnnnnnnnnnnnnnnnnnnnnnnnnnnnnnnnnnnnnnnnnnnnnnnnnnnnnnnnnnnnnnnnnnnnnnnnnnnnnnnnnnnnnnnnnnnnnnnnnnnnnnnnnnnnnnnnnnnnnnnnnnnnnnnnnnnnnnnnnnnnnnnnnnnnnnnnnnnnnnnnnnnnnnnnnnnnnnnnnnnnnnnnnnnnnnnnnnnnnnnnnnnnnnnnnnnnnnnnnnnnnnnnnnnnnnnnnnnnnnnnnnnnnnnnnnnnnnnnnnnnnnnnnngtgactcatgcctgtaatcccagcactttgggaggccaaggcgggtgaatcacttgagctgaggagttcaaaaccagcctgggcaacatagggaaaccccatctttacaaaaaatgcaaaaattagccaggcgtggtgctctgcacctgtggtcctcctactctggaggctgaggcaggagaattgcttgatcccaggaggttaaggctgcaatgaactgttatcacaccactgcactccagcctgggcaacagagcaaaccctatctcgaaattatatatatatatatatatatatatatatatatatatatatatatacacacacacacacacacacacacacacacacacattttatatgtatacatatattaaacatatacacataatatatatatataatatatgtacatataatgggtcaaaaaattaaaaacacaaaatatttaaacattgtgggtgacagagtgagatttggtctcaaacaaataaataaataaaggaattcatttggtaagtactatttattatctgttatgtattaggcactgtgccagacacagaggatacaacgtagagttgcttagagcaagatacttgcaggtcctgccctcatcaagcttaaggaatagtggggaaaacaaatactgaactgaagtttaaaatgatggcaaacattacacataactgaataggccctgcaaataagtaacaggagtttaacctggttagggatgaagacaggaagatgggggttgggaagttttataataaaactaaattattaagttattatataatatataattattatataaagttttctaataaaacgaaattattatatacgtgtgacatgttgggaagtagagaagaaaaaatgtgaatatattgagtttatacagatgtatgatatttagctactacttttctactcattagattacatattgtgttttttttacagttcaaacgatatgtcaataaacttcgaagcaagagtacagttttcaaaaagaagcatcagataatagctgaacttaaagctgaattcggtcttttgcagaggactgaagaacttcttaagcaacgtcatgaaaatattcaacaacaactggtaatacagtattatcttgggctactataaatacaaatgccaggaggtttatgggttacagctttatactgaagtcattgtttttactggaaaaatgataaaagtattacttttctctgattaattacagacatgacatataagttgattcatttatttttaatgtagcagtaagcactggcttttgtgtgtgtgctgacttcggggttattaatagaaaaacttgaattccaagtaggttttttcttttggttagttagttaatatgagtaaaattatcataccaagagagtgactgtaaaatatttttttatcatggcctgctgggcagaaatttctaagcagccacttccaagaagctttggaaagaaatatccagggaagtgctgtgtggaagtctgcctccaggcttattccttatgtgtttgtgccttggttgtctgaaaaaagttaaacccaaagtagtcccacagcaaagttgttctcattgtggatgccagttcctcagggtttccttcatttggcttttttttttctttcaccaacgaggaaactttcatctgggtgctggtttaccagctagcaataatctggtagaagtaagtggaatttcaaccagttgtgtttccttttaactggcaatatgaactgtctcatgctgatgaatattatttgcttttagggaacttaagactgaaaatttactgtgaatcaacatggattctaacagcactaactttaaaactgatagtagtaactgcattattgtttacttcaaaatatcttctaatttctattgtgatttctttgaccttttggtcatggcttaaaatccaatatttgggggatttttctagttacctttctattatgaatttccaggttatttccattgtgaccagagagcacactctgatttcagtcctgtgaaatttgtagtcttgcattatggcccagcatacggtctgttttggtaattgtttcatgtgcagtgaagagaatgtatattctgcagttgttgggaatagtattctaaatatgtcaattcagtcagtatgttagccatgatattcacatcttccatatccctgttgattttttgtctgcctgttccatcagttactgagagaagtgtgttaaaaatctctaactataattatggctttgttgctttttttagttccatcagtttttgcttcatatttttttcttaagttgggtccctagaagcagagctcgagaagggaattctttgtgctagtgatttattgagggagtaccttcagaaggaggggagtgagggaagcagatgaggcagcagaaaaaagccaagcaagaaaaggacatggtctcaactggagctggcttcattctgatcccatgatcaactttggaacaaattgcactggagttgattccatcttgatgcaagggggctggccttttgtaccccatggcagtcagtcatttggctgtggtcaagtgtaacctcttaggtgagacacctcccatttcgctgagggcactctctggagaaaggggtaactatgagctatttagcagtcaacattcataacagtttgcaaatgaggtctgagtggggcaccagcaacatctactacagttcaccccttgcactagtaggatctacttgtttgtcacattaaatttactccacccagctatagcttctataggattctagttggtcgcaatttctaggaaaacttataggagaaagattagtgggacaaatggaaactctcattgctacatttggttccaaggacataactgatattcaacatctccttcctttactatccattctagagttccctcacctcagctagtacctcctctggtttagatgacttacttggtgggatgacccagttcctcatccttgagaagtgtgagactctagtaatcatgcccttaccaggccatggctgctatacttccccatttacagttaaaactgggcatgggagtaccaagatatgccctaatggatcatctgagtcctaaatatatttctttctgtccctgttatatagcagcatctatatagccttatgataccctgctttctttgcctgctgatctattgacatgagaagctcaagtgaccagatggtagtcagaacattaagtgtcaagggcctcttaatgtgccttctgatggaagcatgccatcagaatatctctggcaaccagagtatctatacccacagagcctacagttgtctggaagggaagcataattccctaaagtggatcactggggatcatggttcgtggtgacacctatactttcatctcatggttctgagacctatgctttctatcgggaacatagcaccatatcatgggcatcggtttaaggtgtacaccccatcctaaaggtagaactcattttcataggccatccagttccaactggggccttacgtttaagacactgttccactattctgtcaggccatcagctttccagatagtgtagtatgtggtaaaattactgaattatatggtcatacgaatgctatcatacttcctttgctgtaaagtgtgtcccttggtttgaggtgatattatgtgagattccacatcagtagactgaatgctcttagcccttggatagtagtgctggctgaagtacaatgggcaagaaaggcaaacctatactcagaatatggatcagtcccattaaggatgaaatgtcacctttttcagggcagaaagggtccgatgttattaaattgccacaaaatagggggttggtttcctcaagggatgattccttacccagagctcaggaatggtctctgttgctggcaggtcagacgtttgatattggcagcagctagatgagcattgatgagagagagcccatgctatttggctcatacgtaacttccatctctaccaacaaagccattctgtttgtgagtccattgtttaagcactgtgtgggccaatgtcagaggctggctgacatctgctggccaaatcatcctttccacttggttgttcagtgcatcttctgcagtggacattttccggtttccatgtaatgaaaagatcattatacttagtgcctactcccataggttcaaacacatgcctctttcctagacctccttgtccttgctgtcttgcatcttccagggccttgaccaacaagctgagccatttgccactgcccagaggatacaggataatctggggattcaaggttctcaagtgggtctatccagatacccccatcccagactcagcaccctttttcttctctgtcagggccctgactttggcatagaatatttgcctagactaagaattcaactttctctggagttttgccagtcttaaaattagtcctgtgcctggttttcagctccctctgcactttagccaggggaaatgagagtttctttaaagcccttaaggaggttctctaacttgatcactttgctttaaattacaaattaggctaggcatggtggctcacgcctgtaatcccagcactttgggaggccgaggcgggtggatcacgaggtcaggagatcgagaccatcttggctaacacggtgaaaccctgtatttactaaaaatgcaaaaaattatccgggcgtggtggcgggcacctgtagtcccagccactcgggaggctgaggcaggagaatggcgtgaaccccggaggcagagcttgcagtgagccgagatcatgccactggactccagcctgggtgacagagcgagactccatctcaaaaaaaataaataaataaattacaaattaatggatttgagcctgttattttatctcttcaaccatcagtggagtttagtgatagccaccccagttccatagtccttatagttactatttctcctcaaatgccagaaacattacaccgtctagtgcatctttgtatcagttcagatcctccaagaagcagacactgagatgggattacatgtacaaaagatttattgaaggacatacttatgaagggtaaagggaagggagcaggaggaggcagggaaagccttcaggctctgatacaggtctgacacctgtgaaaggaaagggcaaaggaagattgggtagaaatagcctcaaacttcaacacaactctgagaaagttttggtcaggctgatggagagttcctgagccagtcacctattagaggagtcccttgtcaggcaggactgggccaacactagtactactgctgtactcagtcattggctaagagcagctccagggaagcatagcgttggtgcaaacatgatgatggacccagaggggcagcagctatggatatcagtcagctctgttcctctcagccaactctcttgaaagcaatctgagccataaattttgttggccaccacaatccccatccacctgtattcttccccaattcaccacaagtgaaagtcttattaattgcactgctgcaacatgcctgggactgtcagtactctacctgccacagtaatagagtccttagttccatttagccagtgagtgattgcactctagtgcttatgccagagattatgatatacacccttgactgattacagtcttcactaaatttttttttcttttttttgagacagagtctctctctgttgcccaagctggagtgcagtggcacgatctcagctcacagcaacctccgccccctaggttcaagtgattctcccgcctcagcctcccaagtagctgggactacaggagtgtgccactatgcccaactatttttttgtattttttttttagtagagacggggtttcaccatgttagccaggatggtctcaatctcccgacctcgtgatctgcccacctcggcctcccaaagtgctgggattacaggtgtgagccactgcacccagccagtcttcactaaatttttactattgccgtgtcctgggcaatgcaagaacctaaaacactttaactttgtttacctccttcccatatttagtgctattgttgataatatttttttaattctaaatataattttcttgagaaggggtcttgttctgttgcccaggctggaatgtaatggtacagtcagagctcactgcagcctcaacctcctgggctcaagtgattctcccaagtacctgggactacaggcgtgcactaccacacccagctaatttttatgtgtatttttttttcagacatggggtctcactatgttgtccaggctggcctcaaactcaggggctcaggcaatcctcctacctcagcctcccaaaatgctaggattacaggtgtgagccactgtgctggggcctagatagatttaaatcgtacatgatattatgttcaatattattctagattatctacctgtttactcttttcatggttcttcttttcttccttcatcattgttcttctattggtatctgtctaatgagctcaccttaagtattttatttagttcaggtctgcttaaatcttctcagtttttgtttttcttaagacacctgtattttaccttcattttgaagcacatttttactgaatgtagaatttttggttggcagctattttctttcggcactttaaagatttaattccattgtcttctgacttccattatttatttcataacatcaactgtacatcttgtttgtttgtttgtttgtttgtttgtttgtttgttttaaggtagactgttattctctggtttgtaagatcttctatctgtgtttggttgttcagtggttttactatgacttttctaggtgtgattttcttttttattcacctggcttaaggtctgtaaagcttcttgaatatgtggctttatgtctttgttcatttttgaaaagttctcagccaatgtttatttatttattatgtctttctttcctttctttctttctttttttatttgtttgtttttgttttgtttttttgagacagggtctcactctgttgcccaggctggagtgcagtggtgtgatctcggctcattgcagcctctacttcctgggctcaggcgattctcccacctcagcctcctaagcagctgggaccacaggcccgagccaccatgctcagccattttgtgtgtgtgtgtatttttggtagtttttttagacacagggttttgccatgatgcccaggctggtcttgaactcctgggtccaaacgatccacctgccttgcctcccaaggctgggcttacaggcatgagccaccacgcccagcccagtatttcttcaattattactacaatctcattctgtcctcttttactttaactccaactacatgcatgttggacattttcaccactttccatgtatttcttatgggctttgtgtttttctttttctttttttcattttctattatttttttcctctctgtgattcaatctgtatttttttctactgtgctatttttccagttgattaatcttcttcttttttgtgtgtctagtctgttatttaattcatttgttgaattcttaatatcagttattgtatttctcagttttagaatttccatatgattcaattttatagattgcagttatttgtaacattcttcaactttttgtttattttcttgaatatattaatctcagctattttaaagttcatgtctgaaatttatttgagcatctattcctgttgtttttgtttttgtttttgttttttgagacagagtctcactctgtcacccaggctagagtgcagtgatgtgatcttggctcactgcagcctccacctcctgggttcaagtgattctcccacctcagcctcctgagtagctgggactacaggcacccaccaccacacccggctaattttttgtatttttagtaaagacagaatttcaccatgttggccaggctggtcttgaactcctgacttcaagtgatctgcccttctcggcctcccaaagtgatgggattacatgcataagctactgttcctggccatgtatttttttctcttgattttcattcatttgggcctattactttgcttacttggtaattttttattgaatgttgggtgtaaagtgtcattaaattttagaagctctgactatatttgtttttctataaggaggatttaatttttttctagaaagttaccttgatcaagttgagggtagcttttttgttttgttttgttttttgtttttcttaagctggtatttctccagttttctcttaatccaaagatatagttctcgtacctgtggtagagactttaggaagtggtccttactccaaggatgtaggtcttactgctaggttatagaccttctaaggagtagaccttctaggttttcagctgataatgtgaggcatttaccaaagcctgtgcaccctggaaagtcctgaattcctacctttatctccctagtactgtgagactgctacaatctttgctcagctctttaataacctatctgctcggccgggcgcggtggctcacgcctgtaatcccaacactttgggaggctgaggcgggtggatcacgaggtcaggagatcaagaacatcctggctaacacagtgaaaccctgtctctactaaaaatacaaaaaagtcgctgggcatggtggtgggtgccgggaatcccagctgctcgggaggctgaggcaggagaatggcatgaacctgggaggcggaggttgcagtgagccgagatcgtgccactgcactccagcctgagcgacagagcaagactccgtctcaaaaaaaaaaaattaaaaaaaaaaataacccatctgctgatttccgcttggtttttgagagccttactctgcttgtgcatatcctaagatttggtaatgcctaaagaggaaaatgcatacagaatctggggctaattctctgtagttccctctacccctttaggtcccagtcctattgacaggccagaatcttaactcttcttccattctgtctttccttgtctttctttccttttggttctttcattcttttttgaactctcttcaatacagttttcgcacttaccattccactaaaatgtcttttgtcaggctgggcacggtggctcacgcctgtaatcccagcactttgagaagccaaggtgggtggatcatgaggtcaggagatcaagaccatcctggctaacatagtgaaaccctatctctactaaaaatacaaaaaaaaaaaaaaattaggcatagtggcacgcgcctgtaatcccagctacttgggaggctgaggcaggagaatcgcttgaacccgggagtcggaggttgcagtgagccaagatcgcaccactgcactccaccctgggtgacagagcaagactccgtctcaaaaaaaaaaaaaagtctttcgtcaggtcaccagtaccttcacattgccaaatccaatgattaattattagtcctttccttacttgacctagtagcagcatttagcatagttgatcattccatcttcctgtaaaacttcttcttctgtcttctaagacactacactttcctggtttttcttcctaactaacactcctattcctattctattgctgatttcttatcatttctttaaagtttaaatgttggggttccctaggcttagcccttggatctgctttctatcttcacttccttggtgatcttatcctgtctcatggttgtaaaggccccctcttatattgtgacaactcaccaatttatatctccagcctagatttctcctctaattctagtcctttttaaaattttatttatttatttatttatttattttttgagacagagtctcactcttttgcccagaccggagtgcagtggtgcagtctcggctcactgcaagctccacctcccgggttcaagtgattctcctgcctcagcctcccaagtagctgggattacaggtgcccaccaacacatctggctaatttttgtatttttagtagagacaaggtttcgccatgttggccagtctggtctcaaactcctgaccttaggggatccacctgcctcagcctcccaaagtagtgggattacaggcgcgagccaccacacctggcctaattccagtcttacacatataacatcttgacctttccatttggatatctaatatatatttcaaatttttaacatgtccaaaaataaacttctgatctgcaccacctccttaaactagtcttccccattcttcttcctctcaacaaatggaaacttcatcctgttagtctctcaagtcagaaaccttgaactcattctttatcctttacttgcgttcacatccctacatctaatttgtcgcattatcttgtttgatctgccttcaaaatatacacagaaccatttctcattatttctgtcaccaccaccctgattcatgctaccattttctttaacttgaactattgagacggtcttctaattggcctccctgctcctacctagcctgatctcagcacagatgttaaagtgatcattttaaaattgccttaactctgaacctttcaacagctgcctatctcattttaaagaaaacaaagctctttcatcagcttaaaaataagataacaatacaacttattatctaaagtaggatacttcttgagagtgcaagggacaatagatgtacactgagacctagcaaaccagctgaaccccatgtaacccctccttcacccccaccttattctcactgcacctccttactgtttcttgaactggtcaagtttgctcccagcttttgcacttgctgattccctcacttcctacggggctttgctcagatgtcatcttctcaggatcatcttctctggatcatcttctctaaccaccttctggttatactatatttatttatttacttatttacatattgcttatttattcccactagtagtaagctctgtgagggaagggattttttttttcctgttctattcactgccgtatacctggtgcctagaactgtgattggcacatttacatatataataaatattggatgagtgaacatatcatttgagaattcattctttcatcaaatgtttattgaatgtaccctatgttttaggttctgtgctgagtacataacattattataaagtctacgattagaaatacttcctatgtacctgaagataccataggtttataatatacaaaggcatgtaattgaatgaaataataattgaagtcaatgaagattgtcctttaggattctaaactaattaattctatttacaattttttgttatgtatgaaatttgtacatttcttatgggagccagcaagattttgacatgttttgtggcctttttattttttacttatagcaaactatggaggagaaaaagggtatatctggatatagttacacccaagaagagctagaaagagtatctgcactgaagagtgaagttgatgaaatgaaaggacgaacattggatgatatgtctgaaatggtgatgatacttttatttaaattttcttttattgtgtagctagaaggcaggtgttttgtgttagttttattttcagtgaaacattcacctgttaatttctgcacattacattctttcatcttttttttttttttctttttgaggcagagtctcactctattgcccaggctagagtgcagtggcatgaatttggctcactgtaacatccacctctggggttcaagtgattctcatgcctcagcctcccaagtagctgggactacaggtgtgtgccaccatgcccggctaatttttgtatttttagtagagacagggtttcaccatgttgggcaggctggtctctacctcccgacctcaagtgatccacctgcctcagcctcccaaagtgctgggattacaggcgtgagccactacacccggtctcatctgtctttatcaatctcttttgaatttttttcattctagtaaggttgttcaaattctaatagtttatgcattttctgtttttttaatgtgcaaaagttatataacattaaagaaatatttaagaagaaaaataaattttcccagatcataccaccctaatagaattatttcattgttgtgtatgttcttagaatctttccattttcaggacttgtattcaatcagattgcactagtacactttcaccaggcattaaaatgttgatatcttatattacttgttggtaaatagccgccccaaaccctcagagtacccccctccagttgtcttgtccacattggccattcccccagaaccctctggatctcatcacaatctaactcctaaaaaggttagcatgtaagaccctgttcaggccaggcacggtggctcacacctgtaatcccagcactttgggaggccgaggcgggaggatcacttgaggtcaggagttcgagaccagcctggccaacatggtgaaatcccgtctctactaaaaatacaaaaatcagccgggcgtggtgtcgcactcctgtagttccagcttctcaggaggctgaggcatgagaatcactttaacctgggaagcagaggttgcagtgagctgagatcacaccattgcacttcagcctgggcaaccaagcaagactctgtctcaaaaaaaaaaaaaaagaccccattcatctctctgattggtgtccattctgatggatcattacttatgctatttggactatactgtagtattttgaatatcactccatctatatttatgtatattttatatgcctacataaataatacatcatgattatagttgtatagggcaattttttaatatatttattcaatgttaaattataaagattttcccgtaatggtttacagtcttgagaactgacgttttgaatgattaaatagtatagtattccatcttgctgaggaatcaggattttctaaagcacttctctgttgtttgggactgaagtaatttgcagttttttgctcttacatttaacactgaaattaatatctttatgcatgtagtatttttctttttttgaattcttttttaggtgttatattttttgttcaaataacaggtgaaaaaactgtattcattggtatctgaaaagaagtcagctcttgcctcagttataaaagagctacgacagttgcgtcaaaaatatcaagtaagtttttgattttatcaagtaatttgattttatgatacttttagtattctatcttattcacatgtgctagttagaaccctggatattttacttgggtaatatagaaaacaaattatcattattacgttattgatacaattcttcaaaagagaattaaaacatgacatacaggccaggtgtggtggcttatgcctgtaatcccagcactttgggaggttgagacaggaggatgatcacttgagcccaggaattcgagaccagcctgtctaacaacaagaccttgtctctacaaaaaataaaaaaattagctgagcttggtggcatgcacctgtagccccagattctcgggatgctgaggtgggaggattgcttgaacccagaaggtcaggattgcagtgagccatgatcatgccactgtactccagcttgggtgacagagtgagaccctgtctcccacccctccccccaaaaatgacttgcaagggtttttgtttaatttatgctgcttatttagccataaataattggaggcagaggagatggagaaaaagcagtttaagctgaaatgcacaaattcagccagaggagattttttctttaaatcatatggaccttaaagctataaatatgaagtcacattcttctgtgtccaggtaaaagctcaaagtctgcccacaagtggtgacaagttaactttagattaatgaacttgcactgctaggaggcacggtgcacagcaaactatgatagattatgagaagtgatgaaataccattacttggaaactagttctaaccactgctttaaagataaattgtcagaaggtaaatgccctctacaaatccagatcagacagcctccaccatttgacattcactgttctctatttttaatactatatttttaacttgtttaactatatttaatacttgaaactacaaaaatacattatgacactttcaaagagcaggaatacttaaaaatacgtaacttactttaatggacaaccctgaactattaggaaattttacagggaagtgttaatatatttcctttgtgtgatacttgcatttttttctaaatttgaatattaacagctgtttgaatattagagcatcacaactggattagtcttttctctcattgctgtaaataaatacctgagactaagtaatttctaaagaaaaaagtcttaattggctcatggttctacaggctatacaggaagcatgatgcaggcatctactcaccttctagggaggcctcaggaagcttacaatcatggcagaaggcaaagagagagcaggcatatcacatggctagagcagcaagggggtgggaggaggggcctcacacttttaaacaacgagatcttatgagaactcactcactatcatgaaaacagcaccaagagaatggtgctaaaccgttcatgagaatttcacccccacgatccaatcacctcccaccaggccccacctccaacattggaggtaacagtttgacgtgagatttgggcagggacagagatccaaaccatatcaacaatgaaagatgtctaacttatatttatctagatctattatagtcatctagaattagaatagcattttgaaaagttttatgtttattttcttaggagcagttctataaattatatgtaattaaatggaataattatatataattgcttatatgtaggaaaaaactgaaatattcattttttttttattcatttaatttttttaagtagagatggggtctgctgttgccaggctagtctcgaactcctgggctcaagcagtcctcccacctcaggcttccaaaatgctgggattataggcgtgagccaccacacccaccctgtttatattttagagtatgcaatctgataatttttattttcaatgaaatatctattatttattgattactttttcatataaaagtaaaatcatgttcttagcaataattaaagctatacagagttatttaaggaaaagaataaaaattatttctttcagcatccccagcacatgacttaacagctccatatgtattttccagaaattttctgataattaatgaacagataattatttaataactaccttaaatttgttctccacacttctgttctactttgtaaaaacaaaagcttttttcaggacgtgggaggactgaaatcaaccgtgactgataccaagatcaaattatctgctttcttttcttttaacatttggttgctgtactttttttgtccaccttatactttccacttttaaaaaaagtattttgtttctgatgtgtctcttgaatagatcttgaattaggttttgctgtgtcatatcatctgaaaggtttattttaataggtaaatttatatatttattaatatgcagatacatttggtttgggtggtattactttatgtttggctttcaattttaaagcctataaaaaatctccttctcctcctttttcccctcctcactcatcccctgacttctctccctcatgtgtgtgtgttctggcttatggtttagttttagccttttaactctactattcattatttatttctttagatggcatctattaatccccactgtgagaagtcatgaaattgatatatttcttgttcctcctcccttccttccctctcctctagcacctgattttagtagatcgtattgtcttagtgtttgccgttataccttgaatacacttatagtatgacttgttagctttaaatgatattctttgacattcccccacccacctctagcaattaaaaaaatgaggaaaccagcttacttactctgccttccaccttcttttccctttcttcttcctgaaggctttgttgtatcatttctatcttgtcactgcatataacatttacattctcctctgttaccctacttctcgctttggttttcagctctagacctgtaattattagatccagcgctcattaccaattcactgactgccctttgtctcacttctcttttgattgcctggaacttgtcctctagttgagtcctccaaaaagactcataagaacaatattccctgatgagttcttgcatgttctagtttattgcctaaacatttcaacagccgtttgactattagatcatgctttctttccttgaggattttttttaagtgtagctcgacaatcttctagggttaaatgtagctatggagagatctgaggccaacttaatttttttggtaactcgatcttgaaaagaatgtctattttccagttgttgagtacagggttctccctgtgttcatcagatcaggcttataaaagcggtgttctaaacttcctagtgaatgggtaaaatgtttcacggaaactttttcagatgaaaagagttatgtagatggatggtggtaatggttgcccaacattatgaatgtgcttaatgccaactgaattgcacacttaaaaaatggttaaaatggcaaattttgttatgtgtattttattacagcaaaaaaccaagacagaccaggtgtggtggttcatgcctgtaatcctagcactttgggaggcgaaggcgggtggatcacttgaggtcaggagttcgagactagcctggccaacatggcgaaactctgtctctaccaaaaaatacaaaaattagccagctatggtggcacacacctgtagtcccagctactcgggaggctgaggtggcagaatcgcttgaacctgggaggcggaggttgcagtgagctgagattatgccactgtgctccatcctgggtgacagagcgagactccgtctcaaaaaaagagaaaacaaacaaaatcttcctggttaaaaaacaaaaaccagcccagggtaatagcacatgcttatagtcctagctactcagggggccaaggcaagaggatgacttgagcctaggagttcaagaccagcctgcacaacacagtgaaaccttgtctttaaaaaaagaaagaaggaaaaaaacttcccgttgaattttatgttctgtctttatttttaaactttattccttattatggtacgtaatggtttttgccttagagtattattttgtctactattaaagcatatatgccagctttcttatgattagtattgcttcttatttctgtttgctttcagcttcctatgtccttatttttgtcttatgtatgtctcataaatagcatgtagggccaggcagcagttgctcatgactgtaatcctagcactttgggaggctgagttaggagactcttgagcccaggatttcaataccagcctcggcaacatagcaagactccatctctacaaaaagtaaaaaaattagctgagcatgggagcacacatctatagtcttagctattgggaggctgaggcagaaggatagctggagcccaggagttcgaggttgcagtgagacctgatagcaccactgcatccagcctgggtgaaagagtaagacctgcactctaggtagatagatagataggtgagtgggtagataagtagataggtaggtaggtagatagatagatagatagatagatagatagatagatagatagatgtattttgtgtgggtgtagtttcttacatccagtttgagaatctgtcttttaagtggtaagtttaatctcatttatgtttactctaatttttgaagcatttgaatttttttctattttgtacatcctgttatttactgtgttttctctttgctttttttttttaaccatccattgtaccaatcctgttttcttttctcttttttcccttttttctgtttttttatcttctattctgatattatttattcttaggtttttatcatatatatatatatatatatatatatatacctcacttaacaaagtctaaagttgttaacatctccacaatacaggaaccttagaataatttgacaccctcttctaccttacatgtgcgttgttatcctccggcattttttttatttatttgtttgttttgtttatttatttattgagatggagtttcactcttgttgcccaggctggagtgcaatggcgcaaccttggctcaccgcaacttccgcctcctgggttcaagcaattctcctgcctcagcctcccgagtacctgagattacaggcatgcaccaccacacccggctaattttgtatttttagtagagatggggtttctccatgttggtcaggctggtctcgaactcctgaccttaggtgatccgcccgcctcagcctcccaaagtactgggattacaggcatgagccaccgtgcccagcccttatttctttatttgtacatctctaaaagtagttgttatggtggttgttagtattataattacaactttatataatcatttcctgtttagatttacctatatatttagcagttttcaccatcactgcttgtattttactccttatttctggattcagttttctttttcctgaaatacaatttccttgttttgtgagtgtgcgcgtatgtgtgtgtttagtgttcgcagtaaagaatcattacaataagtaagccatcttttttttttcttcttttaaataatggcttggtcagaaaaaaaaaattttcatgctttcttttattttgttgaagggtcggctatcagtttatcatttatttttaggtaatatcttccctataactggttttcatatttttatctttttctttggtgttgtccagatttcagtaccatgttttgagtgtatatttagttttatttacttttctgaatttgtgttttgtgtcttccatgaattctggaaaaagtctacataatactttcagatattttctctcccattttttgcggtctgttttccagctactcatactagagatatgttagaggtatttattctgttccctgttacttcatctcactttcatatttttgtctctctgtgttgaattctagataatttcttcagctctgtgttttagttcattcttttatttcctcagaggtgtctaatattgtttatttcatccacttaatttttaatttcaatgactgtctttttcatttttattttttctcactttttctttctttctttctttttttttttttcttgagacagagtcttgctcttcgcccaggctggagtgcagtgttgcagtctcagctcactgcaacctccgtgtcccgggttcaagccattcttctgcctcagcttcttgagtagctgggactacaggcatgcgcaccacgcctggctaatttttgtattttttgtagggacaggttttcaccatgttggccaggatggtctcaaactcctgacctcaagtgatccggccacctccgcctcccgaagtgctgggattataggcatgagccaccgcacctggcctcactttttgtaatcttttgttttcagttcctcctttatagtttttattattttaaatatacttatttagttggcttatttctagtatccaaagttcctttaggtatggtcctgttatttatatcttctgattctcactcctaatgaattgatttttcccttacatgttttatactttgggactgtgagctttcattaacagagctttgtctcttgaatcctggcagccaggatggaaggtgtacacctctacagtggtttttcagtttttctgttttagaaatatcacaaacttggagctaatattgagttaatttctcagcttggaagttcctagaccatgtagatagggtaaattcaaactccaaagctgcctgaggacagctatgatcactgtcacagctgcatagtgatccgtttgaccataagatttgcgaccaaaaaaaggattttatcaactatagcaccttcatctcaagagaccagcagctacctaagtacgtaggctctgcagccccttttcccactttggatgtgactttcacctttgagagccttgggtgtctgtaaggtcactttgatacatagaagctacatcccctttcttccaacaatcttttattctgtactagtgaccccagcccagatgcagtcccacacaacaaaggcagcatacacattactcatctgtgctaactatcctgtttctaaggaaaccgtgcagcaggaaaccacggtcatgaaaccaaggtcattctcgggatggtgttaaccctttactcacaggttcacaagttgaaaacaacttaaggtttactatggggtcctcagttctaacttcccactctgcatagacccaaggctttgcatctgctctgcctgaacattaaaatcactgtgttaccaagactgaccattcccaattcctttcaccaagggtagccataatgttaccctttctttttggtcctgttaatttcttttatttctttgagagttcagttcagcttgggatctgaaaggatgttgctctgtcttaccaagcatttgtagatgcaggcatgcatcacttaattatgaggatacgttctaagaaatgcataattgagtgatttcatcattgtgcaaacaccatagagtgtacttacacaaacctagatggtatagcctattcatatctaggctatatggtagatatattgctcctaggctacaaacctgtacagcatgtgactatactgaatactgtaggcagttgttacacaatggtaagtatttgtgtatctacacccatctaaacatagaaaaggtacagtaaaattatggtataaaagatttaaaatggtatgctttatagggaacttaccatgaatggagcttgcaggactggaagtttctccggttgagtcaatgagtgagtggtaagtgaatgtgaaggtctaggacattactgtacactatgatagactttggaaacagtgtacacttaggctactctaaatttatgtaaaatatttttttaaaaaaataaagtaaccttagcttaccgtagctttcttggccgggcacggtggctcacgcttgtaatcccaacactttgggaggctgaggcaggcggatgacgaggtcaggagttccagaccagcctggacaacatagtgaaaccccatttctactaaaaacacaaaaaaattagctgggtgtggtggcacatggctgtaatcccagctacttgggaggttgaggcaggagaattgcttgaacccgggaggcggaggttgcggtgagccgagatcccgccactgcactccagcctgggcgacagagcaagactctgtcttgaaaaaaattaaaaaaaacttttcttactttataaacttctaattaaaaaaaaaattgacttttttgtaataacagcttaaaacacaagcacattgtatagtggtatgaaaatattttatttctttatatccttcttttatatgcttttttctatttaaaaaaatttttttggccaggtgcaatgactcatgcctgtaatcccagcactttgggaggccaaggcgagcagatcacctgaagtcaggagttcaagaccatcctggccaacatggtgaaaccttgtctctactaaaaatacgaaattatctggtcatggtggcacatgtctgtagtcccagctacttgggaagctgaggcaggagaatcgcttgaacccgggaggcagaggttgtagtgagccaagatcgtaccattgcatttcagcctgggcgacaagagaaagctctgtctccaaaaaaaaaaaaaaaggtgaaaaatttttgttttttgtttttttttgagacagggtcttgctcttgtacctgatgaactactttcacggnnnnnnnnnnnnnnnnnnnncctcaacctcccggcctcaagcagctctctcacttcagcctaaggagtagctgggaccacaggcacataccaccaagtctggctaatttttatttatttatttatttatttattttgtagaggtggggtcttgttatgttgcctgtgcttgtctcaaactcctgggctcaagcgatccacccgccttggcctcccacagtgctggaattacaagattgtgccaccacacccaggcttttttcactttttaaacttttttgttaaaaactaagacacacacctaggcctacacagcgtcagggtaatcaatatcactgtcttccaccttgaaacatcttgtcccactgaaaggtcttcaagagcaataacacacatgaagatgtcatctcctgtaacaatgccttcttctggatgcctcctgaaggacttgcctgaggctgtttcacagtttattttttataagtaaaagcagtacactctaaaataacaataaaaaatatagcatagtaaatacataaaccagtaacatagtagtttattatcatcaagtattatatacagtacataattgtattgctatacttctatacaactgacagtagattggtttacaccagcatcaccacaaacacatgagtaatttgttgcactatggcattatgatgcctatgatatcactaaggtgaaaggattttttcagctccattataatcatatgggactgccatcatatatgtggtccgttgtgactgaaacatcatcccatgcatgactgtacttttagcatttctaggtgtttgtagcaggagattttcaaattatcccattcaaaatactacattagaagaaactttgaaacaacttaaagaaaacaaaatttaaatttcctccctgcccccttgcaataaagaaactgcttaacctgaattcaaattgtgattccaccttttttttttttttgagatggagtctcactctgtcgccaggctggagtgcagtggtgtgatctcggctcactgcaacctccacctcccaggttcaagtgattctcctgcctcagcctcctgagtagctggaactacaggcacgtgccaccatgcccagctaatttttttgtatttttagtagagatggggttttaccatgttggccaggatggtctcaatctcttgacctcatgatccgcccacctgggcctcccaaagtgcttcaattacaggcgtgagccaccatgcccagcagactccaccttttcttagcagtataatctttggcaaggtacttgttctccctgaactttctgcaagcattatatggtggtattaatatctcttttgaggtgccgttttgagatttagttattgtcagtggtacatttcaaacaccctagaatgttttacgaagttcttctaattaagcccctgcctaggtcttcagcctcccctcaccatttcccagaaataaaccagcataggctgggtgcggtggctcacgcttgtaatcccagcactttgggaggccgaggtaggtggatcacctgagatcaggagttcaagaccagcctgaccaacatagtgaaaccccatctctactaaaaatataaaaattagccaggcatggtggcacatgcctgtaatcccagctgctttggagtctgaggcaggagaatcgcatgaacccaggaggcggaggttgtagtgagccaagatcgcaccattgcactccagcctaggcagtagagtgagactccgtctcaaacaaacaaacaaacaaaagaaataaataaaccagcatagtaaactacttataagtttcttaattattcttgttctctgtagctttcaatcctttatacatagtgttccttttttttaaatactgtcttccccttgttcatcttccacctaactgttcttactaatccttcgtgattagcttagatatcaatttctccaggaaattgtccccactgatccccaagcctgggttaggttcccgggagtcctgtgtgccttctgtaacaccttgtgttttcctatcatagctctcagcagcctgtttacttgtctgaacattacttgagaggaagaatttttggctgttttattcactattgtctccccagctcctaacaaagaacctggcacacagctcaatacatggtagctattattattatcagcaccttcatctatcataattctcaaatgtctggttgttgcataaataactcttaagtatgccaagaagcttagagttaagttacaagactgacaagggcatgcattgtttcagagccatgtttgggacctttgtttttcacttattcaatcattttccctttttatactaggaactgacccaggagtgtgatgaaaagaaatcccagtatgatagctgtgcagcaggcctcgaaagcaatcggtccaaattagaacaggtaagaagagagtttttattttaacaatttagcaaaaactacctgtgtgtacacctgtagtcccagctactctggaggctgaagcaggaggattgcttgagcctaggagtttgaggctacagtgagctatgatcacaccactgcattctagcctgggccacagagcaagactctctctctaaaaaaaatgttttaaatactgcccgtgtacgcacattttcactacatcaatgtcaaaagattcccaaatctttatcatcatctcctaagctccagagatctttatttctttaatttgtacacacttaatttcccatctgtaccactcccagcaaagtacaaggctcattatctgctgcctggcctcccacagtaaactcttacctattctcttgcttctactcttgctctcctaaggtttattcttcatagggaagcctaagaaacctgtttaaaatttttgccacccttcattggcttcctgttgcacttaaaataaaatctaaccaccaaactatggtctacaaggccccacctgccttatgaacttcatgtccatgtgctctactcctcatccatggagcttcagccactctgaccttcttcctgagctttaaacaggccaagcttgttttcactttgggattttgcatgtactcttcccttctgcgtgatatactctgctcctaactcttcgccctcccttctccttttcatcactaggtctcagccttagtgtcactgcctttcagagatctctgatcacctgatgttacccactcttcttcccaacctggcccacccagtccctctatcacattctactgatggatttccttcatagcgcttatccccatctcaaatatccttcattatgtttccttgtttatgttggtttcttctacttcagtgaaagcagggaacctgcctgttcacttctgtgtcctcagcacttagaacagtgctggacacacagtaggtacttaataaatgtatgattgggccagatgcagtcgctcatgcctgtaatcccagcactttgggagtccagggcgggaggatcacttgaggctaggagttcgagatcagcctggccaacccggtgaaaccctgtctctactaaaaatacaaaaattagccaggcgtggtggcacgtgcctgtagtctcagctcctcaggaggctgaggcacgagaatctcttgaacctgcgaggaggaggttgcagtgagccaagactgcaccactgcactccatcctgagtgacagagtgagactctgtctcaaaaaatacaattgaacttgcaggttatagagtgatatgtgtattctctagaaaaagattatctcttattgtgctagaataaacaaagttaaaattgcagaagaggaaatgactctgatggtagtcctttgttgtacatctaaagtcatcgtcgccatatctgtctcattctttcgataatgtcacctatctaaaattatatattataggaagttagaagactccgtgaagaatgtcttcaagaagaaagtagataccattatacaaattgtatgattaaggtaagacaaagtagatcaaaaacatttctgagttttttctatatcaaagtcttccctaaaactgaagtctttctatttagaacctagaagttcaacttcgtcgtgctactgatgagatgaaggcatatatctcttctgatcaacaagaaaaaagaaaggcaattaggcaagtgattttgttgttttatattgagatacttaatattttcaccaataaaagttttataaataagatagaattatacaaatttagcatatttaagtaagtagacactaagatattatttaatactaaatcttactaaacatctagatattttagccctgctaagtaggaatacatatgattttatttcttgcttgcttactttttgattgtgataaaatatataaaatttgccactttacccatttttaagtgtacagttcattggcattgattacattcacaatattgtacagccatcaccactgtatatttacaaaatgttttcatcatcccaaacaaaaactcttgtaaccattaagcaataactcttcattccccgccacccaggaatatatataatttcataattgctttgtcataagcagtaaagttggtctctttttaaagtcccacatggcctagactctagtcatctgcctgctaattgtgcagtgtgatgactgcattttagctggaaattgtgtgattgcagtgtaccagtcttcaagaaggatatgtaaatactgcttagtccttatatggtgctttttttgcaatcccagcttgtggcgtactgtaataaatcaaatcctgcctaaaaaaaaatacatttatggttgaattgctaggtgtgataaaatgcaatcattgaacaacataagccttctttgctcctcatcacaattcaaatattaaatgttttgctattactattcagtaaaaattcagataaaatgtagcactcacgtttattctagattgcattgagattttgagtggcatgtacattaatgttataaaaagaggccgggcatggtggtgggcgcccgtagtcccagctacttaggaggccgaggcgtgggaatcgcttgaacccggggagcaggggctgcagtaagccgaaatcatgccactgcgttccagcctgagcgacaaagggagactctgtctttaaaaaaaaaaaaaaaaaaaatctaagaaatagagtgtcttgcagaatctgaattttttttcaatgtaatgcactagaatgcaagccagactgaaaatactgtatagagcagtgttttttctaatactctaacatattaaactaaaaatgtacttattcatattctttcattgtatgtaaactttgttcatataaatctatatggccaatgataagaaatgagaaaagttaaatttgttcttaaaaaataaaaatttttataaattaagttctatttcttccaaagttatcgatataaatagcaaagaaggaaataattgctcttgaactattcattttctgatctgtcttctagccagatttttttttttttgagacggagtcttgctctgtcacccaggctggagtgcagtggcacgatctcggctcactgcaatctccgcctcccaggttcaaacatattctcctgcctcagcctcccaagtagctgggattacaggcacacgccactgtgtttggctaatttttgttatttgtatttttgtagtttatatttttgtatttttgtagaaatggggtttcaccatgttagccaggttggtctcaaactcctgacctcaagtgaaccaccctcctcagcctcccagagtgctgggattacaggcatgagccaccacgccctactgaaaatgaggattcatcaagactaattgcaaaattttcctttacttagactgctgtattttctctttttatggcttaggatttcttggagtcccaattttatattgtttaattttttcttaaatactgcagcgtagcttcacacacaaaaacagtctcttctttgttctgtgttcctttacccctcgtccttcagtcttttttttttttttttttttttttgagacggagtctcactctgttgcccaggctggagtgcagtggcgtgatctcagctcactgcaacctccgcctcctgggttcacgccattctcctgcctcagcctcctgagtagctgggactacaggtgcccgccaccacgcctggctaaattttttgaatttttagtagagacagggtttcaccgtgttagccaggatggtctcgatctcctgacctcgtgagccaccgcgcccagccccagccttcagtctttatccttaacatgtcacctgctttaaatctcacattttgtcttaaatagtattgaaatataattttgtttacaaataaaatacaatgttattatgtttttaatttttacattaaaattttttttttagcttacaaaagaaatacttgtaaaaacaacagtaaccattatgaagtagtgtgcacagaagttgaatgctgtccattattgccatgtctcagaaatgtctactgttaatactttggtgtacattaagccatattcttttcccatgcgtttgctgatacatctgtatatatgtgtgttagttaatgcatgggaaatgttatatgtatgtgtgtatacacacacgtatacatacatatgtatataaaaataagattaaactgctcctgggtgtagtggctcacacctgtaatcctagcatttgggaagctgagatgagccaattgcttgagccccagagttcaagaccagcctgggcaacatggcaaaaccctgtgtctaccaaaaaaatacaaaaaaattagcccaatatggcgacacatgtctgtaatcccagtatctgggaggctaaagtgggagattcacttgggccagggaggtggaggctacaatgaggtgtgatcatgccactgcactccaacctgggcaacagagtgagaccttgtctcaaaggaaaaaaaaaagattaaactacatatgctgtttttctcttgatctagaatattttccacttcagtatttatagatttacctcattcttttgtataactccttattatttgtttcaatagatatgccataatttgcttaaacattttcccatctatagacatttagtttgtttgcatattttcactattataagcattgatgaaataaatagtctgcttttatgtttatttaagttatgggatatttttgtaggatgacttcctagaagtagaattgcaagattacatgctacttaatgtttatttaaaatgtatatcctttctcctttctacaaacctcttcaaaaacaatgtgtaatttaagcagatgggttgccattgttttgagggtagattaaccagaaatagtatttaacattttaattatcttaatttcctattaaatgttttgctttcttttttttccttaaattactatttacttgaagaactaactaaagatggggaaagacaaagaattttataatgggtttcattctgactccagtaccctaaactatattgcctagtgtattttagatagatatattaatttataattcacttgtatgatcaaatcatttgaagtaaattgaaagtaaatcattatgttgactccctagggaacagtataccaaaaatactgctgaacaagaaaaccttggaaaggtaagaattattatttatttttttaaatgtgtctaactgattcaggctttcagtactgtacatggtttatgactgtcattgttttcaaaaggtcatagtacagtttttgaggggaaattgttcattcattttaaagatggaagacttccttaagaatttagttttacagaaataaagtcacgatggatttttgaaagaaaaaattatctatttttaaatcacagagagttcatgataatgttctgcgttacagttttcagattatcctcaggctgggcgcggtggctcacgcctgtaatcccagcactttggaaggccaaggccagtggatcagttgaggtcaggaactcaagaccagcctggccaaaatggtgaaaccccgtctctatgaaaaatacaaaaattagccaggcgtggtggcaggcgcctgtaatcccagctactctggagcctgaggcaggagaatcacttgaaccagggaggcaaaggttgcagtgagccgagattgcgccattgcactctagcctgggtgacagagcgatactccatctcaaaaaaaaaaaaaaaaaaaattattctcagatatctctttatgagataggtgtaaatttattcatttactttatttaataaacacaaagttctaagccctagtctaagcgctttacaaacattgatttatttaatacaaacaactgaaaaaccttgcttgagatgctcagctccctcctgccagagttatctgatggcaactgaaataggactgtataattatttttcttagttctctgagccactcctagaagtggtagagagtaagttatagccttgaccatcaggacttaaatgaccaactgattagttagtctagctgacttcataaagcaaccaatttaacaaagacaccagctttgcattcttaggagaaaaaaagaaaaaacgtatacttactaataattcagaggaaagatgaccagtcatcaagtgacttggcttcactcttaggcttgtgattctaaacaagccctctaatcactttagagttcatttcctcatatttaaactgaagtacgtagatgagaaatttaaaaattaaattacctagattgatttagatgagttataagatcatcttcattgattttaagtctatattgcataatgaagactaactgtgtttcactatacaacattttttctgtttcttcagtttcactattgaaaataatgttttctggccaggcaaagtgacccatacctatttgtaatcccagcattttgggaggctgaggtgggaggattgtttgaacctgggagtttgagatcagcctgggnnnnnnnnnnnnnnnnnnnnnnnnnnnnnnnnnnnnnnnnnnnnnnnnnnnnnnnnnnnnnnnnnnnnnnnnnnnnnnnnnnnnnnnnnnnnnnnnnnnnnnnnnnnnnnnnnnnnnnnnnnnnnnnnnnnnnnnnnnnnnnnnnnnnnnnnnnnnnnnnnnnnnnnnnnnnnnnnnnnnnnnnnnnnnnnnnnnnnnnnnnnnnnnnnnnnnnnnnnnnnnnnnnnnnnnnnnnnnnnnnnnnnnnnnnnnnnnnnnnnnnnnnnnnnnnnnnnnnnnnnnnnnnnnnnnnnnnnnnnnnnnnnnnnnnnnnnnnnnnnnnnnnnnnnnnnnnnnnnnnnnnnnnnnnnnnnnnnnnnnnnnnnnnnnnnnnnnnnnnnnnnnnnnnnnnnnnnnnnnnnnnnnnnnnnnnnnnnnnnnnnnnnnnnnnnnnnnnnnnnnnnnnnnnnnnnnnnnnnnnnnnntttttttggcaatatattagggaagggtctcactctgttacccaggctggagtgcagtggtgcaatctcagctcactgcatcctctgcctcccaggctcaagcgatcctcccgcctcagcggactacaggagtgctacttgggaggtggaggcaggagctagtttttttggagaactagaaaggcaaacagtttgacttagtgttggatttagtagagctcttgatctcctgacctcatgatctgcccacctcagcctcccaaagtgctaggattacagacatgagccacctcgtctggccttagttaacttttataatcttagttttggtacattatagagtatgtggtttagctaactattttttatctactgtagaaaacataccatattcctccgactatagcaatagaaataaacccctgtaactgagatttaattattcttgtttttttttaatgatagaaaccacgcctggctaatttttttgtattttttgtagagatggggtttcgccatgttgcccaggctggtctcaaactcctgagcccaagcaatccatccaccttggcctcccaaagtgctgggattacaggcacaagccactgcgcccagccttcttactaggttttctaagtttgtagcatcataggtaggggttgtttagctgcaagttttcttttaaaatactgactatatatggatgtctaatttcattgttcaaatattctgaaacctgtaaatgattatatatttattgaagcttgtccattcttaaaatacaaatgaaaaaatgtggcttcatttccgtcttaatatgtatttgtacagtttagctactggtatgactcaatacattggtgatggcaaagttattcactcttatttacattttcctggcttgaatcattattaaaaacatatgtgtgtctatctatgcttgtacttgaaagatgaattagctcctagaaacctataagtaaacttaagaaaacaaatggtatagaaaacaatggagtaattggtaaataaaggtgatatgttccttactttaaaaaaaaaaaaaaaaaacttggctgggcgcagtggctcacgactataacccagcactttgggaggccaaggcaggcagatcacttgaggtcaggagtttgagaccagtctggccaacatggtgaaacctcatctctactaataatacaaaaattagccaggcgtggtggcatgtgcctgtgatcctagctactcgggaggctgaggcatgagaatcacttgaacccagaggttgcagtgagccaaggtcacgccactgcactccagcctgtgcgacacagtgaaactgtgtcttaaaaaaaaaaaaaagcatcccaggtgcagtggctcatgcctgtaatcccagcactttgggaggccaaggtgggtgggtcacctgaggtcaggagttcaagaccagcctggccaacatagtgaaaccccttctctactaaaaatacaaaaaactagctggcatggtggcaggcacctgtaatcccagctactcaggaggctgaggcaggagaattgcttgaacccaggaggtggaggttgcagtgagcagagatcacaccattgcactccagcctgggaaacaagagcaaaactccatctcaaagaaaaaaaaaaatgatcgcctttattatggagattttcaaaactatattttaatcaatccatatatatccatcatccaactctaatcattaaattcgtggccagccttgttttgtctataatctcatccagtacctgccccaaattttttttctaaattatttttaagcacatcgcagacttattattttatctcatcacatttcagtatgtaccataaacactctttttgaacataaccacaataccattatcctaccgaaaagaatttaaaataattacgtaacatccaatacccaatgttcaaacttcactatgatttatttgtttgaatcaggatcctaataagagtccatacattgttattagcttatatatctcttaagtctctctttctccaggttactcccccattacatcattttttccttacaatttatttgttgaaaagaaaaaaaaaacggtaatttgtcctagtgggttttcaacattttgaactttgctgttggtaaccctttggtgtcaattagcatgttcttctgtccccagtatatcttgtgaattggtagttagatctagaagcttgattaaatatgttttgatatttggcaagaatacttcatagatggtggtatgtgcttctatcaggaggctttcttcttatgatgtagacagccattgataatcatttcctagatccttaattcattagaagttgcacagtggtaacattctgattatgtcattcattcttcatttattgactggaataattctgtaaagagcaacttctccttatcttctgtttacttaccctgagttacattcatataagaaaggtacaataactgcttgattcactatttactggttttcaaaatgatgagttggttctttatcatccttcaaaagtaatcttatgacttttagattgaacatatttgatatgtttcaatctattgtgattattagtcccattcgtactcaaatttggccagtggaagcctcttgaagtcagcttttgaatccttttgaaaaaatcctagtagactttgatggcttctttgttttctggtgtgacaaaatgttctaatttcatactgtacattttctgtctcaaacctgaaattagccatttctctaaaaagtgttcacctgtgatttgtgaataaatgaccattatatcaaagaaaataaataaaaaataaaaggaagccttcttgaagctgattcctccatttactgggagaatagtgaattctgtgtaccttatttcacttatgggatgacacaccatacttaaaaggaaaaaaagaaataattttcatatttgaaagcacatatttgaatcaaattataaacattcatttgtataatattttaactagagatttttggatttgtaagattttatatgattgtcaaaattgacttttttttttttgagatagagactcaaaatttatcaagtatatttaagcaagtgaaccaatgactagctcattccccaaatgtcagactgtatcatttaagaagcaaagcttcttaatcctcaaacttctagagtagatctaaattttcaaggcaaacagaacaaacccagcctttcaaagtgatgatagtctaagccctctaagccaatataaactggacatccatagacctcctcaggccaactgagtttccccccttctataccaccatctcctcctttaaagaacaatgaaatcagtgattagtaatttttgtacattgcaactgtaaacaaatgtaaatgataataagatttaaaatatatacatactaacatcagttgtattcataaagttaaaggtttcaaacacacatggttatgaagcaaattaaatttaatatttctgacacagacagtgcccacatcctgtctttggttctttaaataacttttataggttgttaggattttttgacaaggaaattattccaatgatataagaaaagttacaggttaagtagtgccttaatttaaaatcgtgtgcagaagtcttaaaattcttggtctgccttaatggcctttctaaatactttttagtttataaggataaaatatttgttgtaagatacattatttgtaacataaacttaaatagatgtattaatatgccaggtattgcatcaaaaaatttactggttatatttatatttttaaaattctgtgttgttttctattcctgtttgctgttaactttgctttcattatgcatagctgggtgggcagtatttaatgggtggtttgactctggtcctcagcttagttaatcctcttatttaggcaagtaccaactaccagcattctcatttgtgtctcagatcaactagtatattgaccgtatgttaaaagaggaaaggatgaggttgttcctttgcactctgcctctgtgtctctgcttgcttttctgtccctcttggtgattttctcacactcggtgtcggtacagatatttccaacacactgcatttcgttctatgtgcactttcaccttctctaccaaaatgtcaactgtagttgtctctagcacatgggattatgaatgaattcctttcttttctttttcttctcttcttcttcttcttctttttttttttttttttttttttttttttgagacagtctcactcgtcacctgggctggagtgtaatggcatggtcacagctcactgcagccttgagttcccaggctcaagtgatcttcttgcctcggcctcctgagtagctgggaccacaggcatgtgccaccatacacaactaattaaaaaaaaattttttttttgtagagacaggggcgtctcactttgttgcccaggctggattctctctctcttttttcctaccgtgtcacttattgtctctgactttgtgtctactcttgctttcagtcacccttcctcaatttgccataatatagaactaaagtatatttttgtaatttattgaagattcttttattcctgtttaaaattttagagtcaatgagtaaaacagttttggcaggtggaccatctaagatgttagtaacaaaaacaattctaagaaggattttggcttatttaatagtgtactattttcgtaatcactgggcctgctctctgaagtatatgtgcatacaatttgatttatttggacataaatagagtatacactgtttcaggataagatagaatataacatttaataacaaggatatatataatacatgataatttatcaagtatttcaatatctattatgtcacttgaaaacataatcttaccaagtaaatacttttattttcccctattattagccttggtttggttgttttgttttgttttgttttgttttgtttttaagagacaggatctcgctctgttgcccaggctggagtgcagtggtgagagcatagctcactgcagcctcaaattcctggctcaagtgacccttccacctcagcctcccaactagctaggactacaggcatgtgccaccaccatgcccagataattttttaatttttatttttgtagagacagagtatcatgttacccaggcaggccttgaactccccagctcaagcaatcctcctgccttggcctcccaaagtgctggaattacaggtgtgagtcaccgtgcccagcccccagcctcctattattcaccttaatttttttttttttccagagacggaatctcactctgttgcccaggctggagtgcagtggcacaatcttggctcactctgccttccaggttcaagcaattctcctgcctcagccttctgagtagctggaattacaggcacatgccaccatgtccggctaatttttgtatttcatatttttgtatttttagtacagatgggatttcaccatgttggccaggctggtctcgaactcctgacttcaggtgatctgcccacctatatagcatgagtcctgttttccacttgaaactccaagcatacctgacatataacaggtgcttcataattatatcttgaataaataagtattaggttttagtatatagaatatactgatcctgttggtttcttgagaaatttttatgtaaatggaaattctaaaacaaaatgtggacatttctcaggcttaggctaataaatgaattattttaaagctatatgagctataactgtacattcttgagtaatatgtcatgtatatcctcctagctggtttttgttggagaactagaaaggcaagcagtttgacttagagtctcatagtggcacgactgcagctcattgcaacctccacctcccagattgaagccattctcctgtctcagcctcctgagtagcagggactacaggcacacgccaccatgccctgctaatttttgtatttttagtagagatagggtttcaccttgttgatcaggctggtctcgaactcctaacctcaagtgatctatccgcctcagcctcccaaagtgctgggattacagtcgtgagccaccatgcctggtctattaaccttaattgataattgagaaaactgaagtcccaagaaattaagtgccttgcttaccactagaggagacaaaaccagattaaaaccgaagtcttctgacttccaaactctacattcttcttttcacaccatgatactgttccactttcctaactatctttttctctcacttccttttatagttttgtgtagttttttttgtttgtttgtttttgttttttgtattttctttgagacagagtcttgctctgttgccaagctggagtgtagtggcgtgatctcggctcactgcaaactccgcctcccaggttcaagcgattctcctgcctcagcctcccgagtagctgggactacaggcgcgtgcccccatgcctggctaatttttttttgtatttttttggagaactagaaaggcaaacagtttgacttagtgttggatttagtagagctcttgatctcctgacctcatgatctgcccacctcagcctcccaaagtgctaggtttacagacatgagccacctcgtctggccttagttaacttttataatcttagttttggtacattatagagtatgtggtttagctaactattttttatctactgtagaaaacataccatattcctccgactatagcaatagaaataaacccctgtaactgagatttaattattcttgtttttttttaatgatagaaacttcgggaaaaacaaaaagttatacgagaaagtcatggtccaaatatgaaacaagcaaaaatgtggcgtgatttggaacaattaatggaatgtaagaaacagtgctttctgaaacaacaaagccaaacttccattggtcaggtaattcaggagggtggggaggaccggctaatactgtgaattcttgtgtcatcgtttggggttttacttgataccactagctataagcctaatctcataatgtatttcttttttgaaactgatttgtatagcattttgttttcagaagagccattctttattaagttttcatagaaaataatgttaaggtagatttagtttgaatgttttttcatatgaaaaagaggcttttattcttttccatagtttagacatcactggcgtcttctgagttttatgagacaggaaactaagtttactatctgtaaatgtaaacatatgtccattaagaaacatgtagtttttttttagaatgtaataacccagtggcttactgtttttcttaatctcttttaaaaaaactttagaagaatcttttaggaactaatatctcttgttctgaagaaacatttatctgacgttcagcagttcctacagttttacttcagtttatttttcttctgtaaaatgcaagaaaatttaatattttgactaacatgtcttttctgtttgtatcatttaaaggcaaataaacttggtacgtatttcatatctatttaaaaaatgtatagttgtcttgtgtcaaaatttattctttttaaagtattaacatctaatattaaattgaaggattattacttcttttcttttcttttttgagacggagtctcgctcttttgcctaggctggagtgcagtgtcatgatctcggctcactacaagctccacctcccaggttcatgccatactcctgcctcagcttcctgagtagctgggactacaggcacctgccaccatgcccggctaactttttgtatttttagtagagacagggtttcaccgtgttagccaggatggtctcgatctcctgacctcgtgatctgcctgcctcggcctcccaaagtgctgggattacaggcatgagcctacacgcctggccacattattacttattttcaccaaaaatctattacagacttttttttcttttttttgaggtggagtctcactctgttgcccaggctggagtgcagtggtgtgatctcagctcactgcaacctctgcttccgggattcaagcaatcctcctgcctccacctcccaagtagctgagatgacaggcgcccgccatcacacctggccaatttttgtatttttagtagcaacagggtttcaccatgttgaccagactggtcttgaactcccaaccaacatcaggtgatctgcctgcctcagcctcccaaagtgttgggattacaagcatgagccactcatgcctggcctattacagatttaataatataataaccaacctgggcacagtggctcatgcctgtaattccactactttgggaggctgaggcaagcagatcatttgaggtcaggggttcgagaccagcctgggcaacatgacaaaaccctgtctctacaaaaaatacaaaaattagccgggtgtggtggcacacctgtggtcccagctacttggaaggctgaggctagagaatcacttgaacctgggatgtggagtnnnnnnnnnnnnnnnnnnnnccgcggtaactattcacggcgggggcgatatggcgacaaagggagtagaagtatctatgaacgcgtatgtgtaaacggcaggaaaacgcaaaagcgggtggggacggcaaaaaggggacacaggggataggggcgagtaaccgcgatgtcaacgcaacaagggagggtggggggcgaaaaactaaaccgcgcccatcgaatgcgcgaaggctcgggtgacggacgcaaggcgaagaggtggtggcaagaacggggagggggggaaaaaatacgggaaggcacgcccgccggcggggtcccaacgcagaaggagagtaaatcaaaggaaggccgacggaggagaagtaagtgtggacggaaggaggtaacggcgctatactccagcctgggcaatagagcaagactctgtctcaaaaaataataataataatgtaacaataatctgatagttgtgggaaccgttattttatttcattttattttttctttgagacagtctcttgctctgttgcccaggctggagtatagtggtgcaatctcagctcactgcaacctctgcctcccagattcaagcaattctcctgcctcagctttgcgaatagctggaattacaggcatgcaccaccacacctggctagtttttatatttttagtagagatggggtttcaccatgttggccaggctggtctcgaactcctaagctcaagtgatccacccgcctcagcctcctaaagtgctgggattacagttacaggcatgagccaccacgcccagcctgatattttaaatataaaaaaattttcatagaatatagatatcacatattaaatgtagcacaagactcaaagtgaaattcaagagttcaaagtgcttccaatctctgcttcatttggacaaggtacttgaagatttctttggtttcccttagaaagataccaaattcatgtgccatgctttacttcatttcaatttcagtactttttcaaaatatcttgcctttagatttgaaaactcaaatttcgaattattagcatgtccatcttaggctagttcttttcagctgtctttaaaaaaattttttgttgtttttttttttagagatgggatctttctctgttgcccaggctgggaggcagtgatataatcatagctcaatgcagcctcaaacttctggggtcaagttagctgggactataggcacatgccaccatgcctggctaatttttttttttttttttggtagagatgccatgtaagctgtttttgtgtcagtataaacaaatacctgaggctggctaatttataaagaaaagaggtttaattggctcatggttatgcaggctgtacaggaagcatggtgatggcatctcctcttggccagggcctcaggtgaaagcttcatggtgaaaggggaaccagcacatcatatggaaagagcaggagcgagaggtcaggggcagttgtcactcactgttaaagaaccagatcttgtgtgaactcagagctagaaatcactaatcaccgcggggatgacattaagttattcacgaggatccacctccatgatctagacacctcccaccaggcctcacctccaacactggagattacatttcaacatgagatttggagggaacaaacatccaaaccatattagatggggtctccttttgttgcccaggctagtcttgaacttgtggcttcaagtgatcctcccaccttggcctcccaaagtgctaggattaggcataagctaccatacttggcccaaaacttttttttttttgtttgagatggagtttcgctcttgttgcccaagctggagtgcaatggcgcaatctcagctcactgcaacctccatctcccaggttcaagccattctcctgcctcagcctcccaagtagctgggattacaggcatgtaccaccaccaaaaatattttttaaagaagaaaattgtttctaccctgtaaaaaatatggatctctttgttcccatgtgtgtcctactcttaatttttgtttgaaaggttttttattggtaatcaaagagcctcactagctagagataattggtaattctaggagctgtagcaagaagagatggggtccatcagaataaggaagaactggacttaccgggaaagtatggagagaaatatcttttaaatttttataaggaaaacagaagtatttcagtgttcataagtgatttgaattggtcctctgcttgttttatcctcttatttgggcaagtatcagctgccagcattgtcatttgtgcctttagatcaactagcagatcagcaatcccccaaaagaggaaaagctgtgtcttagtgtgtagaaacaaatccttaattcaatcatcattttttggatagtgacatagatatatttgtgtggtgttggttactggcatgttgtttttaagccaatagttaagtgatgctcctttaaacagaatatgaattcctttgcaagtatttgaaaaagactagatgccctttatagaaacagcattttattcctccagaggaaagtcagttcacaaaattattaagcctagtgattaattattttttagcccttcactgtctttggtactcctcttgatttttaaaatggttgatgacagatactccacagaatccttagaattctactgatttgattattacttgccatctttactccatacagaaggaatatgtggattaaacacaaaggcagctccaaaattactttattcactgaagcagaacatcattattacttcaagaaaagcaaactgaagaaataaaactctaaaagtacaaagttatttatagattgtgtgtaacattggacatttagtaatgcagcttaatgggtttagtgcagtgactttccactcatttcatgatttgattggaacattaaaaaactttaactaaccttgacagtctttgacagctggcacttactaaagagcttattacatttttccttcaggattgatactctggctagctaattgatcagagtacttaatcatttcagaaactaatttgtctttcatgtgatggcccaaataaaggagaagaatgcagcctgtgaaatctgcctctgtgttcacagatttccttcttctagttgccaaccgttgcatgggactgactgtatgattgtaaatttcaaaaggccactgcttatcttgctttctgtattaattcaggaaacaatccaaatttaaatggtgccctttaagaagaatcttataataggataatgtgctttctgttataaatctgttaactgaattccaaagccatgtattttctaggtctggagaatgtaccagaagggtcttagaatactgttcaaatccctatggaaataaaaccagaaattgcagaacacctacctttttctttagattaatacttgcccttattttgctctaattcaggagacgataataaaggaaggaatttcatttaaactatcaaataaacgtaaatgtgttattctgcctaattaacatttataaatttgtaagatctatgcactttccaagtccatttctttttttttttgagacagagttttgctctttttgcccaggctggagtgcaatggcaggatcttggctccctgcaacctccgcctcccgcgttcaagcaattctcctacctcagcctcccaagtagctgggattaccggcatgtgctaccacggccagctaactttttgtatttttagtagagatggggtttcaccatattggtcagctggtcttgaactccagacctcaggtgattcacccgcctcggcctcccaaagtgctgagattacaggcataagccaccgcgcccggccccaagtatgtttcttaactttttaaggtaacacaatacagagcactttttataatttgagtaaaataaaagactaaatatattgctgaaactaaaaatatacaaatttgcagaattcttctgagttgaatatgaaaaatggcaaactgataacttgtcaaagctgtctctacaaaggcaaagtcaaagtttgcattgaaaaatgactttgtagctgggcacagtggctcacgcttgtaatctcagcactttgggaggccaaggcaggcagatcgcctgaggtcaagagttcgtgaccagcctgaccaacaaggagaaatcccatctctgctaaaaatacaaaattagccaggcgtggtggtgtatgcctgtaatcccagctactcgggaggctgaggcaggagaatcacttgaacctgggaggtggaggttgcagcgagccagattgctccattgcactccagcctgggcaacaagagcgaaactccatctcaaaaaaaaaaaagaaaaaagaaaaagaaaaatgactttgtatgcaggtgtgtgtcttatagaagccttgtcttatgcaggcattctaccctatattagtgactaatgagtgtgagtaaatgacttgtttctacaaaggattctaggtgcttacatcattcatcttgtctggcatgaaggagtctttagccccagggaacgggtaagatagcatcctgatgattaactttctttaaacttggttttatcagtaacgtcattgttactgattgttactcacctacaggtgaggagtagattacatatgcaacagatctttcttttttagacaattcatggcagccaggagagaaataaagctgtatctttattaaatatgtaaattattcctccactcatactggcttagctcctcttcctcttccttttaatgagagcagtttaaattagagctgcttggcgtatggcagccaggcctgggatgagtgttttgtctcgggggatggagagggatcattaaaagttatctatgtattttttatctttgaccctactgtcttaagataatcttaaaaagagaagttgactgtaaatattgtttagccccaccccatccttgcaaaagaaatcaaaaaataaaacacagatcccaaataagtatttttaagagacttggacaaacatatgctttctgctcctatgctccctcttttggcaaactggaagtactttcttggcaaacatcgatattttcacaatttcctttccagaattgctgagaggcttgagtcaccaaacttggtttactgctatggaaattcactattccgagcacaggaagaaattaaagatttttgtttttcggtgaaagtatgtgtttacacctcagttcagagtgtaacagcaggttcctggcttggctgcttaatgctgcatgcgatatcctggtaaacagtcatagaattttggagcttgaaaggaacctcagaatgattcatataatcatttattagatcaggagctttgagggatctcttccaacctctctccagtgtggaaatcagttctgtagcgcatgtagcgaatcactttccagccatagtagtgtacccgcaatgcggctcactcctcatgagggagcctgtttcattgttagagcacaacctaattaagttattggttctgaaactgaagcagacttacaaaggactttttatgaacttcagttatgcaaagcaagatttaacaaattttattccctgaagctctaatcacgaccatgatcatgagtgattcaagcaaataacctggtactgagcactccatttgtaccaggcactgtcctaaatgctttatatgtgtagaactaacataactctcacaataaccttatgaggcagctgcaattatccgcattttatagataagggaactgaagcacagagagactttcacaatattatacaactaatgattgtggcagagccaggatccaaaacctgtgctcttaagtacttatattgcagtgtgacccatgtatatacctattgtatataagcaaacagattgatgtctgtttatgagttatggtatgaaataatttttagtgcttattataaaattatagtacctttttttaaaaaatgtgtttgcttactatacctaaagaataaactttactaaatggttaaaagtaacctcaaccaaccagatgagggaattatactgaaaataaatgttcagtaaatgaatgaaagaaatgagtagtagttttaaatacagagcaaactgaaactttatagggttatcatttaaatctatctgtgtgttaaaatcatgcatgtctccaattgctggacatttagatcaactccagtttttcactttatgaacaatgctggaatgaaacttaaagattgaaatacagctgggtggccaggcacggtggctcacgcttgtaatctcagcactttgggaggctgaggtgggcggatcatgaggtcagaagttccagaccagcctgaccaacccagtgaaaccccatctctactaaaaacacaaaaattagctgggcgtggtggcaggtgcctataatcccagctacttgggaggctaaggcaggagaatcttgaacccaggaggcctccgcctgggttgcagtgagtcgaggtcacaccactgcactccagcttgggcgacagagctagactccgtctggagaaaaaaaaaaaaagaaagaaagaaatacagctgggtgtggtgctcatgccttatcctagcacttcgggaggctacggcaagagaatcacttgagcccaggaatttgaggccagcctggccaacatggtgaaaccctgtctctactaaaaatacaaaaaattagccgagtgtggtggtgcacgcctgtagtcccagctacttgggaggctgaggcaggagaaccgcttgaaccctggaggcagaggttgcagtgaaccaagattgtgccactgcactccagtctgggtgacagagcgagattctgtctcaaaaaataaaaattaaaaaaattaaaaaagattaaaatacaataaggtaattaagcaaaaccacaaaatttatcaaattcggttaaatccagaatctgttgaacagttttatagatatttcttgtctttttctgtgaaaataccaacaggcaatttctttcttaaccaaagaaattaacaagataatacttgattaataggagaatgaaattaaaagtccactcatttattttgatgcgaatatttgttatcttgtgtgcctgacactgtgctaagtgctaaaatagaaattgaacatgacctagtttttgctctcaaagacctcacagtttagaagactcaaatattatgcagcaaaataagtgctgtgtgtacaaagaacagggagctcagaggaagcagcaattagtactgatgggggattgtggaaagattaacagaggagatggaacttgagctgatttgtaaggatgagttaagatgttgataggcatgggaaaagtgaagacataaaggcatttaaggatacagcatgtgaaggaaaggacaagaagtctagtagggctcggtaagttacacaggtgcatgggagatggggaaagaattcatattatgtatcaagctcttgagttctgtaatgtgctggacactcagactgaatgaaaaggtgcagtaaaaatataagtgtggcccctgttgttaacacgactatatattaaacaacagtaaacacatcaagaagtaataaccaagtactaaattttgtggagcaatagaaattcaatcaaattggagctatagggaagagcagaaggtcaaagaagagtagagtcaaggaggctttatcaaagaggtaggaactgatctgggcctggaaggatgggtaagatgtggacagatgaatgggagaacatggcagaacagcaggagtgaaaccagcaagtattcatcacccaccactcccttatccagctctatagcaagtatattgagcaagaaaagcatggctgtcacttttaagcagcttaaagtccagttatcaagataagcgatgtaaccaacaaatcagtgctggattagccagtaggcaaacatgcactacagattttctgaaagtatatgatatttcaaaaatcaaagaagtttccattagaaaaagctgggcacggtggcttacacctgcaatctcagcactttgggagaccaaggccgggcagatcacttgaggtcaggggtttgagaccaaactggccaacatggcaaaacccctgtctctactaaaaatataaaaattacccagagtagtgacgcgcgcctgtaattctagctactcgggaggctgagacacgagaatcgcttgaacccagaaggcagaggttgcagtgagccgagatcgcaccactacacttcagcttgggtgatggagtgagactctgtctcaaaaaaaaaaaaaaaaaggaaaagagaaagagagagagaaaaaaaggaaggagggaaggaaggaaggaagagggaaagaaagagagaaagagcagaactctgttagacttccttatattcgtattatggtttagtctttgtttcttctcattgcatgtagtggggaggggaactataattttttggaagttagagtctctaaaaattttagttcagcttcctggaatgggataaaaaccacatagatagtagagttaataatccccacagaactcaaagtgggagaaaatacaggctggagcaatctggtcagcctagaggagaaaacattcaagttaaacctcttatggaagcttgagtagaaattggctccaagagggagcaagagctccgtggagaaaaggaagccccaaaagggaatgccctgaggtatgagccagacccagccggagggaacagagaagatgaagctggaaagggagtgagagattgaagctgaaggtttctagttggtgggattatcagccatggtctgttggtaataacaacaggagttcttcttaatatccttttgaactgttgatgaaatgagattcactgcattgtagagaatgacaaattatcatcttccacggaagactgccatcatggactaagtttggtttattttttgtgacagagaagagcaatacaggtggtaagccag

SEQ ID NO: 420 - DNA, 3123 bp, Homo sapiens
aactctacggcctagcaaccgttgccaaggagctcgactctgggagcggtctagagcccgggcgcctcctggggggtggggaaacggtttcgtgaggagaatttgaggtaacctcgccaactcgcggtcggaagctcctctgaaccccgaaataggagagagctcccgtcctctctcggtcctgatgcagcacctcgcaagtggaaggggtcgtcgcggttaagcccccggataggggaatcgggccccttctgggattcgagcggatccaggccgctccctggagggatgaactgtcgaggggcccagggcagcccccgctagaggcccggtcgggtgtggggtcccctgtcccctgtcccgagcccggggagggggacactatttctggtactcccaggaggctgcgggtcgatgctcgtgccagcctgggacccaggcagcacggtttctctcccaaattgtgccagagaacacgcacgtcctggttttcattgttccccgcctcctgcgactcgtttgtggttaaaattataagacctaattatgagtgatcaaattaaattcattatggacagtctcaataaggagccctttaggaagaactataatttaatcacgtttgattccttggagccaatgcaactattacaagttctcagtgatgttctggctgagattgacccaaagcaacttgtggatatcagagaggagatgccagagcagacagccaaacgaatgttgagccttcttggtattcttaagtacaaaccttcaggaaatgccacagatatgagtacttttcgtcagggtttggtgattggaagtaaacctgtaatttacccagtgctccactggcttcttcagaggactaatgaactgaagaaaagagcatatttagctcgttttttaataaaacttgaggtaccaagtgagtttcttcaggatgaaactgtggctgacaccaataaacagtatgaagagttaatggaagcctttaaaactttgcataaagaatatgagcagctcaagatatctggattttctacagcagaaataagaaaggatatcagtgcaatggaagaagaaaaggatcagctcattaagagagttgaacatttgaagaaaagggttgagacagctcagaatcatcaatggatgcttaaaatagcaaggcaacttcgagttgaaaaagagagagaagaatatcttgcacaacagaaacaggaacaaaagaatcagctatttcatgcagtgcaaagattgcaaagagtacaaaaccagctgaaaagcatgcgccaagctgcagcagatgcaaagcctgaaagtttaatgaagaggctagaggaggagataaaatttaatttatatatggtaactgaaaaatttcctaaagaattagaaaataagaaaaaggaattacattttttacaaaaagtagtttcagagccagctatgggccattctgatcttcttgaacttgaatctaaaataaatgaaataaacacagaaattaaccagttgattgaaaagaaaatgatgagaaatgagcccattgaaggcaaactctcactgtataggcaacaggcatctatcatttcccgtaaaaaagaagccaaagctgaggaacttcaggaggccaaggagaagttagccagcctagagagagaagcatcagtaaagagaaatcagacccgtgaatttgatggtactgaagttttaaagggagatgagagacaggatctcactctgtcacccaggctggagtgcggtggtgtgatcatggcttactgcagcctgaaactcctaggctcaagtgatcctcctacctcagcctcttcaaacgatatgtcaataaacttcgaagcaagagtacagttttcaaaaagaagcatcagataatagctgaacttaaagctgaattcggtcttttgcagaggactgaagaacttcttaagcaacgtcatgaaaatattcaacaacaactgcaggtgaaaaaactgtattcattggtatctgaaaagaagtcagctcttgcctcagttataaaagagctacgacagttgcgtcaaaaatatcaagaactgacccaggagtgtgatgaaaagaaatcccagtatgatagctgtgcagcaggcctcgaaagcaatcggtccaaattagaacaggaagttagaagactccgtgaagaatgtcttcaagaagaaagtagataccattatacaaattgtatgattaagaacctagaagttcaacttcgtcgtgctactgatgagatgaaggcatatatctcttctgatcaacaagaaaaaagaaaggcaattaggcaatataccaaaaatactgctgaacaagaaaaccttggaaagaaacttcgggaaaaacaaaaagttatacgagaaagtcatggtccaaatatgaaacaagcaaaaatgtggcgtgatttggaacaattaatggaatgtaagaaacagtgctttctgaaacaacaaagccaaacttccattggtcaggtaattcaggagggtggggaggaccggctaatactgtgaattcttgtgtcatcgtttggggttttacttgataccactagctataagcctaatctcataatgtatttcttttttgaaactgatttgtatagcattttgttttcagaagagccattctttattaagttttcatagaaaataatgttaaggtagatttagtttgaatgttttttcatatgaaaaagaggcttttattcttttccatagtttagacatcactggcgtcttctgagttttatgagacaggaaactaagtttactatctgtaaatgtaaacatatgtccattaagaaacatgtagtttttttttagaatgtaataacccagtggcttactgtttttcttaatctcttttaaaaaaactttagaagaatcttttaggaactaatatctcttgttctgaagaaacatttatctgacgttcagcagttcctacagttttacttcagtttatttttcttctgtaaaatgcaagaaaatttaatattttgactaacatgtcttttctgtttgtatcatttaaaggcaaataaacttggtacgtatttcatatctatttaaaaaatgtata

SEQ ID NO: 421 - protein, 451 aa, Homo sapiens
MSDQIKFIMDSLNKEPFRKNYNLITFDSLEPMQLLQVLSDVLAEIDPKQLVDIREEMPEQTAKRMLSLLGILKYKPSGNATDMSTFRQGLVIGSKPVIYPVLHWLLQRTNELKKRAYLARFLIKLEVPSEFLQDETVADTNKQYEELMEAFKTLHKEYEQLKISGFSTAEIRKDISAMEEEKDQLIKRVEHLKKRVETAQNHQWMLKIARQLRVEKEREEYLAQQKQEQKNQLFHAVQRLQRVQNQLKSMRQAAADAKPESLMKRLEEEIKFNLYMVTEKFPKELENKKKELHFLQKVVSEPAMGHSDLLELESKINEINTEINQLIEKKMMRNEPIEGKLSLYRQQASIISRKKEAKAEELQEAKEKLASLEREASVKRNQTREFDGTEVLKGDERQDLTLSPRLECGGVIMAYCSLKLLGSSDPPTSASSNDMSINFEARVQFSKRSIR

SEQ ID NO: 422 - DNA, 3040 bp, Homo sapiens
aactctacggcctagcaaccgttgccaaggagctcgactctgggagcggtctagagcccgggcgcctcctggggggtggggaaacggtttcgtgaggagaatttgaggtaacctcgccaactcgcggtcggaagctcctctgaaccccgaaataggagagagctcccgtcctctctcggtcctgatgcagcacctcgcaagtggaaggggtcgtcgcggttaagcccccggataggggaatcgggccccttctgggattcgagcggatccaggccgctccctggagggatgaactgtcgaggggcccagggcagcccccgctagaggcccggtcgggtgtggggtcccctgtcccctgtcccgagcccggggagggggacactatttctggtactcccaggaggctgcgggtcgatgctcgtgccagcctgggacccaggcagcacggtttctctcccaaattgtgccagagaacacgcacgtcctggttttcattgttccccgcctcctgcgactcgtttgtggttaaaattataagacctaattatgagtgatcaaattaaattcattatggacagtctcaataaggagccctttaggaagaactataatttaatcacgtttgattccttggagccaatgcaactattacaagttctcagtgatgttctggctgagattgacccaaagcaacttgtggatatcagagaggagatgccagagcagacagccaaacgaatgttgagccttcttggtattcttaagtacaaaccttcaggaaatgccacagatatgagtacttttcgtcagggtttggtgattggaagtaaacctgtaatttacccagtgctccactggcttcttcagaggactaatgaactgaagaaaagagcatatttagctcgttttttaataaaacttgaggtaccaagtgagtttcttcaggatgaaactgtggctgacaccaataaacagtatgaagagttaatggaagcctttaaaactttgcataaagaatatgagcagctcaagatatctggattttctacagcagaaataagaaaggatatcagtgcaatggaagaagaaaaggatcagctcattaagagagttgaacatttgaagaaaagggttgagacagctcagaatcatcaatggatgcttaaaatagcaaggcaacttcgagttgaaaaagagagagaagaatatcttgcacaacagaaacaggaacaaaagaatcagctatttcatgcagtgcaaagattgcaaagagtacaaaaccagctgaaaagcatgcgccaagctgcagcagatgcaaagcctgaaagtttaatgaagaggctagaggaggagataaaatttaatttatatatggtaactgaaaaatttcctaaagaattagaaaataagaaaaaggaattacattttttacaaaaagtagtttcagagccagctatgggccattctgatcttcttgaacttgaatctaaaataaatgaaataaacacagaaattaaccagttgattgaaaagaaaatgatgagaaatgagcccattgaaggcaaactctcactgtataggcaacaggcatctatcatttcccgtaaaaaagaagccaaagctgaggaacttcaggaggccaaggagaagttagccagcctagagagagaagcatcagtaaagagaaatcagacccgtgaatttgatggtactgaagttttaaagggagatgagagacaggatctcactctgtcacccaggctggagtgcggtggtgtgatcatggcttactgcagcctgaaactcctaggctcaagtgatcctcctacctcagcctcctgagaagctcggactacaggcacgagccaccatgcccagctaattttctttttttgttttgttttgtagagatgtggtctcactatgtttcccaggctggtcttaaactcccggcctcaagcagtcctcccacttcggcctcctgaagtgttaggattacaggcgtgagcctgcgcctggctgtaattactatacccagtttttacagataaaggatctgagacatgcagaggttttaagctgacttgcctgacaccccattgctagtaagtagtagaaccaggagttggatttagcagtctggctgtagagtcatcaatagtttgcacatgacagaaagctggaagaaatagtcaacctgaaacacatgatggaattataattcagaatcatcttggtagataggggcactgtgcttaaacaaaatgccattaatgggattataataaatataatgtggtagaattcaagttttgtttgccaattcaacacatcatctgttactaacgcagctttaaaaaatgcataaacgattatactacattaatttttttaaaaagtatcctgtttatggtctgattatgcctggagtattattttatatttttgacttcatgttttaagagacaatcatgccagagtcccacatgagggtgactaaaatggacaaaaagtctggaaactttcatatcaataattgattatgtattaactgaaacaaaagactagagaaagacacagtgggaattgattatgtattaactgaggaataaaagactgaagaaagacataataaatagttaaaggattatggaaaagatggtgttcagaaaaaaattaacatgcaggcctgagactgctatccctagaaaggtctgcttgcaaagttggcccttggctggcatctgggggaacttggttcttggatggattcctgccattcactgataagaatggctcaccttgcctaaagtatatgaagagtgtgctttatgtcgagctcctgcttgcttgcctctttctttgtctttctttcttttccttcctcccttccttccttccttccttccttccttccttccttccttccttccttccttcctctctctctctctttctttctttcttctttctggaattttggtacaggctaggcagaatgtgcctagatgatcagctcctagtaaaaaccttgagaact

SEQ ID NO: 423 - protein, 431 aa, Homo sapiens
MSDQIKFIMDSLNKEPFRKNYNLITFDSLEPMQLLQVLSDVLAEIDPKQLVDIREEMPEQTAKRMLSLLGILKYKPSGNATDMSTFRQGLVIGSKPVIYPVLHWLLQRTNELKKRAYLARFLIKLEVPSEFLQDETVADTNKQYEELMEAFKTLHKEYEQLKISGFSTAEIRKDISAMEEEKDQLIKRVEHLKKRVETAQNHQWMLKIARQLRVEKEREEYLAQQKQEQKNQLFHAVQRLQRVQNQLKSMRQAAADAKPESLMKRLEEEIKFNLYMVTEKFPKELENKKKELHFLQKVVSEPAMGHSDLLELESKINEINTEINQLIEKKMMRNEPIEGKLSLYRQQASIISRKKEAKAEELQEAKEKLASLEREASVKRNQTREFDGTEVLKGDERQDLTLSPRLECGGVIMAYCSLKLLGSSDPPTSAS

SEQ ID NO: 424 - DNA, 1045 bp, Homo sapiens
gaactgacccaggagtgtgatgaaaagaaatcccagtatgatagctgtgcagcaggcctcgaaagcaatcggtccaaattagaacaggaagttagaagactccgtgaagaatgtcttcaagaagaaagtagataccattatacaaattgtatgattaagaacctagaagttcaacttcgtcgtgctactgatgagatgaaggcatatatctcttctgatcaacaagaaaaaagaaaggcaattagggaacagtataccaaaaatactgctgaacaagaaaaccttggaaagaaacttcgggaaaaacaaaaagttatacgagaaagtcatggtccaaatatgaaacaagcaaaaatgtggcgtgatttggaacaattaatggaatgtaagaaacagtgctttctgaaacaacaaagccaaacttccattggtcaggtaattcaggagggtggggaggaccggctaatactgtgaattcttgtgtcatcgtttggggttttacttgataccactagctataagcctaatctcataatgtatttcttttttgaaactgatttgtatagcattttgttttcagaagagccattctttattaagttttcatagaaaataatgttaaggtagatttagtttgaatgttttttcatatgaaaaagaggcttttattcttttccatagtttagacatcactggcgtcttctgagttttatgagacaggaaactaagtttactatctgtaaatgtaaacatatgtccattaagaaacatgtagtttttttttagaatgtaataacccagtggcttactgtttttcttaatctcttttaaaaaaactttagaagaatcttttaggaactaatatctcttgttctgaagaaacatttatctgacgttcagcagttcctacagttttacttcagtttatttttcttctgtaaaatgcaagaaaatttaatattttgactaacatgtcttttctgtttgtatcatttaaaggcaaataaacttggtacgtatttcatatctatttaaaaaatgtata

SEQ ID NO: 425 - protein, 107 aa, Homo sapiens
MIKNLEVQLRRATDEMKAYISSDQQEKRKAIREQYTKNTAEQENLGKKLREKQKVIRESHGPNMKQAKMWRDLEQLMECKKQCFLKQQSQTSIGQVIQEGGEDRLIL

SEQ ID NO: 426 - DNA, 228 bp, Homo sapiens
aacctagaagttcaacttcgtcgtgctactgatgagatgaaggcatatatctcttctgatcaacaagaaaaaagaaaggcaattaggcaagtgattttgttgttttatattgagatacttaatattttcaccaataaaagttttataaataagatagaattatacaaatttagcatatttaaggaacagtataccaaaaatactgctgaacaagaaaaccttggaaag

SEQ ID NO: 427 - protein, 64 aa, Homo sapiens
MKAYISSDQQEKRKAIRQVILLFYIEILNIFTNKSFINKIELYKFSIFKEQYTKNTAEQENLGK

SEQ ID NO: 428 - DNA, 3148 bp, Homo sapiens
aactctacggcctagcaaccgttgccaaggagctcgactctgggagcggtctagagcccgggcgcctcctggggggtggggaaacggtttcgtgaggagaatttgaggtaacctcgccaactcgcggtcggaagctcctctgaaccccgaaataggagagagctcccgtcctctctcggtcctgatgcagcacctcgcaagtggaaggggtcgtcgcggttaagcccccggataggggaatcgggccccttctgggattcgagcggatccaggccgctccctggagggatgaactgtcgaggggcccagggcagcccccgctagaggcccggtcgggtgtggggtcccctgtcccctgtcccgagcccggggagggggacactatttctggtactcccaggaggctgcgggtcgatgctcgtgccagcctgggacccaggcagcacggtttctctcccaaattgtgccagagaacacgcacgtcctggttttcattgttccccgcctcctgcgactcgtttgtggttaaaattataagacctaattatgagtgatcaaattaaattcattatggacagtctcaataaggagccctttaggaagaactataatttaatcacgtttgattccttggagccaatgcaactattacaagttctcagtgatgttctggctgagattgacccaaagcaacttgtggatatcagagaggagatgccagagcagacagccaaacgaatgttgagccttcttggtattcttaagtacaaaccttcaggaaatgccacagatatgagtacttttcgtcagggtttggtgattggaagtaaacctgtaatttacccagtgctccactggcttcttcagaggactaatgaactgaagaaaagagcatatttagctcgttttttaataaaacttgaggtaccaagtgagtttcttcaggatgaaactgtggctgacaccaataaacagtatgaagagttaatggaagcctttaaaactttgcataaagaatatgagcagctcaagatatctggattttctacagcagaaataagaaaggatatcagtgcaatggaagaagaaaaggatcagctcattaagagagttgaacatttgaagaaaagggttgagacagctcagaatcatcaatggatgcttaaaatagcaaggcaacttcgagttgaaaaagagagagaagaatatcttgcacaacagaaacaggaacaaaagaatcagctatttcatgcagtgcaaagattgcaaagagtacaaaaccagctgaaaagcatgcgccaagctgcagcagatgcaaagcctgaaagtttaatgaagaggctagaggaggagataaaatttaatttatatatggtaactgaaaaatttcctaaagaattagaaaataagaaaaaggaattacattttttacaaaaagtagtttcagagccagctatgggccattctgatcttcttgaacttgaatctaaaataaatgaaataaacacagaaattaaccagttgattgaaaagaaaatgatgagaaatgagcccattgaaggcaaactctcactgtataggcaacaggcatctatcatttcccgtaaaaaagaagccaaagctgaggaacttcaggaggccaaggagaagttagccagcctagagagagaagcatcagtaaagagaaatcagacccgtgaatttgatggtactgaagttttaaagggagatgagttcaaacgatatgtcaataaacttcgaagcaagagtacagttttcaaaaagaagcatcagataatagctgaacttaaagctgaattcggtcttttgcagaggactgaagaacttcttaagcaacgtcatgaaaatattcaacaacaactgcaaactatggaggagaaaaagggtatatctggatatagttacacccaagaagagctagaaagagtatctgcactgaagagtgaagttgatgaaatgaaaggacgaacattggatgatatgtctgaaatggtgaaaaaactgtattcattggtatctgaaaagaagtcagctcttgcctcagttataaaagagctacgacagttgcgtcaaaaatatcaagaactgacccaggagtgtgatgaaaagaaatcccagtatgatagctgtgcagcaggcctcgaaagcaatcggtccaaattagaacaggaagttagaagactccgtgaagaatgtcttcaagaagaaagtagataccattatacaaattgtatgattaagaacctagaagttcaacttcgtcgtgctactgatgagatgaaggcatatatctcttctgatcaacaagaaaaaagaaaggcaattagggaacagtataccaaaaatactgctgaacaagaaaaccttggaaagaaacttcgggaaaaacaaaaagttatacgagaaagtcatggtccaaatatgaaacaagcaaaaatgtggcgtgatttggaacaattaatggaatgtaagaaacagtgctttctgaaacaacaaagccaaacttccattggtcaggtaattcaggagggtggggaggaccggctaatactgtgaattcttgtgtcatcgtttggggttttacttgataccactagctataagcctaatctcataatgtatttcttttttgaaactgatttgtatagcattttgttttcagaagagccattctttattaagttttcatagaaaataatgttaaggtagatttagtttgaatgttttttcatatgaaaaagaggcttttattcttttccatagtttagacatcactggcgtcttctgagttttatgagacaggaaactaagtttactatctgtaaatgtaaacatatgtccattaagaaacatgtagtttttttttagaatgtaataacccagtggcttactgtttttcttaatctcttttaaaaaaactttagaagaatcttttaggaactaatatctcttgttctgaagaaacatttatctgacgttcagcagttcctacagttttacttcagtttatttttcttctgtaaaatgcaagaaaatttaatattttgactaacatgtcttttctgtttgtatcatttaaaggcaaataaacttggtacgtatttcatatctatttaaaaaatgtata

SEQ ID NO: 429 - protein, 672 aa, Homo sapiens
MSDQIKFIMDSLNKEPFRKNYNLITFDSLEPMQLLQVLSDVLAEIDPKQLVDIREEMPEQTAKRMLSLLGILKYKPSGNATDMSTFRQGLVIGSKPVIYPVLHWLLQRTNELKKRAYLARFLIKLEVPSEFLQDETVADTNKQYEELMEAFKTLHKEYEQLKISGFSTAEIRKDISAMEEEKDQLIKRVEHLKKRVETAQNHQWMLKIARQLRVEKEREEYLAQQKQEQKNQLFHAVQRLQRVQNQLKSMRQAAADAKPESLMKRLEEEIKFNLYMVTEKFPKELENKKKELHFLQKVVSEPAMGHSDLLELESKINEINTEINQLIEKKMMRNEPIEGKLSLYRQQASIISRKKEAKAEELQEAKEKLASLEREASVKRNQTREFDGTEVLKGDEFKRYVNKLRSKSTVFKKKHQIIAELKAEFGLLQRTEELLKQRHENIQQQLQTMEEKKGISGYSYTQEELERVSALKSEVDEMKGRTLDDMSEMVKKKLVSEKKSASVIKELRQLRQKYQELTQECDEKKSQYDSCAAGLESNRSKLEQEVRRLREECLQEESRYHYTNCMIKNLEVQLRRATDEMKAYISSDQQEKRKAIREQYTKNTAEQENLGKKLREKQKVIRESHGPNMKQAKMWRDLEQLMECKKQCFLKQQSQTSIGQVIQEGGEDRLIL

SEQ ID NO: 430 - DNA, 288 bp, Homo sapiens
atggaggagaaaaagggtatatctggatatagttacacccaagaagagctagaaagagtatctgcactgaagagtgaagttgatgaaatgaaaggacgaacattggatgatatgtctgaaatgctgcatagtgatccgtttgaccataagatttgcgaccaaaaaaaggattttatcaactatagcaccttcatctcaagagaccagcagctacctaagtacgtaggctctgcagccccttttcccactttggatgtgactttcacctttgagagccttgggtgtctg

SEQ ID NO: 431 - protein, 96 aa, Homo sapiens
MEEKKGISGYSYTQEELERVSALKSEVDEMKGRTLDDMSEMLHSDPFDHKICDQKKDFINYSTFISRDQQLPKYVGSAAPFPTLDVTFTFESLGCL

SEQ ID NO: 432 - DNA, 32735 bp, Mus musculus
  misc_feature (1)...(32735): n = A,T,C or G
caggcagctctgctgctgatgggagcgcccccgcctggctgatgaggttggtacacacaccatgtcatcatgtgtctctagccagcccaccagcgaccgggtggccccccaggatgagctgggaagtgggggtggcagccgggaaggccagaagccctgtgaggcactgcggggactctcatccttaagtatccacttgggcatggaatccttcatcgtggtcaccgagtgtgagccaggccggggtgtggacctcaacctggccagagaccagcctccggaggccgatggccaggaactccccctcgaagcctcggaccctgagtcccggtccccgctttctggtcgcaagatgtccctgcaggagccgtcccagggcgggccggcatccagcagcaacagcctggacatgaatggacgctgcatctgcccatccctgtcctactcaccagccagctccccacagtcctctccccggatgccccggcggcccacagtagagtcacaccacgtctccattaccggtttgcaggttcgttcgtgcgctgtggagtgagctgtggtggtggtggttggggtagagggggggatgaactgacggacagttagaggctgcggactgagtggaagtctcaaaagcagcaaagccaacgtcccttcacgtgttcactgtacaagcattagttcttcctctttgcttctgggaaaactttccacagtcagaccgggggtatctcctccaggctgacggcaaccttcatgcgcctttcccaatagccgctgaacagtttgtttcctttctttgcgagtgataggatctcgctctgcagccctggctggctttgaactttgcctgaccctctttcctcagactcttgaacgccgccgccgccgagataacaggtgtgtgcagccactcctggcattccaaactgctcaaaaaaataaaataaaataacatttcagattactttgcaagatctaggatttcatgtgagcaggttcattgcctgttcgagtgctctttttagttcagtttcctctccagcgtaatgattttgagatttatccgtgctgttggatacactcctggccccgatagctacagattcagccaatctggaaaatattcggaaggaagaaaaatgtgcgactatgagcctgtgcgggctatttttttttttctcgtcattaaatgataatttaagtagtagggtagagtgacttaaataatagtgacattgtattaagtatataggtggcttggaaatgatttaaagtgtgtgtgtgtgtgtgtgtgtgtgtgtgtgtgtgtgtgtgtgtgtgtgtggcaggggagcagctcagtggaagaggcatggctgctcttgcagaggacccaagtattgttcctagcacccgcacggaggcttactcctccctttaacttcaactccggaggatccgatgacgctgttttctgacccgaagggacatgtgacacagacaaacacaagcacagataaaataaaagagttaagatctgagggaagaggaccgggtatgatgtcatctcaggattcaggaggcagaggccagaggatcattgcaggttcaaagccagcttagttgatacagtgagctccaggccagaagggctgcctcaatttcctagtgcagaaatgtatgtgagaggggctgtataaagggactatatggggacagtgctatgccttcctctctgagcaactggggctcttcatgctcagtgtctgcagggttctgcagcccgccctgcccctgcagacaccgagggacatgtgtactagtggttgatgtatttcacttactatttaaactgtttttttgtttgtttgtttgtttgtttttgagacaagatgtcattgtctccttgctgccgtcacaacatcacattcaccagcctctgcctcctaagggctaggatgacagcacgtgccaaagggctttgcagttcttggttcctttttctactgaaacagtttcgtttctcttgggtcgccctgaaaacaggacgctgggtcccatgggatgcaaatgttaagaatctgctggtggagctgggcgtggtggcacacgccttttaatcccagcacttaggaggcagaggcaggtggatttctgagttcgaggccagcctggtctacagaatgagttccaggacagccagggctacacagagaaaccctgtctcgaaaaaccaaaacaaacaaacaaataaacaaacaagaatctgctggtgttctcgagctgtggctgattggtagaatgcctgcttagcatgtccagagccccgagttcaacccctatcacttcatggcgatgtacttctttagtcccaggagatgaggcaggtggacctacagttcaagctcaccctccaccgagtgtcacacttttctttttttaaaaaaaagatttatttattttatgtatatgagtacactattgctctcttcagacacaccagaagggggcattggatcccattacagatggttgtgagccaccatatggttgctgggaattaaactcagcagtcagtgctcttaacctctgagccatctttccagcctgagtatcaggcttttcttaaagggtatcttttatttattctttggcaattcccatacatgccaatattgtatcttaatcatatcctctcccctcccacactttccatgcatgctaatccagacccccttccttcctctctctctttctctctctctctctctccctccctctctctctctctctctctctctctctctctcctctctctttctctcttgcggggagataactgcctttggagatattaactgatcttgtgcaggtgaccgtagttgcggtgagctcatgaatgtagccagtggtcatgtcatatccttgcctttcaccgccttcttccctgtcctctacctcgggctgttgacctctgtctccctttgagatattctctgagccgaatactcaccggtcacttattctcagcccttgggaccagctctgagtctctgtattaccagctgcagagagacacttctctggtcaagtttgagggcagctctaaactttgtgagtaaacatagatattagaaggcggtctgacaacatgccatttagcaaaacaacagcagtaggtttccttgttgggcctgtgaccttcacagctgagagagctatcagtcagtctcacagtgccaagcttgaatcccctcgggtggagcaggcctcagaaccaatcagaaagcccgggcttccttcgtaacctctgtaccgtatcgtatcgcctggcacagtgggtcagggttatcgcatgcagggttggctgctgggtgacaccgtgatgatttccctccccagtggcctccctggccccttcaggcactaggaaaattagccgacagggaggaagttgtagcttggtttctctgtatctttagctaaagtatgtagtgtgttttcagtagtagttttaccatctacttatgggaacccaagagcagtggtaatgacctatgttgtcttgggggtctctgggacatctctgacctgtaactgataaaagggggtagcactgagatttttatcagtaacccacaacttttgtgctaagtattatccaccatgcaaggctacttgtgtttaaactttatttatttatttatttgtttgtttgtttgttttgttttttcgagacagggtttctctgtatagctctggctgtcctggaactcactctgtagaccaggctggcctcgaactcagaaatccacctgcctctgcctcccaagtgctgggatcaaaggcgtgcgccactactgcctggctcttgattctaactatattatatttttctgtctgacctaaactgtctccttaaactttctattaactaccctaacttcctaaaagtaattaaatcaaatcaagaattccataacgttattaattcatctaaaactgttatttttatgaaagttcattgtcatgttgatctgtaggaaaattgcccaatagagcaggctctcacccaggaagtaatcacaccaggctatgggcagtgagctctccccatgatcatcacaccaggccagatatatgaggactgtagctgtgacaaacatgagaagagaaggcacagcagcagcaagaagtcctggggcaaagcgcctggggctgtgtctctccaacgtacacccatcacagctgagcaaaacgcaggccatctccaggaagctcacttgcccactgcagctgctcctgcatggtctctgccaatgtggtgtgtgtgtgtgtgtgtgtgtgagtgagtgtgtgtgtgtgtgtgtgtatgtgtgtgtgagtgtgtgtgtttgtgtgtatgtatgtgtgtgtaacttcaaaagtctcgtctgtctcagaagaggcctcctccacagaggggtcagacctacatcttattttcttttcttttttttaagatttattgatatacataggtacannnnnnnnnnnnnnnnnnnnnnnnnnnnnnnnnnnnnnnnnnnnnnnnnnnnnnnnnnnnnnnnnnnnnnnnnnnnnnnnnnnnnnnnnnnnnnnnnnnnnnnnnnnnnnnnnnnnnnnnnnnnnnnnnnnnnnnnnnnnnnnnnnnnnnnnnnnnnnnnnnnnnnnnnnnnnnnnnnnnnnnnnnnnnnnnnnnnnnnnnnnnnnnnnnnnnnnnnnnnnnnnnnnnnnnnnnnnnnnnnnnnnnnnnnnnnnnnnnnnnnnnnnnnnnnnnnnnnnnnnnnnnnnnnnnnnnnnnnnnnnnnnnnnnnnnnnnnnnnnnnnnnnnnnnnnnnnnnnnnnnnnnnnnnnnnnnnnnnnnnnnnnnnnnnnnnnnnnnnnnnnnnnnnnnnnnnnnnnnnntgtttgtgtgtgagtgtgtgtatgtatgtgtgtgtgtgtttgtgtgagtgagtgtgtgtgagtgtgtgtatgtatgtgtgtgagtgtgtgtgtgtttgtgtgagtaagtgtgtgtgagtgtgtgtgtgtgtgttgtgaattgtttgcttcagctcaggcacttttttgagatggtctcatggagcctagactgacttcaagctcaccttgtagctgaggatgattttgaactcctgatctccctgcctcaccacctgtctctctttctccagcacagcacttcagctgtgtgacccagagtggagcgaggttgcagctttagtggtaatgtgtctctctagcacgcacaagactcagagtgtgagctttagtgcccaccctccataataataaaaatagtatctactctctttgtatgttggtgttatgtatgtgtgttcacatttgcacaggtccacatgtttatgaatgtgtgtggagtggagaccagagatcagcctgtcgtgaggttacagacgagagcagagccatcttgcttttataaaacagtttcttgctggacctagagtctgttgattagactggctggccagtgtgcccagggatcctccaatctctgcctttccactgctgggatagcaggtgtatgtccctctacctgcctttttgtgtagggtcccaggatcgtaccaggtcctcttgcttgtgtggcagacagttcatcacctgagccatctcccattcacaatatgtactcttttggtggggggctggggagggcagggaagttgggttgctctttgattttgcagtcgttatgatcttggtgagattcgtctcatttgtgctcctccttgttttccaggactgcgtgcagctgaatcagtacaccctgaaggatgaaattggaaaggtaaatgtcccaggagctctgccacctttgtaccttgaccagggatgtccctgacaccctggacagtagggttgggatgagagggaccttggaggcaaggctggtagggtgatgaaagggttttgccagtaatagtcgtgggtgggtggggtaaaggtttatgacagatgtcttttctcagtgcctctctaccttattcttggagacatggtctcccactgaacctgaagctcagagattctgcaagactaactggccagcaagccctagctagttgttgttgcccacccccacccagcactgagattacaggtgggcgctaccacacatagctttctatgttggtgctagggatttgaactcctatctttatgctcgtgtggccagcgttttacctaatgagccatctcaccaacccttctttcaaaaaaattaccttttgagatagggtctcactatgtagtcctgactagtctaggactcactctgtagaccaggatggcctcagactcacagagatctacctgcctctgccttccaagagccaggactgaaagtgtgtagcaccacgcctttttaaatttataatgttaaaattagatgggtttctgcagttcagaaaacttccggagaattcctatgttaccatggagattgattgtccccatcacattaatggggctccccttcccccatctgtttttgttagtatcattgcagggtctaaaatctcaaacactaacagaaggtaagttagtagcatccctggcctaagtatgttaagtataagaccatgaaggagtggtgaggactgaagctaactggcgtgagatcccatgagtgatgccataggtatgagacctgagtgttattgcaggatatttgaatgtaagaacccagagattgtgctatttcctggggaaaaaaaagtttttctagttgtggtgtggctgaaaacattctaggcctagagaagattgtacagaggccagaagcttccaggcctaggcctaagttagcagacggaggcagtggccaatatttacaacaggtgtataaaagttacttttatagggtggagtgaggaggtctgtgataaactgcttttgtatggaaataaaatctatgtttgggagattttccaggttttttaaaacctgggtttttatgttagttcttcccatttaaatgttagcagctaatttagattataaaaatgggaagtcttaacagaatgcagtctcagagtacatttgcccagtgagcctgtagcctgccagagtcctcatctcccagagcatggcttttgctagtacatcacatgcgtttctttatccagggctcctatggtgttgtcaagctggcctacaatgaaaatgacaatacttattacgtgagtatcaccatcccatctaaagaaaagcctctttctcagcactcagctcccagcactcagctctagcactcagctcccagcactcagctctagcactcagctcctagcattcagctcccagcactcagttcccagcactcagctccaatcaaggtttgggtattttttctcccatcctactcttagatagttttggaggaagccacacccccattttacagatggtctagcgtctttctttttttgggggtgggggtagtgatttcgagacagggtttctctgtatagccctggctgtcctggaactcactttgtagaccaggctgacctcgaactcagaaatctgcctgcctctgcctcccgagtgctgggatcaaaggcatgcgccaccacgcccggctgcctagtgtcttttatacccttgctccgagctgcccttcctgcctattccacattccccaaacaaggcaataggtggccatagtgcccttatagctgaggctcttgagtcagtgcagtgtaggttcgaacctttcgcatgtactaacaatgtgactttgggcatggagccatcattcccttccttggcccgttgctccagctctggctccctgactgacccagtggcatgagtcctgagctcagaggttcccagctggttctgctgacagggaaccttgggagtactccagggttggcactggcacaactccaggactcacgtcttcacataggccagtagcagtgtgctcctgctggcgacacaggctctcactaccttgtcctgaggtgctaagggcttgggagctcagtgagaggcttggagaggagagaacctgcgtctccctccttccacctttaaccggactgggggtgggggtggggggtctgttcttctgcaggcaatgaaagtgctgtccaaaaagaagctgatccgacaggctggcttcccacgtgagttttgtgcacctttgttctaaggtgtggggaccgagccaggggtgtgtgatggccagcagagggactccgggaaggcaccgtatccacacagggcttctcctgagagcagtgttcagcttcctgctgtgggtcctaatttgttttttatttaaaagctgagttcgggggctggagagatggctcagcagtaaaggcacttgcgccaagactcacgacctgagtttgacccctaggcccgggacaagggtagacataacccactcctacaagttaacctctgaccttcccatgccagaataaagaaagaatcaaaaagctgaatgtggagttagcagtgtctttgtttcttttcctggtgtcctgatcaaagactgacaaaaccaactgaaggatgaaatcttttactttggctcctatttgagagttcagagaggagctgtttacattgtatccaccgtcaggaagcagagaggaatgagtgcttgtgcttagcacccttctctgcttatgtactccaggattcctggctagggaatggtgccacccacagtgggcaagtcttcccacctcaattagtgcaacagtgggaatcctccagatgccatctctcaggtgattgtagattctttctagttaccaatattaattgtcaccacttaggacccagcaacttttctctagtatccaagagaatgaaaaacacacaaagcttatctatgcgtgtggctagaaacactattcacaacatctgtcatacgggaacaactctagtggcctaatgagtaagtgaaatgtgtatgcatatggtggattaatatgcagccatatttcttattattactcgagtggaagcatgttaagtgaaagaagccagacacaaaaagtcactcactgtataatgccatttatataatttatataagtagattagcgggaggaagaatcagaattttggaaagagcaacaaaatgttctgtactcacctggtggtgatggtggtacctaaaaactaccacaatgatcagcgtgcatggaactcaagcctgtaatcctagcgtcagaaatacaaggcttgccaccctcttgcataaaaccacatacatgaagtagaagaataatttaaagaaatgagccactaaaacacatttaaaatgttgaattttttaaaaaaaaataaatattgggcctggcatggtggtacccttggcaggcagaagcagggtggggggggggtgtctgtgagttcaaggccagcttggcctacatagtaatctccagtttggcaatagttacctcaaaagtaagatagtaacaggggctggagagatggcggttaagagcactgactactcttctgaaggtcctgagttcaaatcccagcaaccacatggtggctcataaccacccgtaatgagatctgacaccctcttctggtgcatctgaagacagctacagtgtacttacatataataataaataaataaatcttaaaaaaaaaaaaagatagtaacggcccagaagatagctcagtggatggcaacacttgcctcaaaagtaagatagtaacagggcgggcccaaggagatagctcagtgggtaaagtgctggccctttaagtgtgaaggtggagtttggattcccagagctcacagccagcgagcctcactgttgctggaacacataaagccgggctgcaggtgggtgtgacagccacctgtaatcccagccaccacacagcttgtcctcacttttgtttttgaggccatccaatccgggctagcctcagacctacggatcctcctgacgggtggcaggtgtgctcctcctgtctcccatggtcacttcccgagccgaggcttacgtcagcccctttccttgcacacccttttcagcagctgaagctgcccgtcttccttgcccaggcttggccacagctgcatcctgtcctgccaatactgacatcttcgcacgggatgtgtgatgtcacggttttaacggttggtcttcaagttctcacatttcgacggagtagtaatgaacgctccatcctggcacagccggctctctttttctctctcattgacgtctttttgtttcctctccttggctttttggtgcacctgtaccatttctgtgcacggaggagagggataataatgtttgtgtccattttatccagtggggaatctaagccccaaagggaagtgattgattcacactaggtttcctttggttttgtttgtttgtttggttggttggtttggtttgccgtttgtagtttttctttttctttttagacagcatctcatgtacctcagactggccttctacttactttgtagtcaaggatggccttgaacttctgatcttcctctctctaccttccaagtaccaagagtttaggggtgcatcacaccctgttttatgcagtgctgggatccatcccaggacgtcgtgcctgctaggcaagcgctctacctgctgagctacactgcagccacttccctgggatgttgagggagctgaactggaccagtatccttagtgagctgctgtcactttggttgggcatgtgacaggaaaaggggatttacagtatgaacaagaggcctggggaatcccacctccctgacttccagtagcagggaattgtcaagagaaagctgtgtgaggctcccgggagtcctttgcccttccgttgtcccattagcagatgccctcggcggtagaaggtctctgccctaattccttgtgcttcctgcaggtcgccccccaccacgaggagctcgcccagccccagggggctgcatccagcccaggggccccatcgagcaagtgtaccaggagattgctatcctcaaaaagctggatcatcccaacgtggtgaagctggtagaggtgaggagggaggggaggcagggctgatggtctagccatctctttggtaagagaccctcattgctaggattccttgagtcctaggctgaggaatttgctgccttacatagtattgcttcctcaagactgcctttcgcccccattttacagatgcaaaagttgaggctgagagctccgaggcttgccctttacctacttctcctcctctctctctctcttttggtttttcaagacagggtttctctgtgtagccctggctgtcctggaactcactctgtagaccaggctgacctcgaactcagaaggcctgccactgcctcccgagtgctgggattaaaggcatgcgccatcaccgtccagctacttctttctctttgaagttggttgtttttctactagacatgcagatagttggagcacagaagtagcgacacatacaaatcagtgaagtcctgtgagataactcagtgggcaaaggcacttggctcctcataatagaagcccaatgagttgagtttgatccttagaacccacataaaggcatagtgcatataagcacacaagataccaataacaacaacttaaaaccccccaaacaatagtgcagggtacagtcgtacacacatttaatcccagcactcacaaggcagagggagttggagctctgtgaatctgaggtcggcctagtagatataatagattccaggccagccggggctacagagcaagagcttgcctcaaaaacaaacaaatcagtatggaagcatgactgtgctccagtgagcctccgtttataaacactggaggagctgggttcagaacgcacaatatttagccaacctttgcttcagctatagcaattctcatggttttttgagttttttttttttttttcttgtctcaagatgacttgtgcttttaaacatttagtcattgtaacaaatacttagaagaacaacttaacacaaagattgatcctggcccaaggctgtttgcagatggtgttcagctggtttcattgggtcgagtctgaggctaagcagaagcctggtaggggggtgccgggtgggggtgttgggggtgggggcagtgcctgcagcctgcgaaagtgtcagggggaagttgccgctaaggctcatgccttttgaatttacggagttgtgccactaccctggactaacgaacgaacggtatgccagctgggggactgggccttccacacaggatcctgtagggatgtagggaacgcatcgtttctaacctcaacagagctcactgcactgctgccgcagagctcactccgctgcgctcatattggttacatttattcctgtgcatcccattaaactttaaaccagtgctagacacacctgcttcccgatgctcggtcagcctgggttccccagcaggcctggctcaaacaagcaacccccaatcaaaaccacaaatagacagaattttatttgtttgtttgcttttttttgtttgtttttcgagacagggtttctctgtatagccctgtcctggaactcactctgtagaccaggctggccttgaactcagaaatccgcctgcctctgcctcccgagtgctgggattaaaggcgtgcgccaccatgcccggcttggacagaattttaaattctttgttaattgaaaaacagtaactctgttatacatgattaagtgtaattttttttttaatgaaaaacaaccttgcgtgtgcgtgtgcataggtgagtgcacgtgtatgtacatacttacagagaactgtagtcagtcttgggtgtcattcctcaggaagcgctgtccttttttgggacagggtctcttacagacctagagctcaccaactaggcaaggctgtctgggcagcagcccccagggatccacctgactgtcccctcagcactgggattgtaagcctgccctatgccaccatgctccactttttaaaagagatttattattgaacttttaatcatgtctgtatgatggggtgcacacatgccgatgcctgagacatccgatcccctaggacaggtggttgtgagctgtgatttgagctccagtttgtgcttcccccacccccactgtggaggcggggtttccttgaatatccctggctgtcctggaactccctctgtaaaccaggttggcctccaactcacagagacccacttgcctctgcctctgcctcccaatattgccattccttgcctggagaccctggccacagaactctatatgggtcctgggtctaacttgtcctcacaggagcgctcaaagttccagatggaatgcccacgtatacctgcagtcctgagtatctggggtggctggcgaaggtgggtgaggtggaagagacaaacggcctagactagctggggttcctgcctgtgtccctctccccagaagacagggagtaagcagcaagcagttaccttttcctgatctcagtcctccattgctggagttggccatcttagcggaaaccctgggtagcatggtctgaggtagtactgagtcctagtgggatctcttttgtccccagtagctcgtgcatctgactcaactcagcaagaccacacgaccattctgttaatatatcagtgtttcagggttggctgagatggctcagcagttaagagcactgactgctcttccaaaggtcctgagttcaaatcccagcaactacatggtggctcacagccatctgtaatgagatctgatgccctcttctggtgtgtctgaagacaactacagtgtgcttatgtataataataaataaatcatagaaagatatatcagtgtttcttgggtacctattgtgtgctgggacagtattggacatcaccaagatagtcaaagtggacaagcttgagacctgcccattggagagaggcaggaacaggcatggcggcatgtcctggtagggttgggaggaatgggtttacttcttgagttcaggtagattttacgttttaccctgaaacctagggcatgtctcctaggagatgggctggattggcacccagatgtggggtgtttccgggaaggatttattcctcccgctgttcttctcttcagggtatccaaacattgaggacaggcctgagcttgaggataggtgatgcacttgccgtcatactctgggaatttctatcttgactgggaaaaagggtgggaagtgatccttcctgtgagtgggaagtactcctccctgagggtgggtagtctccccctgtgagtgggaagtgctccccctgtgagtgggaagtgctccccctgtgagtgaagtgctcctccctgagggtgggaagtgctcccactgtgagtgggaagtgctccttcctgtgggtgaagtgctcctctctgagggtaggaagtgctccccctgtgagtgggaagtgctccttcctgtgggtgggaagtgctccctcctgagggtgggaagtgctcccctatgagtgggaagtgctcctttctttgtgtgggaaatactccccctgtgaatgggaagtactccttcctgagggtggaaagtgctccccactgtaagcacaggccatcacacactcctacttcctcttgctcatatttgttctttctctccttgctcctgtccctgggtgactgtgccatcaggtcctggatgaccctaatgaggaccatctgtacatgggtaagattgcttccctccatccaccctgaagtagctgtgtctgccaatgcctaggtgtcctctctggatagctgtagccctggagccaccaaagacgggctcctctttcccggcccagccattccccaccatacctcacacatctggtttaaagcagggcatagcaaggagttcttgctggaacttttaacatttagatctcttatgtgttcatttgcagctctttattgagcacctactgtatactcagagctgttctaggcaccgaggatagcatgatcagaaagaggagacctttatagccgcaatcctagataggagaaatagtgtcaataattaaataaatgagaatttagatattttaagggtaattaattagggtgatgtcagggacagtggacagaccacctcacataggagatgagcgtctaacagctgattgtcaaagagttggccatgttaatctggggaagggcatctgggcagagggaggagcaggtagaaaagtccctaaggctttaaggacttaaaaaataaaaagcttggtgctggagaagtagggagaggggtcaggagtaagtacggtgagtttgggaagccgcttggggtgtttagagtgtgatgggacactcagacatctggatacaattcccacaccaaagcttaggtgtgtcatcagagactcctttataaatggtgaagacatcaaggatggtggcacacgcctttaattgcagcactcaggaggcagaagccaaggatctgtatttatgattagcagaccagcccccaggggctgcatagtgagaccctgtctcaaaaaggaaggggaaaaaattaaaaatgggtcaatttaaagaaaaacatgagtgtactcatatacttaaataattttttgtttgtttttttaaagatttattttatatatgtgagtatatcggattctattacaggtggttgtgagccaccatgtggttgctgggaattgaactcaggatctctggaagagcagacggtgctcttaaccactgagccatctcttctgcccctaaataaatcatttttttaaaaaagaaatttaaagaaaaacacaagaaaatatagcttagtgatagtatgcttgcctcagatgtacaaggtcttagtcctatgcccaagctccttgtgtgtgtgtgtgtgtgtgtgtgtgtgtgtgtggtatgtgagtctgtgtggtgtctgtgcctttgtgtgtctctgtgagtacatatatgtgtctgtgtgtttctgagtgtgtatgtgtgtctatgtggtgtgtgtgtgtgtctgtgtggtgtgtgtgtgtctctgagtgtgtgtgtgtctgtgtgtctctgtgtatatgtgtgtgatccattcctgaggctcaaactcagagcctaatgtatgccagttgatatagaccagcactatatcactaatctatgtcctgtgccttccttttagtttttgagacaggtgctcactgagttagctaggctagtcttaaactcactgtatagctccagctggctttgaatttgtaatcctcctgccttagcttcctaaatagcgggaattatagacctgcaacttcaggtataactttttcttggctattttgaatacaagaaataaaatccaagtagggcccaggggacagcagatgtccttttcctccttggtagcacttagtaacgctgagcagctgactgtgtgtctctgaagtcctcccgggcggagggatagataggagggaggtagagtcacagtgtctccgtatgacttatgatggcttcttccttctcttccccacagtgtttgagttggtgaaccaagggtgagtgtttgtctgctggacccaatgccaggcttctgcacttgaaagctgagcaaggggagctgggctcagagggagagagccagggctagctgcatctggtttcccttggttacacatgtgtcgccctttcaggcctgtaatggaagtgcnnnnnnnnnnnnnnnnnnnnnnnnnnnnnnnnnnnnnnnnnnnnnnnnnnnnnnnnnnnnnnnnnnnnnnnnnnnnnctttggagcagttagcatcacagccagtgggtaggagtggaaagtatctcatttccctgctggagtaaagcaggagggtggggacacaggtctatgtgggctgcagatggggccatcttttggcagtagaagaccttctccctgctacagagacaactgtagaacattggcgtaatgtggatatatgggctcctacatatgacaacctcagtgtctttccgtaggagctctctatcttgttttaacattttcttctatttttatgatgagaataacctttttattagtagattgggggagattacagagactctgtttgggggtggttggggccagtgtctttcattggcctggagctcgcaagctggccggtcagcaaggcctcgtgatccgctcatctccccttccccatcagtgggatggcgtgtgcacaccatgctcagctggtttttatttttgttttttttttcctccaaatgggtgctggggacctatctcagatctcatgcctgtgagcactttgctgaccgagctatcaccccagcccactggtgacttttgagaacccagcccattctatgaagaccaggcatagcacggtctctgtcttagtcagggtttctattccctgcacagaacatcacaaccaagaagcaagttggggaggaaagggtttattcagcttatactttaaacattgctgttcatcaccaaaggaagtcaggactggacctcaagcaggtcaggaagcaggagctgatgcagaggccatggagggatattactggcttgcttcccctagcttgttcagtttgctttttttgtttgtttgtttgttttttgttttttgtttttttcgagacagggtttctctgtgtagctctggctgtcctagaactcactctatagaccaggctggcctcgaactcagaaatccgcctgcctctgcctccagagtgctgggatcaaaggtgtgcgccaccactcccagctcctttgctctttttacatcaccaagctcttcatcattaccctagatttggtgcttgggacttccagaccatagttttgcctgatgcttatatccactgagaagctaagtcccctgttctgcgttgtggttcatccttcacatgagcccactctggcttcgggggacttgctggccatgacaagtgtcagccattggtaaaggaagttatgtttgactctaggctgcgaccggcgattaaaaattgctataggcggttgatgtgttgagaatcgtgtaaaggtccttgcacacactttctccttgtctttcacagcgtgtttggggagggcacctggggcttaggacatgaggcatcagggacatgctgggctgcatggccaggtggagattttcacggggtctccctgccccgtctcctcctggtctcctctgtgtctagtgcattaccagaagatcatccatcgggacatcaaaccttccaacctcctggtgggggaagacgggcacatcaagattgccgacttcggtgtaagcaacgagttcaagggcagcgacgccttgctgtctaacaccgtgggcacacctgccttcatggcacccgagtcgctctcagagacccgcaagatcttctccggaaaggtaggtctgggtctgttgagttctgcctgtatcagcgtccttgagttctaagtgttaagagatacacgtttagcaagtccactgggtcatgtcgcccgtgaactgggacagcaggacccaggaactcacacaaggatcggatgggtgtcttcccccagctccattctcctgaactagttgccctgcacgtgagtcaggcactggtacctacaggctacttcccatcaagtaaccaacttcagtagcttttgctcactgaacagcgacagcaaagaaacttcaactatccactatggctgtggggagctgggctttcattggccatgctggtgtatcacgtcccaggcagcagagggaggaaggaggttttttttccacccccaagaaggtagattaagagaaggtggttgcgctagggagattgtagacttggttattggacctgcataaacaactgtctatcacagtgaggtctctttttcttgcaggcgttggatgtttgggccatgggtgtgacgctgtactgctttgtctttggccaggtaagaggatggcgtgtcctatcttctctgagggctgtgggtggctggttgccttgcaaggagacagttctcatttgcaaataacatctccgcagctgaatgaatagatttaaaaaaaaatagtctttgtaatagacatgtctctatgattttctcattcatacggaaatggttgaaagaaacagaagaatcaacagagtctatgaagattatagacacttgatgagtttagagcaaaaccacaacaaatataccacctctgtctgttcctggacccgagacagacatcattaatcaatcactgagttctcttcagctttacttagtactagtttgatgttcttttcatcggtgttccttactactattgccagggatagaatgggaatgggaattatggtttgtagggcattattgacttagggagtggttttgtttttgtttaattggtttatcaagacagagtttctctgtgtagccctggctctcctggaattcattctatagagaaagagccagccaggaagccctgagctggtggagttgaggctacagtggaaaggagttatcagtaaatgacaggttaggtgcccagctggggatggtgtggttggcaagaatgaggtgggtctactctgcagagggccgctcatgggtagctttggtcagacctgactggagagaacaagcagttgatggggagctcattccagggagaggacgatgtggattggctgtgtagtcacagaaagtcctgagccagggcaaaccctcataattgcatacacacagacacacacacatattcacacatatacacatactcacacacacacatacatacacacacatatacacacacatacacatacacacactcaaacacacatacacacacatacactcaaacacacatacatacacacacatattcacacatatacacatacacacactaaaacacacatacatacacacagacatacatatacacacactcacatacacatacacacaaatacacacatatacccccccacacacacccacacacattctcatacacacatacacttaatcacacatacaaacacacactcatagtcatatatacacactcataatcatacatacacacacatacacccacccacacatacatacacacacattctctgtctctctctctctcataaacacatataatcgcatatacaaacatacactcataatcatacacacacacacatacctacatgtgcaagagtgtgcacacatattactctcggcttctttattgctccctgggtaggtgggtggggaagagtttgcttttgcgtcagtgggaaattgaagctttgacacaaagcaggtcagtttcgtggttgatgaaggcttgagacattcctggtcctctactgatttgggggcggggtgaaggggaatagctcctcccacctccccagcctgggccactgctgttcatttctcggctgtgatccctgaagaataacagggggcactgaaggatacaggtggcaaccactgagcactgcactccccgctctctccgcagtgccctttcatggatgaacgaatcatgtgtttgcacagtaagatcaagagtcaggccctggagtttcccgaccagtaagtagtccctctctgctgattgcgccactttctgattccttagctgtcaggcttcttgagttttctgtgacctacctatgactgttgtcatccccaggcccgatatagccgaagacttgaaagatctgatcactcggatgttggacaaaaatccagagtccaggattgtggtgcctgaaatcaaggtacgtggctgccgctagctaagaaggcgagttcttgagacccgcgccctgtgcttggaaacgtttggctcagtcctctcctgcatcactgccctccacatcctggagcctctgggctgctgggtgctgctgcgggcagggaagagtgtggctggttatatccgctgtgatggaggaatgggacccgggacccatcagctgggctgcctgtgctttgctcccattggcttgtgctgatggtgtccgtccctccacgagtggtcttgggggccccctgtgtgctctatgctctgggcagctgaacctcaaatcttttcgtgtccctgtcgaagatgtgggctggctccctgaggaactgcagaatcaggggaagttagtgggcaggtcaacctttccctgctgattctaccctggagtagaaagtactaacaacagagaccttgcccaccaccctgtacacccctgtcgatgccaagtacacacatctggccctttaaaaataaaaaaatctcaagatggggcttggaatgtcactcagttgatagaacagttggctggcatgtgtgaagcccaggactctagtctctaataccttataaactgggcattgtgatgcatgcctatagtcacagtgcctgggggtgggaggtggaggcaggatcaaagtttaaggttgtctttggctacatagtaagtcaggggccactatgagatgtgtgagaccatgtctttaaagatttgtttgtttgtttgtttaatgtatatgagaacacactgtagctgtacagatggttgtgagccttcaggtggttgttgggaattgaatttaggacctctgctcgctccagtcaaccctgctagctcagtccccgctcgctccagctcaaagatttatttatttttatatgtgagtacactgtagctgtcttcagacgcaccagaaaagggtgtcagatctcattacgggtggttgtgagccaccatgtggttgctgggatttgaactcaggatcttcagaagagcagtcaatgttcttacccactgagccatctcactagcctgagactctttcaaaaagaaagaaatctcaggcatgctcccgggcttctgaggtgcctggctcacttgaactgcacaggtgtctttaagagggtccaaaagtcacacagataaggacttggaccccagagagggggcctgggtccccttgtgagtgtgttcttccatctggacctaccgtgattctttgtttccttttcggtggactgggaaaacacgagtattcagagcagaacctatgttgataggttgagtttctggggatcagtggatactcctggggcagtggggcaaagttgatgccaaattctggtggttcctttcgtgatcggggggctagatggagaactgtctctgcacacatcacagctcggtggcatctcccattctctgtctctgctttttctcatctcctcccatctcactcacccacctctatgcctggatcactagttcttctgcatgccagaccccaggccctggcctctccctcctgcatgccctccctggctctgctcactggcaggaccttgcgggtgaccagcggcacctgtcccttacccttcctgtcattcgttgaagctgcacccttgggttacgaggcacggggccgagccattgccgtcggaggacgagaactgcacactggtcgaggtgaccgaagaggaggtcgagaattcagtcaaacacattcccagcctggcaactgtggtaaggcgggcaggtccattgaccaagaacaagaacagagagagcccgaggcagggctagacactggccagatgcccgggaagcaagcagatgtgggatctttgtcagcatcatgttgggggctactcctgacccataggcacccactggactaggtaaccctggagctccagtatttctgtagagctggccagccccctgcaggcatcatactgctttttaggattcctgctttcagagcacattaggggagaggggccgagaagatgaggacaagcaggctagagtcagcaatcgcctggagtccaagtgtccaaggtggagttcccagctggtgaggtttttggtctccagagcaactaacttggcatgtctcatgtctcctatgtgggaggttctcagggccagcagctcccaccccacactgcagaccgggtgcgacacagggttttgccgggggtgggggtgagggggtgggacactgggctcctttttgtggccttgaatctgggttctcgccctgggaaaacaaagctcagagttgtcatcaggcttcacctaggagactgtaggagctaccccactgccaaccccttaggagggtttctgggaggcccaggggttcaggctctaagcacctatagccttcttagacacccagattatgtttggccatcctgcgccccaggcccagccccaggagactagcaggccctgggctctgcaaagcaagcgttgcggctcagaggcccctttgggaatcggcgagttggctcctgctctcttctttgcttacctgctctctctggcttaccccacactgactcttgcctccttctggacttgagctccagggctgggcagtcatccctgtttcttcttctgcctgggactctgcatgaccacacccactcacctgacctagtccactcctcccccccactcacccgtcctgtgcctgtggtgggagaggaagtgggtccgacgccatgccactgtgggtgggtctattcccccccaccacgcacacactctgggggtctgcagtaggtatttgtcgttggagaaaggcttcttgaaccatttttaagtggttcttcagggaagggaacaaccgtgagtacaacacgtgttctctgccttccttggaaggcagatggtcacaccaaggagaacgtgtctggtacaacagatgggctatagggacactaggtcctacagtgggtcaaaagggccttctcttaagaagtggataaagggactggagagtgggcttggtgactgagagcatctgctgttcttgcagaggacccagcttagagtctcagcacccacagctcacggctgtctggaaccccacttccaggggatctgaagcctcttccggtctttgcaggcaccagaaatacaactgctgtgcacacgcacgcacacacacgtacactcaggcaaaccactcaatcatgaaatataaaaaatagaagaaaagaaaaaaaaaaagaaatggatgaatgcagaaaggcggggtgttgtaacctgctgagcaggggacagagagacagctgaacaaggaggaacaagacaggcaatgttgaacaagaaacttccagaaaacgcacactgctgaaggatcaggaaagtagaggttccaggagcacaggaagagcctgcagggttggggtcaggcgaactggggcagcgaggggtagcaggtgctaggaggtgtctgcgggtaggtatgaggtctagccttctctatgtacctgtaactcaggaaatactgagtgcctgtcacgtgccaggcttgagatgacagaggtgagctgacatctgttcttgaggctccaacctcataggaaagagggacccagggcacaaccttcccgtgggatcagaggcaggagcggaggctgacagggagggacacctcccagagtgaagttgctggttctcgtagctgtgctgggaagtgttatgctacctgggtgtgtgtggcttttactctgttcattggcaattgggacacttagagcatggtcatcatctccctgctgagctgtcttcagactatcacgagaaaccccagtcccgttctctcccgacctcgttgtaggagccactgctccactttccctgttgatctgtgctggatgtttgctatcattgggatcctgtacggtggcctttttgtgtctgacttttactagtgccacatttccaaggagcacctatgttgtggcgatattggtgcttcattcctttggtgaccgaatattctactctacagacatgccaccatctttacgctttccagcagatggacatttgaatatttcgaccttttttgtcaatcagtgcttcttctccttacgtttggaaatgtttaaagttgcagttactcgtgtgtgcatatgtgattgtacatggatgaacacctgtgcacacatggagaccagaagagggcattcaggtccctaggagctggagtcacagacatgctagggatgccacacaagcccaacagcctgagtttggaacctcagagcccatgtaaaaagtcagagttatcttagaactccctgaccaggagacatgaggcagataagagaaccatctagaaacacccttgccagctagcagtgaaaagctagagagaccctctctcaaacaaggtggaaggagagaccttcacagcaggggttgccctctgacctccacacgtgcatgcgcaccaccaccaccaccaccaccaccactaccacccataaaagatatcaaaatgtttttaggggctggaaagctggcttagcagttgaaagcactggctgctcctccttcccggttcaattcccagcacccacatagtagctcacagctctgagcaactctggttccaggggattcaatactttcttctggcttctgtaggcaccaggcatgcatgtgatgcacagactaaaaccctttttaggggctggagagatagctcagtggttaaggacacttactgctcttgcagaggaccccagcaccctggcagctcacatctatccacaacttcatttccatgtggatcagcaccctcttctcacacacaggcgtgtacacagcgtacacacatacatgcatccaggggtgtacacagtgcacatacattcgtacaggcgaggcattcatatacttaaaatttttaattaaagctgggcgtgatggcatgcgcctttaatcccagcacttgggaggcagaggcaggcggatttctgagttcgaggccagcctggtctacagagtgagttccaggacagccagggctatacagagaaaccctgtctcaaaaagaaaacaaaaaagaattttttttttaaattaagaaacagacacaaaaggccagtgaacattacattctagcgagtgcccagactgggtaaatccacacagacaggaagattcgaggttgccaagggctgtaggggaaaggatacaggcatggggatttttccttagggtaatataaatctgaaaccagatcaatgaaataaacccattcagttgcatatagttggttttcacatcataaacgcaaccaaccactggtcaaaaatacatgccgggcggtggtgccgcacacctttaatcccagcacttgggaggcagaggcaggcagatttctgagttcgaggccagcctggtctacaaagtgagttccaggacagccagggctacacagagaaaccttgtcttgaaaaaccacaaacaaacaaacatgaaaatggaaaattgtgtttgaaccgaacatgtaaacctggcttgttgtcttgccctaactgatagggtctaaatattaactgtttatatagtgttcggtgttatgttagagatggtttaaagtaaacccgggaatatgcaaaagttaaatacagacactgaactccgtgtaaggggtttgagcatccatagactttggtaggctcagaggttcggaactcttatgatggtaaatttatctgtgtgaatccaatctcagttttgaacacacatcatctcttccccaagaattaccatgagctgggcagtggtggcgcacgcctttaatcccagcacttggggggggggcaggcggatttctgagttcgaggccagcctggtctacagagtgagttccaggacagccagggctatagagaaaccctgtctggggagaaaaaaaaaagaaagaaaagaattaccatgatataacagcttgtttcttgttggagtggggtagggtggtctcaagtgacttccagcaatagaccacagggcctcgaggctgggtagactggaactgggttatgacaaagcacatgttagagccaggagcctggaccttaggggagccagggagtgagctgcaggaagcaagctgcccctaggttcagggtggctctggctggcagctcctgggtaggaagggcctgccagaatcatgagctctgggagctggccgggaccagagaggagaagatggtccgtcgagtctcctcctgtggcccagccatcactgctatcctcctcctccttcctcagatcctggtaaagaccatgattcgaaagcgctcattcgggaacccgttcgaaggtagccgccgggaggaacgttccctgtcagcgcctggaaacctgctcacgtgagtgacccccatcttccttccagtgttgggaaggggtactagaagctaagccctgggccatcccaggagagacacactggctttgctattgtgccttcctcacctcagccagcatccatctatggacagtgttacccaccctgaagttccaccttcctctgaggacttactctttcactggggcgtctctgggttgtagcactcagtggccacagaaacacgggatggtttcactctgggccctttctatgtaaacacaccgttttatgtccgttcacctcaaaacgaccacctcagtacaggctgtctggaagatgcaagggtctgctgtctagccttctgggggacatccccagggtcccttctcatgtcccctttccctccctctggcaattccagcaaaaaaccaaccagggagtgggagcccttgtctgagcccaaggtaaacgcctgtctgcctgcctgtgccattgcctcccctccgctggggcctgggggcggtcagctgcagagcaagcacgtgggcatctccagcaggcaagacgtgccttcagccggggctgctgtgcctggctcactgagggcctctgggtttccagcgaggggcatccaggggcttgggtcccacggcgtgtcgtgcatgcgggctgggctgcggtgcatggcgctccacccggaatgcctgcgaacttacccaggttcttcaggcccactggatggatagctgcattgcccatgcatgtcaatggcgatgggagtctggtgttgctctgggggccgtgacctaagtacgcacacacagagcataggtcaggcctgctgtactctggggctcctcacgagggttcttctgaaactctagtgggttaaaagctagaagttatcttagcaggatctgggccatctcctgcctgcctgcatgtctaggcccatgtaacctacaacttctggagcagatgaatgtttttgcctctgtaatgttgggtggtaaccccactcccctgagagcctggattagggtagatatcccagtgtcctccttgataatattgccagactgtatcgggaactcctctcagccacttccattgttaaaactagcttaatggggaccagggagatcatttgttaaatgattgaggacttgagctcaatgccccagaacctatgtaaaatgccaggtgagggagcgtgaggtcccaggtaggtggtggcaggcaggttcctagaattcactgttgagcccagcttcgaagaacaaagtttttcctcggacagtaccccaggggaaattgcctcaagttgacctctggcctgcatacatgtgtgaatgtgaacacagacacacagtggccttgtcaaaggctggggctggtagctctttggtagagtgcgtgcaacaaagctgtgggtttcatcatccccagccctgcaaaacaaaggagaaggtcagcttggcagacacatgattttaacactccatagcccatcactctaaagtgtgcggtggagtctttctggccagcaagatagcttccgccccggagggaaccttcctcctcctctgagctgtgtctatgcacgtctcatttcctagcatccactgatgcccgtccagttttctacagatgtgtccgttctgccgggtttttgtaagtgggtgatacagtatgtggcctttcacttctggccattctctctctctctctctctctctctctctttctctctctctctctctctgacatgtcttcaaggcttgtccatagtgcagcttgtgccagcgcttcatgccttgttgtaactgatagtatttagctagatggcagtatttggatccattggtggacagtgtttctgtctaggctgtcacaaatgagcgaacttgctgtagtcctttgaatcaagtttctcttccttgggaattgcattatacgaggctgttcatcggccacctgtgccttaggagctcatgtgatataagaaagcacctgctgctgtttgggaagatgtgtctgaattagcagctagggagatggcctcctcatccccaccttgttcccgggtgacctgtagttcccatctctgtgttactgagaagtgaagcctttctctgagcaaaggcctgctgaaaccaaggcagcctctcaactggaccgtgaacgaacctgttcttgcttctttgtttattttcgatgaggttgaagtggcaatattccaacagactcagctcgcctcagtactgtacggctccttctttccttactcggtggacacagcatcgccttaggttacccgtgagggctgggaatttgtagggcctgtccgcaccagtcggcagctttgagggcagacatccttctctgaaattaaaaagaccagataatgtaattcccaaacgtaggtagttccttcttggggacgtgtggataccacagttcaccttccctgtgtagggacccagtcccctgtttgggtagagcacacagatcatggttgagagtggggacagtagccctgagtgacaaggccagtggcttttcccacgaagcagactcggctggaaggaagcctggggctgagcccactcctttaagctcccgatccgtctggtgaagccgcatccatggctggcacgccaggcaggtctagtggggttgtgagggcctcttcctagaagggggagatcttccttcccctcccaggagtcttcctgtgagcctagggtggtaggctggtgtggcaggcttttcctgaaggccccatgtacctgccgattcatacaaatccttgccactgtcccaggagttcacagtggagcaactgaggacaggtgtcacagtttgtgttctataagcactcctagcctagagggtagagagaggagagagcactgtagacctcagagaacataccccaccggaggaccttggggtgatttggggtgttccataggtcgcatgttctatagttttctgctctttcaggtaaatcttgcttctccatttacaggggaggcaaagtctttgaaatatttaagtgaacaagtaggaacggggagagcatcaaaaagatcagatgtaacccgtgggaatgtgggagcagaggcatgcaaaggtgggagtcggtcagggctccgccatcaattctccaagtcttaatgctggttttctgttcggcgagcaggaagcaaggcagcgaagacagcccccggggcccagagccggcccctgtgggggaggaggaagtgctcttgtgaaaggtggtccctgcgtggaaagttggggggctccggcccctggctccccaccacgcatgcctccactgcagcccgaggaggtgatggagccggagtagctgcgtggaccacctgacctcgcatgcctggctgtgtggccctgcacggggctgctgcaccctgcgtttccatagcagcatgtcctacggaaaccaagcacgtgtgtagagccttgactgtcgtctctggttatctgttttttttgtttttgttttttttgttgttgttgctgttgtttttcttgtggtttttctttttcttttttttctttccctttgttgtctaaggggacaaagaaaaaaaaaaggacttgactccatgtcgtcgactttggccgctggctggccggaccggcgggtgtgaggagttgcaaaccgaaaccaacatgcattttgggacaattgctttttaaaatgtttttaatgccaaaaacaaacaaacaaacaaaaacccgccccctccattgtgaattcagaaccatgtcagatgtaccaggtgaatgtgtgtggggtttgagctgcgtggagaatcacgtggggcgagtcctgccggctggggctacactgggggggggggggcggattagaaggatcggtgtgacccacgtacaaaccccatgcctgggcgccttccaggatcatggaaagacagggctagccctcagtagctgcagggaacttccatgtcatttatttgtaatgaggactttttaagtgtgtgtgtgtgttttttttaatgggtataattatagtcaggaaaactacaagggcttgcagttgaaatgctcgaggggtactttgcacccctgaatgcgagcattcctcagctgtggtggtagaggtctgtctggaggctgaacacacttcatgttagctgctccaactgggtttctgagattgtcagctaagctaattctctttgtaaattggcaaaaaaaaaaaaaaaaaaacaaccaaaaacaaaaaaaaaaaaaacccaacaacttcaggttggaatctgctctttcatgtacattacatggcttacagctcaagagatgtttccaagtctctgactagccagaactccggagaggttcacaagttccaaaggttggagcttccaggatgggtgtccctctgtgcggctgtgtgacagggaccgagagccggtgagacctgtgcctgtatattagcagctgcgtttgtttattgcctgtgtattctagagactgtaaactttctttccttttccagaatgtctggtcggtacaatgaaacatcagtttccctgtgggccacttaggcaagacttgtcactcagcttaggagcaaagctgtagtgtgatatcagtgacatcagggtgccattgtagagcaaagtgtcaaaccccagagtgttcctcagggcaaagggctttcgggtttttttttgttgttgttgttgttttttgtttttttcctgtagccagaaacctagagagccaataggaacctttttgactttcaaccaatattggaagtttggttgaagtttgggtgtgatgacccagggacacagaagcaaacaggaagttaaaggggggcttccagactggtttccagtgctttggtagtggctgtcttgccagtcagtcatggggcccagacaaccgacttctggcctgtgcggaggccaggccctcctggcttccttccgtatggtttgttaagctctttactgtggtctagccgctatccctgctgtcacataagcagttaggatccaggtacagactgcagtgtggggagggtctgtgtgaccaaggacttcctgtcacttttccctttttaaaattgaaggagaaacagcccagtagctccaccctttctggccacagatggcattccgttagtttgcaatagccaccttatggttaaagccaacaggtcatacagcttggtcccagctcgtctgcctggacgctgagcggcctgcccgagtagggtaggcgtgatacagagctctgcagaattcttgtgtttacacaacccctctgggcaatgccgtggtttctctcgacaggatgtcttaagattgtcggcaatcacgcagccaccagctgctcaggaagaaggaatcgagaggtctgcatgggtaactttttttcttaaagaaacaccaaagaaagctgtgga

SEQ ID NO: 433 - DNA, 3914 bp, Mus musculus
gctgctgatgggagcgcccccgcctggctgatgaggttggtacacacaccatgtcatcatgtgtctctagccagcccaccagcgaccgggtggccccccaggatgagctgggaagtgggggtggcagccgggaaggccagaagccctgtgaggcactgcggggactctcatccttaagtatccacttgggcatggaatccttcatcgtggtcaccgagtgtgagccaggccggggtgtggacctcaacctggccagagaccagcctccggaggccgatggccaggaactccccctcgaagcctcggaccctgagtcccggtccccgctttctggtcgcaagatgtccctgcaggagccgtcccagggcgggccggcatccagcagcaacagcctggacatgaatggacgctgcatctgcccatccctgtcctactcaccagccagctccccacagtcctctccccggatgccccggcggcccacagtagagtcacaccacgtctccattaccggtttgcaggactgcgtgcagctgaatcagtacaccctgaaggatgaaattggaaagggctcctatggtgttgtcaagctggcctacaatgaaaatgacaatacttattacgcaatgaaagtgctgtccaaaaagaagctgatccgacaggctggcttcccacgtcgccccccaccacgaggagctcgcccagccccagggggctgcatccagcccaggggccccatcgagcaagtgtaccaggagattgctatcctcaaaaagctggatcatcccaacgtggtgaagctggtagaggtcctggatgaccctaatgaggaccatctgtacatggaaatccgcctgcctctgcctccagagtgctgggatcaaaggtgtgcgccaccactcccagctcctttgctctttttacatcaccaagctcttcatcattaccctagatttgtgcattaccagaagatcatccatcgggacatcaaaccttccaacctcctggtgggggaagacgggcacatcaagattgccgacttcggtgtaagcaacgagttcaagggcagcgacgccttgctgtctaacaccgtgggcacacctgccttcatggcacccgagtcgctctcagagacccgcaagatcttctccggaaaggcgttggatgtttgggccatgggtgtgacgctgtactgctttgtctttggccagtgccctttcatggatgaacgaatcatgtgtttgcacagtaagatcaagagtcaggccctggagtttcccgaccagcccgatatagccgaagacttgaaagatctgatcactcggatgttggacaaaaatccagagtccaggattgtggtgcctgaaatcaagctgcacccttgggttacgaggcacggggccgagccattgccgtcggaggacgagaactgcacactggtcgaggtgaccgaagaggaggtcgagaattcagtcaaacacattcccagcctggcaactgtgatcctggtaaagaccatgattcgaaagcgctcattcgggaacccgttcgaaggtagccgccgggaggaacgttccctgtcagcgcctggaaacctgctcaccaaaaaaccaaccagggagtgggagcccttgtctgagcccaaggaagcaaggcagcgaagacagcccccggggcccagagccggcccctgtgggggaggaggaagtgctcttgtgaaaggtggtccctgcgtggaaagttggggggctccggcccctggctccccaccacgcatgcctccactgcagcccgaggaggtgatggagccggagtagctgcgtggaccacctgacctcgcatgcctggctgtgtggccctgcacggggctgctgcaccctgcgtttccatagcagcatgtcctacggaaaccaagcacgtgtgtagagccttgactgtcgtctctggttatctgttttttttgtttttgttttttttgttgttgttgctgttgtttttcttgtggtttttctttttcttttttttctttccctttgttgtctaaggggacaaagaaaaaaaaaaggacttgactccatgtcgtcgactttggccgctggctggccggaccggcgggtgtgaggagttgcaaaccgaaaccaacatgcattttgggacaattgctttttaaaatgtttttaatgccaaaaacaaacaaacaaacaaaaacccgccccctccattgtgaattcagaaccatgtcagatgtaccaggtgaatgtgtgtggggtttgagctgcgtggagaatcacgtggggcgagtcctgccggctggggctacactgggggggggggggcggattagaaggatcggtgtgacccacgtacaaaccccatgcctgggcgccttccaggatcatggaaagacagggctagccctcagtagctgcagggaacttccatgtcatttatttgtaatgaggactttttaagtgtgtgtgtgtgttttttttaatgggtataattatagtcaggaaaactacaagggcttgcagttgaaatgctcgaggggtactttgcacccctgaatgcgagcattcctcagctgtggtggtagaggtctgtctggaggctgaacacacttcatgttagctgctccaactgggtttctgagattgtcagctaagctaattctctttgtaaattggcaaaaaaaaaaaaaaaaaaacaaccaaaaacaaaaaaaaaaaaaacccaacaacttcaggttggaatctgctctttcatgtacattacatggcttacagctcaagagatgtttccaagtctctgactagccagaactccggagaggttcacaagttccaaaggttggagcttccaggatgggtgtccctctgtgcggctgtgtgacagggaccgagagccggtgagacctgtgcctgtatattagcagctgcgtttgtttattgcctgtgtattctagagactgtaaactttctttccttttccagaatgtctggtcggtacaatgaaacatcagtttccctgtgggccacttaggcaagacttgtcactcagcttaggagcaaagctgtagtgtgatatcagtgacatcagggtgccattgtagagcaaagtgtcaaaccccagagtgttcctcagggcaaagggctttcgggtttttttttgttgttgttgttgttttttgtttttttcctgtagccagaaacctagagagccaataggaacctttttgactttcaaccaatattggaagtttggttgaagtttgggtgtgatgacccagggacacagaagcaaacaggaagttaaaggggggcttccagactggtttccagtgctttggtagtggctgtcttgccagtcagtcatggggcccagacaaccgacttctggcctgtgcggaggccaggccctcctggcttccttccgtatggtttgttaagctctttactgtggtctagccgctatccctgctgtcacataagcagttaggatccaggtacagactgcagtgtggggagggtctgtgtgaccaaggacttcctgtcacttttccctttttaaaattgaaggagaaacagcccagtagctccaccctttctggccacagatggcattccgttagtttgcaatagccaccttatggttaaagccaacaggtcatacagcttggtcccagctcgtctgcctggacgctgagcggcctgcccgagtagggtaggcgtgatacagagctctgcagaattcttgtgtttacacaacccctctgggcaatgccgtggtttctctcgacaggatgtcttaagattgtcggcaatcacgcagccaccagctgctcaggaagaaggaatcgagaggtctgcatgggtaactttttttcttaaagaaacaccaaagaaagctgtgga

SEQ ID NO: 434 - protein, 602 aa, Mus musculus
WERPRLADEVGTHTMSSCVSSQPTSDRVAPQDELGSGGGSREGQKPCEALRGLSSLSIHLGMESFIVVTECEPGRGVDLNLARDQPPEADGQELPLEASDPESRSPLSGRKMSLQEPSQGGPASSSNSLDMNGRCICPSLSYSPASSPQSSPRMPRRPTVESHHVSITGLQDCVQLNQYTLKDEIGKGSYGVVKLAYNENDNTYYAMKVLSKKKLIRQAGFPRRPPPRGARPAPGGCIQPRGPIEQVYQEIAILKKLDHPNVVKLVEVLDDPNEDHLYMEIRLPLPPECWDQRCAPPLPAPLLFLHHQALHHYPRFVHYQKIIHRDIKPSNLLVGEDGHIKIADFGVSNEFKGSDALLSNTVGTPAFMAPESLSETRKIFSGKALDVWAMGVTLYCFVFGQCPFMDERIMCLHSKIKSQALEFPDQPDIAEDLKDLITRMLDKNPESRIVVPEIKLHPWVTRHGAEPLPSEDENCTLVEVTEEEVENSVKHIPSLATVILVKTMIRKRSFGNPFEGSRREERSLSAPGNLLTKKPTREWEPLSEPKEARQRRQPPGPRAGPCGGGGSALVKGGPCVESWGAPAPGSPPRMPPLQPEEVMEPE

SEQ ID NO: 435 - DNA, 3882 bp, Mus musculus
caggcagctctgctgctgatgggagcgcccccgcctggctgatgaggttggtacacacaccatgtcatcatgtgtctctagccagcccaccagcgaccgggtggccccccaggatgagctgggaagtgggggtggcagccgggaaggccagaagccctgtgaggcactgcggggactctcatccttaagtatccacttgggcatggaatccttcatcgtggtcaccgagtgtgagccaggccggggtgtggacctcaacctggccagagaccagcctccggaggccgatggccaggaactccccctcgaagcctcggaccctgagtcccggtccccgctttctggtcgcaagatgtccctgcaggagccgtcccagggcgggccggcatccagcagcaacagcctggacatgaatggacgctgcatctgcccatccctgtcctactcaccagccagctccccacagtcctctccccggatgccccggcggcccacagtagagtcacaccacgtctccattaccggtttgcaggactgcgtgcagctgaatcagtacaccctgaaggatgaaattggaaagggctcctatggtgttgtcaagctggcctacaatgaaaatgacaatacttattacgcaatgaaagtgctgtccaaaaagaagctgatccgacaggctggcttcccacgtcgccccccaccacgaggagctcgcccagccccagggggctgcatccagcccaggggccccatcgagcaagtgtaccaggagattgctatcctcaaaaagctggatcatcccaacgtggtgaagctggtagaggtcctggatgaccctaatgaggaccatctgtacatggaaatccgcctgcctctgcctccagagtgctgggatcaaaggtgtgcgccaccactcccagctcctttgctctttttacatcaccaagctcttcatcattaccctagatttgtgcattaccagaagatcatccatcgggacatcaaaccttccaacctcctggtgggggaagacgggcacatcaagattgccgacttcggtgtaagcaacgagttcaagggcagcgacgccttgctgtctaacaccgtgggcacacctgccttcatggcacccgagtcgctctcagagacccgcaagatcttctccggaaaggcgttggatgtttgggccatgggtgtgacgctgtactgctttgtctttggccagtgccctttcatggatgaacgaatcatgtgtttgcacagtaagatcaagagtcaggccctggagtttcccgaccagcccgatatagccgaagacttgaaagatctgatcactcggatgttggacaaaaatccagagtccaggattgtggtgcctgaaatcaagctgcacccttgggttacgaggcacggggccgagccattgccgtcggaggacgagaactgcacactggtcgaggtgaccgaagaggaggtcgagaattcagtcaaacacattcccagcctggcaactgtgatcctggtaaagaccatgattcgaaagcgctcattcgggaacccgttcgaaggtagccgccgggaggaacgttccctgtcagcgcctggaaacctgctcacgaagcaaggcagcgaagacagcccccggggcccagagccggcccctgtgggggaggaggaagtgctcttgtgaaaggtggtccctgcgtggaaagttggggggctccggcccctggctccccaccacgcatgcctccactgcagcccgaggaggtgatggagccggagtagctgcgtggaccacctgacctcgcatgcctggctgtgtggccctgcacggggctgctgcaccctgcgtttccatagcagcatgtcctacggaaaccaagcacgtgtgtagagccttgactgtcgtctctggttatctgttttttttgtttttgttttttttgttgttgttgctgttgtttttcttgtggtttttctttttcttttttttctttccctttgttgtctaaggggacaaagaaaaaaaaaaggacttgactccatgtcgtcgactttggccgctggctggccggaccggcgggtgtgaggagttgcaaaccgaaaccaacatgcattttgggacaattgctttttaaaatgtttttaatgccaaaaacaaacaaacaaacaaaaacccgccccctccattgtgaattcagaaccatgtcagatgtaccaggtgaatgtgtgtggggtttgagctgcgtggagaatcacgtggggcgagtcctgccggctggggctacactgggggggggggggcggattagaaggatcggtgtgacccacgtacaaaccccatgcctgggcgccttccaggatcatggaaagacagggctagccctcagtagctgcagggaacttccatgtcatttatttgtaatgaggactttttaagtgtgtgtgtgtgttttttttaatgggtataattatagtcaggaaaactacaagggcttgcagttgaaatgctcgaggggtactttgcacccctgaatgcgagcattcctcagctgtggtggtagaggtctgtctggaggctgaacacacttcatgttagctgctccaactgggtttctgagattgtcagctaagctaattctctttgtaaattggcaaaaaaaaaaaaaaaaaaacaaccaaaaacaaaaaaaaaaaaaacccaacaacttcaggttggaatctgctctttcatgtacattacatggcttacagctcaagagatgtttccaagtctctgactagccagaactccggagaggttcacaagttccaaaggttggagcttccaggatgggtgtccctctgtgcggctgtgtgacagggaccgagagccggtgagacctgtgcctgtatattagcagctgcgtttgtttattgcctgtgtattctagagactgtaaactttctttccttttccagaatgtctggtcggtacaatgaaacatcagtttccctgtgggccacttaggcaagacttgtcactcagcttaggagcaaagctgtagtgtgatatcagtgacatcagggtgccattgtagagcaaagtgtcaaaccccagagtgttcctcagggcaaagggctttcgggtttttttttgttgttgttgttgttttttgtttttttcctgtagccagaaacctagagagccaataggaacctttttgactttcaaccaatattggaagtttggttgaagtttgggtgtgatgacccagggacacagaagcaaacaggaagttaaaggggggcttccagactggtttccagtgctttggtagtggctgtcttgccagtcagtcatggggcccagacaaccgacttctggcctgtgcggaggccaggccctcctggcttccttccgtatggtttgttaagctctttactgtggtctagccgctatccctgctgtcacataagcagttaggatccaggtacagactgcagtgtggggagggtctgtgtgaccaaggacttcctgtcacttttccctttttaaaattgaaggagaaacagcccagtagctccaccctttctggccacagatggcattccgttagtttgcaatagccaccttatggttaaagccaacaggtcatacagcttggtcccagctcgtctgcctggacgctgagcggcctgcccgagtagggtaggcgtgatacagagctctgcagaattcttgtgtttacacaacccctctgggcaatgccgtggtttctctcgacaggatgtcttaagattgtcggcaatcacgcagccaccagctgctcaggaagaaggaatcgagaggtctgcatgggtaactttttttcttaaagaaacaccaaagaaagctgtgga

SEQ ID NO: 436 - protein, 555 aa, Mus musculus
WERPRLADEVGTHTMSSCVSSQPTSDRVAPQDELGSGGGSREGQKPCEALRGLSSLSIHLGMESFIVVTECEPGRGVDLNLARDQPPEADGQELPLEASDPESRSPLSGRKMSLQEPSQGGPASSSNSLDMNGRCICPSLSYSPASSPQSSPRMPRRPTVESHHVSITGLQDCVQLNQYTLKDEIGKGSYGVVKLAYNENDNTYYAMKVLSKKKLIRQAGFPRRPPPRGARPAPGGCIQPRGPIEQVYQEIAILKKLDHPNVVKLVEVLDDPNEDHLYMEIRLPLPPECWDQRCAPPLPAPLLFLHHQALHHYPRFVHYQKIIHRDIKPSNLLVGEDGHIKIADFGVSNEFKGSDALLSNTVGTPAFMAPESLSETRKIFSGKALDVWAMGVTLYCFVFGQCPFMDERIMCLHSKIKSQALEFPDQPDIAEDLKDLITRMLDKNPESRIVVPEIKLHPWVTRHGAEPLPSEDENCTLVEVTEEEVENSVKHIPSLATVILVKTMIRKRSFGNPFEGSRREERSLSAPGNLLTKQGSEDSPRGPEPAPVGEEEVLL

SEQ ID NO: 437 - DNA, 80950 bp, Homo sapiens
  misc_feature (1)...(80950): n = A,T,C or G
acgtgaagggttgagttaaatgtgtgtgttattttcccctttccgtcagctctggaggctgccatcgagaacctcaatgaagccaagaactattttgcaaaggttgactgcaaagagcgcatcagggacgtcgtttacttccaggccagactctaccataccctggggaagacccaggagaggaaccggtgtgcgatgctcttccggcagctgcatcaggagctgccctctcatggggtacccttgataaaccatctctagagaggacatccctgctgggctgctgtgcagagtataagattttggacttgttcatgtcccctctctccctataaatgatgtatttgtgacaccctatcttgtcaataaacagcattctgattagtttgtcttattttgttgctagtaactacgtatttgttttattccccttttcttcccttttggtagcaaaggacaccaactttttcttaataaatgggtattttgctaacaagttagtgcaagcatctcagattatgttctctctgggcaaaattgccaatatcttgattagaaattgtacacactccatcattatgtaaattcatttagcacctattctcagacaagagctcttcctggaattggtagatctctccagggtggtcagtgcaggtctgtatgaggcttggactttcttctgaggcctccctgccttgttggactgaaccagcgcttgtggttcctgtggctgctcacgaggacttgttggtccctgactggagattaagaaggaaaagattttttcataatttttggaccaatgaccaggagcatttttcagtccctttctagatgttggctttcttatatattctgcatgggcactttttttttctatatttaactctataaatgagggatgatgataaattacgtccaggaattcatcatgagtaaggtgattataaattaagggggccggctgcggtggctcacgcctgtaatcccagcagtttgggaggctgaggcgggtggatcatgaggtcaggagatggagaccagcctggccaacatggtgaaaccccatctctactaaaaaaaaaaatacaaaaattagctgggcatagtggtgcatgcctgtaatcccagctactcgggaggctggggcaggagaatcacttaaccnnnnnnnnnnnnnnnnnnnnnnnnnnnnnnnnnnnnnnnnnnnnnnnnnnnnnnnnnnnnnnnnnnnnnnnnnnnnnnnnnnnnnnnnnnnnnnnnnnnnnnnnnnnnnnnnnnnnnnnnnnnnnnnnnnnnnnnnnnnnnnnnnnnnnnnnnnnnnnnnnnnnnnnnnnnnnnnnnnnnnnnnnnnnnnnnnnnnnnnnnnnnnnnnnnnnnnnnnnnnnnnnnnnnnnnnnnnnnnnnnnnnnnnnnnnnnnnnnnnnnnnnnnnnnnnnnnnnnnnnnnnnnncccaggctggagtgcagtggcgtgatcttcgctcactgcaacatccacctgggttcaagggagtctcctgtctcagcctcccaagtagctgggactacaggcatgcaccaccacgcctggctaatttttggatttttagtagagatggggtttcaccatgttgaccaggttggtctcaaactcctgacctcaggtgattcacctgcctcagcctcccaaagtgctggaatcacaggcgtgagccaccgtgcctgccccaaatagtctttataaagcaacagggaaccaactaaattgtgcagctcctattattggttctttctctgttaaatttcccatcagaaagtttttctgatggggagtaatttctcttcagggctctttgaagcagtgtaaaacagttgtatccattacggtacatttgctggccaaagacagctgctctggaaacaagagacttggtggagagatagagactaattggtatgttgactgaaaatcttaaattcatttgaaaggttatatatagagatggtaaacattgaataatattaaaggctatgtagtaaaaagtaattcttcagcctgtaatcccagcactttgggaggctgagatgagtggatcacctgagattaggagcttgagaccagcctgtctaacatggtgaaaccccgtcgctactaaaaataaaaaaattagctgggcgtggtggcgggcgcctgtagtcccaactactcgggaggctgaggcaggagaatcgcttgaacctaggaggcagagtttgcagtgagccgagatcacgccattgcactgcagcctgggtgacaagagctaaactctatctcaagaaaaaaaaaaaagtactacttcctcttaggaggtaactgttatcagttcctttttattctttcaagtatattttttcatctgatgtcatttttgattaatgtatttaaagtaagagcctttcaatttaagaagtggccttagctactctgcctcagcagaaggttgaataaatggggtcaggttgttcaggtgaccccacagataccaacataaaagcttgatgtcatcacgcctgaccaggaccagctatgcaactcatggaatccagtgcaaactaaaaatgtgaggcctctattaaaaagtaaaaatttaaaaggctgggtgtggtggctcacacctgtaatcccagcactttgggaggctgaggtgggcagatctcctgaggtcaggggttcaagaccagcctttgcaacatggtaaaaccccatctctactaaaaatacaaatattagccaggcatggtggtgggcgcctgtaatcccagctacgtgggaggctgaggcaggagaaccgcttgaacccaggaggcggaggttgcagtaagctgagatcgcaccactgcactccagcctggggcgacacagtgagaccctgtctcaaaaaaaaaaaacataaaataatttcaaacagcaacggcagagccttaaaccaatatagggcccttctgagcccacagccctgcacagtttgcacacctgaaaagccagcctgcccaaagcgcctctcagctgatggcagcttcaccctagcagggagacagggcctaaatccaaagctaatagaaggggtctggggtctcctgctatctgtgacttagatttgttgattgaggggcttgtctcctccctgatagcagagtgggttgaatgaaaagtagagacatttgtgaccccaaaactcagaactgtcggggtgacagctaactggcttttctcctgatagagcatttggtggggggaaaaaaaggagtcaataatttcataatgatgtgatgatgagtggtttaagggtataagaattgatcgtctggttaaatggggaaaaggttaaatgaggagggaattgaaactttttctttttttttttttttcttgagatggagtctcgctctattgcccaggctggagtgcaatggcgcaatctcggctcaccgcaacctctgcctcccaggttcaagcgattctcctgcctcagcctcccaagtagctgggattacaggaacccgccaccatgcccagctaatttttgtatttttagtagagataggggttcaccatattggccaggctggtctcgaactcctgacctcatgatccacccgcctcggcctcccaaagtgctgggattacaggcatgacccaccgcacctggccggaattgaagctttttaagcagcaggcattcgggtctatacccgagatcttcaggatgtatcctctaagggagagaaggaaaaaggtgttctgacctggtggcacagtgggaactctacccagcagccgtgtgccctgttttaagttcttagctatattaacacgtttaatcttcacagtaattccaagagttagcaatagcatgaattccattgaacaggataggatggaggcataagggggttaagttacttgctcaaggccacgctgctgataggttccagggctgggcctacccttagaattttcaaaagtactgtcctgtttttgtgaacattgtttttcagtttgttgaacacataaacgataatattagttgttatttacgtagtgcccaatgtgggccagacactgctatgtacttccacacataccatctctaatgcttgtgagctaaacatcatccctgttttacaggcaggaaagcgggccctggaggttgggcctgacccagccccgaccttggtgaggaccagaatcaggattcagccccagaagtgatgggctccacagcctaggctctttctcacatcaccaggctgcctttgtattcacctccatactctgaatatttctacttgttcaaagtgttttaaatttggtcctaatatttttgggtggttacactggcttttttttttcctgtttctttttctttctttcttttttttttttttgagaccgagttttgctcttgttggccaggctggagtgcagtggcgtgatcttggttcactgcaacctctgcctcccgggttcaagcgattctcctgcctcagtctccctgcctcagcctaggattacaggcatgcaccaccatgcctggctaattttgtagttttagtagagacggggtttttccatgttggtcaggctggtctagaactcctgacctcaggtgatctgcccgccttggcctcccaaagtgctgggattacaggtgtgagccaccgcgcccggccagtttttttcctcgaagatgtatgctgagacaaatgaaaagcctcctcatctgtgcccccatcacttcttctatgatgttgtttatgtttgggactagtaatctcactgcctgttgaagtgaaacttctcaagatcttctttctgacagcatttttcttttcttttttagagatagtttcactatgttgcccaggctggccttgaaatctgaggctcaagtgatcctcttgcctcagcctcccaagtagctgggactgcatgcgcgtgcctctgagcctgacttgacagcatttttttccttttctttctttctttttttttttttctgagacggagtctcgctctgttgcccaggctggagtgcagtgacacgatctcagctcactgcaacctcctcctcccaggtccaagcgattctcgtgcctcagcttcctgagtagctgggataacaggcacgtgctaacatacctggctaatttttgaattttttagcagagacagggtttcaccatgttggccaggctggtctcggactcctgacctcaagtgatcccctgccttggcctcccaaagtgctgggattacaggcatgagccaccgtgcccagccccacagcatttttctttcctttttttgagacagagtctggctctgtccctcaggctagagtgcagcggcccgatctcggctcattgcaacctatgcctcctgggttcaagtgattctcctgactcagcctcctaagtagctgggattacaggtgcctgccaccacgcctagctagcgacagcgtttttctactgtcctggtgaatgggaaaaaaaaaaattcaacaagtgctgtaaatcaaagaaaatgacccaggcaagtctcaatcattttaggaggcttacttgccaaagttaaggaactacctgggagacaggtgtatgcctttctccgaaaatgattttgaaggcttcagtatttaaaggggaaagggcaggatattgagaaatacacaattttcatgtgagagtgggtaggggaaaaatagtcattcatccctttgcctggcttggtgaatctgaaatttttttttttttttttttttttttttttttgagtctcgctgtcgcccaggctgcagtgcagtggcgcgatctcgggtcactgcaggctccgccccctggggttcacgccattctcctgcctcagcctccggcgtagctgggactacaggcgcccgccacctcgcccggctaattttttgtatttttagtagagatggggtctcactgtgttagccaggatggtctcgatctcctgatcttgtgatccgcccacctcggcctcccaaagtgctgggattacaggcgtgagccaccgcgccgggccgaatctgaatttttatataagataacatagaagatagggccaaggaagcaatcagatacgcatttgtctcaggtgagtagagggatgactttgagttctgtcctatgtcccccgcacctgtgaagataagctatccatttacattgccttggagaacttcaacagaactgctttagggtaaagatcttgggggccgccaggaatttccttgtgggcaaaatgtgagggaggtgtgtcgcttttcatctttgtagccaccttatttaggaaccaaaatgggaggcgggtttgcatgacccaattcccagcttgacttttccctttggcttagtgagtttggggtccccagatttcttttcctttcccagtacattggtgtgatgaatcctgctgtctgcatctggatgttcaaggtttgggaggtggaacattccagtgagcaacatgagcggcacacggttcagaaaggaaggatgaaacctccgcaggaaattacagtgctgtccttgggggtgaggtaattttacactcttgcttccagcccctcccttgtactgttcaagttttctgtaaaaatatgattcagatgctttgtttacttattttcttggcaatctgttgtcaggacaacaagatctgtttgcctagaatagaattttctggtgttcttggaggagaaaaatccaaaaaacaaagcaaattcttactttcatatttctaagaagaaaacggttgccttaagtgggatttttttttttttgagacagagtttagctcttgtcgtccaggctggagtgcaatggcgcgatctccgctcactgcaacccctgcctcctaggttcaagcgattctcctgcctcagcctcccaagtagctgggattacaggcatgcgccaccatgcctggctaattttgtatttttaggagagacggggtttctccatgttggtcaggctggtctcaaactcctgacctcaggtgatccgcccacctcagcctcccaaagtgctgggatcacaggcgtgagccaccgcgcccggcagtgggatgattcttagaagaattgcaactgtgagaccaggcagcaagagcaaaactccgtttccaaaaaaaaaaaaaaaaaagaattgcaactgtgagaccaggcagcaagagcaaaactccgtctcaaaaaaaaaaaaaaaaagaattgcaactgtgagaccaggcagcaagagcaaacctccgtctcaaaaaaaaaaaaaaaaagaattgcaactgtgagaccaggcagcaagagcaaaactccgtctcaaaaaaaaaaaaaaaaagaattgcaactgtgatgtttctgtcctgttctaattaactttaataaggaaagcacatatattgatgggggttttagctttgtgctaattttaattagttagcatcattgaagacttatgtaccaagcacagagctagtatctttacatacatacatcgttagatttaaacctcatgggaaacctgtgagctagatactattattatccccatttgacagctgacgaaaccaaattgggagagatcaagtcatttgcccaaggccacagagctggtaactagtgaaactgggatgtgaacaaaatctatctgacttcagggtcattgctgtcacccacaatgcggagagtatacaaaggtttcagatgtggtacctgcctagatgccaggaagatataggtctattggcaagtcaaaacacagagtgaaaaaggaaggaataaagaaggaagggaggtggctgagcatcaaataaatggtacagtccttgctttaagacatcagagagaggagcgggcagggagggcctggctcacagcatttcaggaaactatcaggaaaagcaactcttgagctagggtttggatttgtaggggcacttcccaacctttcttacttaattggcttttaagtttacacagctgtgtgtatatctaagtttctgcctgtgtgagctacagtgttctaataaaacacaggcaatttagtaacatgatgtaaacatacagaattgtttaacaagtaccaggaaaagacatccagtaacaggaaaggacacccaaatctattttggttaccttagtaaagcagggttgccaaactatttattgcccataagctaaatctgtcatgccacctgttttttatggcctgctaagaatggtttttacgtttttcttttttctttttgtcaagatgggtcttgccatgttgtccaggctggtctcaaacttctaggctcaagtgatcctgccccctcggcctcccagagtgctaagattgtaatcacgcgtgtaggtgtaagccaccacacctggcctttcacatttttcaatggttaaataaaaaccaaaacagtaatattttgtgacttatgaaaatcatatgaaattcagttttcagtgtctgtaaataaagttttattggaacactgccgcatgcattcatttactatttcctgtggctgctaggatggcagggttgagtagctgcattacagagcctatggcttgcaaagcctaaaatatttactatctggccctttacaaagtttgctgaccctgccttaaagtgccccagataatctccaccaggcctgatacatattttttttggggggggggggggaaatatgagaatatagaaaaatacgggactatgcatcccccattcagaattgactattgctaacagtttgccatttgcctcacagccatttataagtactaaaaggaataaaactttacaacattccttatgctccctgtcccgttctgtgcttttttccttctttgtggcacactgtcatgaatttaatgtatattcttctctttgactttaaaaatcttgtatgtaagcatgtgtccatgaacagtatctactgcatgggattttaaggtacacacaaattgtacatcatgttgtattctgcaacttgctgttttactcaacattatgtttttgggatttccttatgtcagtacagatccagtgcaccccttttatctattagatggtattccatcaaacaactataatgagtttcatttatccattcctttgatgaacatataggaagttgttcccaggtggttttttttttgtgtttttgttttgttttgttttgtttttgagatggagtcttgctctgtcacccaggctggagtgcagtggcatgatctcggctcactgcaacctctgcctcccgggtttcaagcgattctcctgcctcagcctcctgagtagttgggattacaggcgcgcgccaccatgcctggctaatttttgcatttttttttaagtagagacggggtttcaccatgctggtcaggctggacttgaactcctgacttcgtgatctgcccaccttggcctcccaaagtgctgggattacaggcgtgagccactgtgcccagacttttttttttttttttgaaacagtcttggtctgtcgtccaggctggagggtagtggtgcgatctctctgcctcccggttcaagtggttctcgtgcttcagcctcctgagtagctgggattacgggcaccgccaccacaccgggctaatttttgtatttttgatagagatggggtttcaccatgctggccaggctagtctcgaacttctggcctcaagtgatctctccgcccgggcctcccaaagtgctgggatcataggcgtgagccaccatgcccggcctcaggtttaagccatttccnnnnnnnnnnnnnnnnnnnnnnnnnnnnnnnnnnnnnnnnnnnnnnnnnnnnnnnnnnnnnnnnngcaacatagggagaactctgtctctacaaaaaatagaaaaaattagccaggtgtggtggtgtgtgcctgtagtcccagctactcaggaggctgaggctggaggatcacctgagcctggggaggtcgagggtgcagcgagccgtgatcgtgctactgcactccagcctgggcaacacagagagaccctgtctcaaaacaaacaaacaaacaaacaaacaaacaaaaaaaacaaagaaaaaaaaatgggagtgggccgggcgcggtgactcacacctgtaatcccagcactttcggaggccaaggcgggtggatcacgaggtcaggaattcaagattagcctggacaacatggtgaaaccccatctctacgaaaaatacaaaaattagccaagtatggtggccggcgcctgtaatcccagctactcgggagactgaggcagagaactgcttgaacctgggaggcagaggttgcagtgatccgagatcgcgtcactgcactccagcgtgggcgacagagcgagactccgtttcagaaaagaaaaaaaaaaaaaaaaaaaagggagtcggggtggagctctcattggctcgttgcatgtgagtgtccctacggcctagaaatacaagagaagcacatcggaacgggctggaaatccacccagttaactagagggctttgaaccttttattaacttggaggttgactctcctgtcaactcgattcccttttggctgtttggcagggtcagtgagacatcccctgggtcgctcgaccccgtaggacggttcagggagccctccaggtcttcgtttctcctcttccccgcacagtgctgttatccagctgggggatccaacgcacacttaaggctccagcaaagtaagtgccaaaaaggggagaatgggaagaatatgctgtatttcacaaaaagcatctaagtagccatctggaaaagccagaatgaacttcaatggtgcatccaggtgggctggggatgggagaggaacgccttcccccagcctttagggccggccctgagcaagtggtcagtcggcaggcagctgcggaagggggctcccccgagtcggtggtggcccaaagtccaggccgcatccaccgcccggcgcctagcgcaggggcagcagccgggtcgccacaggaggggccccgggtgttcttgccggcttgggggaactttcccagggtcagcccggaggcgccctgcagccccggcatttggctaaacaaagcaagcgctgccggcgcggcccgcccgagggcgccgcgggaagaacctgggcaggtgcgcgccgcgggcgagcgggtacaaagttgcggcgccacctcctgcgctccgcgcccctccaggctctcctcccagccgcctccgatcctcccggccgggcctctcttcccccgttcttcgcctcctccctttctgctccttgcccttcgcctcttcgctactttcgtctttgcaggctcccgcctccccacccctccccggcgcagggccgagccggcgggggcgcgcagggggcggtgcgcggcgggcgcgggcggttccgctttcgggtttcccgccgccgtggccaatccccgcgctgcccggggcggcgacgcgcccaagccgagccgggcggctcctcccgcccccgccccccgcgcgcccgccgcccgggcggaggagaggagcgcgcggccgcgcagagcaagctgagccgagccgagccgagctgggggcgcagagcgcgggaggcggcggcggcgcggagcccaggtgagctggcggtagccgggcccggggcaagggacgcagccgccgcggccccgggcgcccgctccgtttccctctcgaggcgggggaccgccgccggcatggcacacaaagcccggaggctggcctggggctcccaacacggagggaccccacgtgcgcctccccacgccccgccacgtggagggacacggtccccgacagcccttcccccgcgtcctctgggcgccctgggcctcgggatggcctcctcggctgggccgcgccctgtccgggtggcaggggcggtcctggagtttggaaccggggtcaccgggggccgggtccgtcagggttcgtggaggcggcctaggcccagcccctcgcgtttgacaggtggggaaatctggagcgttccggggaagagaggaccagcggacttggagcacccccaccccgcagcctgcctgtctcggggcaaacccaggccctggtggcttggacaccaggtggcaggaccctaggccagcagttgtggggacctaggggacctttggctgtcttcggtctgccctttgaccacccccaccgcacctcttctctcagccggagcctcacaggcttggtccttctgacctaaattcacctcggggttgcagtatgctgtgaatgcggagaggcgtccgcctgactctcagggacactggacccagcccctctcagcattggggctctgtgcctggggtgccacccgacccagccttgagcttttcctggctttcccccagcccctgcactgcctagctggggaagtgggtgctttcacagctctgccagcctgccctcctggccactctcacttagtgctggacaggatgcagctcagcccctccgatctccccgagaaggctgagctttggggagggcgtctcagtgctatcagcaagagagggatacctggcctccggatgggacctgcagcgtccatctccctacaggctacttttaccttccccagcctggtgtttggagtctccacgcaggggatagaaacttcaggtgccctagagctgtgctgccatttaccactccccctcccctagctctgcccccagaggagagagaagaggatggctttatgtccccataagctcctttgttccttggaggaggcgggggctgcaacaaggggagggctttgggggagttagccaccctcttccctaatcaccccacaaaaacatgcagtttcagaataaatagtgtgcatgccatgcaaatgcagctttagggcaagccccacataccccttccagactgctgctcatacacccttcctatggaggaagcaggcattggtgacacacacccttcctatggaggaagcaggcattggtgatgaggacgcaaaacatatttttgtaatgaagagtaatagccatcatttgatgagcccctaacttggataataataagaatacttatttatttattttgagacggagtctctgttgcccagggtggagtgcagtggcacaatcttggctcactgcaacctccgcctcccgggttcaagcgattctcatgcctcagcctctccagtagctgggattacaggcgcccaccaccatgcctggctaatttctgtatttttagtagagaaggggtttcaccatgttggtcaggctggtcttgaactccttacctcaagtgatccgcctacgtcagtctcccaagtgctaggattacaggcatgagctgccacctggccctggacaataataataataacagtattaaaaactaacatctattgagttcttgctgcctgccagattctgtgctatgtgttacatgcattatctcatttaatgcctaccaaatcctacaacgtagggaattttaaccccatagtagagattaggagactgaggtttacagaaatcctgcagtgttgctaggatttagccccattttatagaagggctcagagaagttaagtaacttgctcagggtcacacagccagtgcaggcatgtcaggccttagaacctttgtgcacctgttcaagagcagagaccctggcaaggctgccctgagcttcttgaggagcccaggagtttgttttgttttgtttattcactacatcagtgtttgccgatgcagctctatgcagggtctgtagtactgcccatccttagatatggctagtgggctggtagctaaatatagtcactaataacaatgcactagttctcatccgggggtggtcccaccctcctggcagggatttgggaaagtgtgggggcgacttttggttgtcaaaatgatgctaagcactcctggcttttagtgggcgggagtcagggatgcctactaaagtgtcctgtaggcaggccagggccacgacataaagaatcaccctcccctggctgggcgtggtggctcacgcttgtaatcccagcactttgggaggccgaggcaggaggatcacctgaggtcaggagttcgagaccagcctggccaacatggtgaaaccccatctctactaaaaatacaaaaattagctgggcgtggtggcacacacctgtaatcccagctacttgggaggctgaggcaggagaatcacttgaacctggaaggcggaggttgcagtgtgctgagatcgtgccattgcactccagcgtggggcacaagaaggagacttcctctcaaaaaacaaacaaaaaacaaaaaaaaatcaccctcccccaaatgccagcagtgccactgttgagaaacaccacaaggaatgagtgctgttgtgatcgaaggagcacagggcactgagggttctggagaaatctcctcagactggtgtgaatctgggaggctccctgaaggaggtgtcatttgtgcagagccttgaaggatgggccagaaatgggagatgggatgggagtaggaggggaaggggatagggtggggtgacctagcagggaactttgtgcagtagccgggggtttcctctttgagaacctcatcctagatggaagatgagtggccagacaccactctcaggggagaggaccaggccaagtggggcaggccaagcctgttttcaaggcattttggctcaaattttaacatgggccacagaatcaccattattctatcaactcattttatggaagcctctttatatgaagggctcagagaggctgagtaatttgctcagggtcacctgtgatcttcttcccgccccagcatactttcttctggtggttatgggaaacatttcatttcctgatcctggggatttggggcaaatgctatttcagattttcctttaaatcagagggtcttatattgcttattgctttgctttgtttcttttcttttctttgagatggagtttccctcttgttgcccgagccagagtacagtggtgtgatctcggttcactgcaacctctgcctcccaggttcaagcgattctcctgcctcagcctcccgagtggctgggattacaggtacacaccaccacgcctggctaattttttgtatttttagtagaaacggggtttcaccatgttagccaggctggtctcgaactcctgacctcagatgatccgcctgcctcggcctcccaaagtgctgggattacaggcgtgagccacggcgcccagctttttttttctttttttttttcttttgagatgggatcccactttgttgctcagggtggagggcagtggtgctatcatagctcactgtagtctccaactcctgggctcaagtgatccttctacctcaaccaccagagcagatgagactacaggtgcatgccaccatgcctggctaaaattttaatttctttatagaaacagggtcttactattttgcccaggctggtctcgaactcctggactcaagtgatcctctaggctcaggctcccaaagtgctgggattggattatagccattgtgtctggcctactgctatttttcttccatgttttgctttcccactcacttcttctctttggatggggttagagaacctggatatggggttcaggccggctggctgcatggtgctgctgcagcctcagccttgcgtctgtgtctctttcctaacagttgaggaaattgcatttcccttttgaaaccgatcttctttcaggctgtgcttgttgccttactgacctgttagtagagattcgtaagggcttctttttaaaaaaattgaggagggctgggcacggtggctcacgcctgtaatcccagcactttgggaggccgaggcgggtagatcacttgaggttaggagttcaagatcaggctggccaacatagcgaaaccccgtccccactaaaaatacaataaaaattagttgagcctggtagcttgtgcctgtaatcccagccactcgggagactgagacaggagaatcgcttgaacccgggaggcagaggctgcagtgagccgaggtcagtgtgactgcactccagcctgggtgacagagcgagactccgggtcaaaaaaaaaaaaaaaaatatgccatagataatggggatggttgcccaaccttgtcagccctaaaaacccttaaaattccccttttaaaatggtaaatttagcagggcccggggggtcatgcctataatcctagccctttgggaggccaaggtggggggatcccgaggtcaggagtttgagatccttttggcccatatggtgaaaccctgcctcttctaaaaaaatccaaaaattagcccggcatggtggcatgcctctgtaaatccctggctactcgaaaggctgaggcaggagaatcgctggaacccaggaggcggaggttggagtgagctgagattgcgcccctgccctccagcctgggcgacagactgagactccctctctccaaaaaaaaaaaaaaaaaaaaagattaattaaaaaaatttaaatccccccgaggtatttgaattatatctccccaaaaaaaaaaaaaaaaaaaaaaaaaaaaaaggccagagcacaggagggctcatcatggagaccagtttcttgctgacctctttccttctcctataggcagccttggcttttagcacttttagttgctggtagctcctgtgtgtggtcagatgataggctgcaggtgagagtatcagaggctgcttcaacataagctccctgccagcattgctgggcaaaatgtcagcttgggccaaaaagagaaattagataagaacaaacagccaggcatggtggctcatgcctgtaatccnnnnnnnnnnnnnnnnnnnncacccccagaggaaaccttgtacccattaaactgtcactctctcttcccagtgcccctccctgcagcccctggcaaccaccagcctactttctgtctctctggatttgcttgttttggacatttcatataaatagaatcatgtaatatatgacttttgtgtctggcttctttcattcagcatcatgctttcaagactgatccatgccatagtggctgtcagtgcttcattcgcttctgcggcccagtactattccattgtgtggatggaccgcattttgtgtatacattcatccattgatagacatttgggttgtttccaccataaaggcgtcttaaggctactttgtccattcccgtgtctctgtagtccctcagttaatgaacttcttggcataagacatttttttgtcactctgtttggagggagcaggtgatggaagaaaggtttcttgaaatcactcaggaaccagtttcccaacccaaggttttcgggattcccttcatgcacccttacctaccccttgcaagaatcgtggctccccatttaaacccattgctggccaggcacagtggcttacgcctgtaatcccagcactttgggaggccaaggcggtggatcacttaaggtcaggagttcaagaccagtctggccaacgtggtgaaaccccatctctactaaaaattcaaaaattagccgggtgtgttgacacgcgcctgtaatcccagctgctctggaggctgaggcaggagaatcgcttgaacccgggaggcagaggctgcagtgagccgaggtcagtgtgactgcactccagcctgggtgacagagcgagactccgtgtcaaaaagaaaaaaccacaaaacaataacaacaaaacaaacccattgcctcctggatcaattcatggtcatttcattacaattttcagggacagtcttggttttattcagttccattcttttcagttacgatgattttttgtgtgttttgagatgggatctcactcactcgcccaggctggagtgcagtgttgccatcatggcccaccgtagcctcaacctcccaggctcaagagatcctcctgcctcagcctcctgagtagctgggcctacagccctgcgccaccacgcctggctaatatttttaatttttttgtagagacagggtcttgctttgttgcccaggctagtctgaaactcttgggctcaagtgatcctcctgccttggcctccaaaagtgctgggattacagttgtcagccattacaaccagccctgttttgttaaatgaaggtccccatgtgattttattagtatatattttgtgagacttttttccaggtaagtaaatccacaaagtagagaaaagcagagagatagtgccacggccctgtggccgtgagtggagtcagcccattctgtcctgatagctttgccaggaatacccgcccagaaagcagaaatggaaagctggcctgagaggaaggccagcagagatcagctcctgaacccttccatgttccagacaagggaagcggagtacagaaaggaagggaggacgtgatctttgcggaacaattagcttgagccacgctgtgtactagggactgccatagagaagatcaactctatagccaccctcttaggtaggtctggcaccatttcacagatgagaaaatcaaggctcaaggtcctctgggatctgtatcctttcctgatgtaccttctcttcctgaggtcttaggcctcccttggctccccccccgccttttttttttttttttttaaagacagggtcttgctctgtctctcaggctggagtgcagtagcatgatctcagctcaccgcaacctctgcctcctgggttcaggcgattgtcgtgcctcaaccttccaagtagctggaattacaggcacgtcccatcacgcctggctaatttttgtatttttagtagagacgaggtttcaccatgtaggccaggctggtctcgaactcctgacctcaggtgatccgcccgcctcagtctccgaaagtgctgggattacaggcatgagccatcgctcccaactttggctccttgtactggcaaattatgctcgttttctgatggagtggagtccaccttccctggcaggttatgggatggaaagcatttccgaatagttttgggctctgagaaataagatttagaattattatttgttttcttccctgattggacccctttctcaacaaaaccaagataataataataaaaaagacatctttaaaatgatgtgagttctgttagattttgtagggaagacccctggctgctgctttccccgttggggacgttagtgatccaaatgggaaagggattattttagctgccagtgtttcggtttcagtcatgtttgtagtattgccactgaagtttttttttttcaattatgaaacattttaagcatagagaaaagccaaagttttgctttgtttttttaaactggctcgctttttggaaagctggaaggaggcccaggaggtgacggaaacggggcagagtggggcgccctggctctgcaggctcgacccttcacccagcccgctcttttggttggggtggggtggggggattggtgctggtgacaggctataccctggggaactgagaaatactgggacttggttcctgtcccaggtgagtggtctcagagccttttggaaaagatgaacaattctgacatcctttcccttttgaaaaggaatgaaagaaaatgagaagattctgtagtgcccccacccccaccccaccccatcctgaaagctgctgagcaactatttttatgttgcctctttttatcctggtggcttctgtaaatagttgagagatggcagttgcagagataaaaatgctaatcccaacctggaaaagagagggatggtggtcctcggaggaaaggggggtgggagtcagtggggaggccaaggtgttgcccctctgcccacgtggcttaggcatgaggcaggaacccagcgggtggggtaggagcattgtgggtggtgcctgagagaagcttctgttagagaagtttaaatggggaaccagtgttttgcgggggccagggtgcagaagggagagcacactccctttttcatttttgaaatgtgctttggggtattgccttcaaggcttctggcagagaaatattttattcggttcatcctggacagttctgccctctaggtccaggtgtggggacgttgggccccgcagagctgcagagctggctccctgcactcttcttgtccctcagctgaggaggcttgcagctagatttagcatgatgtccaaaaggtggggaggagggagggagaggggccgtgggtagcccaggcaccgatgcctgtgggtttcgagctggccctctccatctctgatttgccaagagcatgctgggtagaagtctttttcttgttcattacaaactgaaattccagttgttttccaacctcttcctttggttcagtgaaagattgagagggatgcagtgggggaagaggaaggaaggaagatggtttctacactttatttccaaatacctccctcctctaaacacatacccaaactcacccacacattcgtaagctcctcacacttcaaggctggggccacccatgcacacctggttttatttttatttatattttttaaatttaaaaattttcgagacagagcctttctctgttgcacaggctggaatgcaatggtgcaatcatagctcagtacagccccaacctcctggcctcaagggatcctctcacctcagcctctgacggagctgggaccacaggtgtgcagcaccacacttggctaatgtaaacatttttttgtgtggtgatggggtcttgctgtgttgcccaagctggtctcgaatcctggcctcaagcgatcttcctgcttcggcctcccaaagcactagcattataggcgtgagccaccactgtacctggcccacagctggctttagatgtctgactgcgtgactggggccattctttcagtgatatttcattactgactaagtaatagctgcctaagaattcttaagacagttggccctggcaagcagcaagacaggggaactgcttactctgtgagtatccagggcctcaagggtcactgggctgcagggcaggccacctggatctcctcctggcccaactgcgagcctgctgggctgcctggatgaggtcatctcaacttctctgagtctcggtgactccatctgcagcctctgttgcgctgattgcaaaagccatgtgagaatgtgctcttatgacacatggaagcaaggatgtgaaatgatatgcatacgctatttttaattttgtaaaatgtgatgcatatggacaagggctagaggggaagatgaagagttagcacggcaggattagagatttaagagatttcgttttaaaataaattgaaaccagctaggcacagtggctcatgcctataatcccagcactttgggaggctgaggcaggtggatcacttgagcccaggagtttgagaacagcctgggcaacatggcaaaaccccatctctaccaaaaatacaaaaaattagccaagtgtggtggtgtatgcctgtagtcccagatacttgggaggtaaggtgggaggatcacctgagcccaggagttcgaggctgcagtgaactatgattgcaccactgcattccagcctgggcaatagagtgagaccctgtccccaaccgccccgccccccaaaaaaaggaagccaactgagggtcgtgaattcagtaactgccaaagttctttcttggcaatagcttctatatagtgagcattcacacttgtgccctcctgaagcactcagaagctggatgattgtgagcaagtcagccaggctctctgtgcctcagtttccccactggtggaacagggataatagcaggacctatttagccaggcgtagtggtgcgcacctgtagttgcagctacttggggggctgaggtgggaggaatgcttgagcccgggagatcaaggctgcagtgagccaagattgtgccactgtactccagcctgggtgacagagtgagaccctgcctcaaccaaaccaaatcaaaccaaaccaaaccaaacaaaacagtatctataactcataaggtggttgtgacagttaaatgagatgatgcaggattagaagagtgccaagcactcaagaaggctaaccattagtatcactgcatctgcagcaatgcgattcttgtgttgaaaatgccagtttcttctcctctccctgttcatcagcccttccctgccccatccttgatgttttaagattaaaagaaagagaaaagcagtgttggaagtcaagttgcctgtcaaggtgaaggctgtccaggttgccagaggccttgtagctgcctggcagtttggcctggatgagagccctggggtgtagggagacagcagcttccctgtcagtcagctctgtcatttgtaagtcagggcccttgactgtaaatgatggaaaactaatcacgaaatagcttaagcaaaaatggaaatatgttggctcatgtagttaaaaattgaggtacatgagcttcaggcatggctgaatccaggtgcctaaacagtgtcttcaacctcagctcttttccatccattacctctcttctctcttcttagacttcattctgaggcagggttctctccagcccctggtagctttaggaatatatcctctgagctctaggttcaacagaaaggacattctttcttttcaacacttccacaaaatcacagaataagacccaatagactgacttgggtcacacatctactctcttttttgagacagggtctcactctgtcacccaggctagagtgcggtggcatgatcacggctcactgctgcatcaacctccccagctcaagcgatcctcccacctcagcctccctagtagctgggactacaggtgtacgccaccatgcccagctaggttttttttgtatttttgtagcgatgaggtctcgccatgttgcccaggctggtctcaaactcctgggctcaagggatctgcccacctcagacttccacagtgctaggagcacaggcgtgagccaccatgcctggcccacacatctactctgtttcttttttagataaggtcctgctctgttgcccaggctggagtgcagtggtgcaatcttggctcactgcaacctccccctcccgggttcaagtgattctcgtgcctcagcctcctgagtagctgggataacaggcatgcgccaccatacctggctaatttctgtatttatagtagaggtggagtttcaccatgttggctaggctggtctcgaactcctggcctcaagtgatctgtccgccttggcctcccaaagtgctgggattacaggcgtgaaccactgcgcccggcctcatatctattcttgagttacccacttgaccagagcaattgatagccagctggccaggcttgagtcacatgcaaatctctgaagctgatggtggggtcagccctgtagggccacctctcatatggagggatggcttcccagacataaattgggctgctgttatcagactaaagaaacttcaactctaggccagctaaagaaagcttctgaccttctgagtggccttgggacagaagaaataaacaacaacttctagtcagtatttactgagtgcgagcagtgtcctagaaagttctaggcccgggaattcagctgtaaacaaggaggccaaagccacagctctcatgagttagtcatgtccatgtccctgtgcccaaatcctgtgcatttctcctccaagcactttgagaccctgtgctttcgctctcatctctctcaaacacaggtcgaggtcccagcaaggcagaggaatgggctgcctgcccaaatcccttgttagagattttggtccagcctggactttattcaggacgcaatatgtggacatggcagggctatgcctgtaattgttggccccttcctgaaaaactcagcccggccgggtgcggtgactcatgcctgtaatcccagcactttgggaggccaaggcaggtggatcacttgaagtcagaagttcgagaccagcctgggcaacatggtgaaaccctgtctccaccaaaaaacacaaaaattagctgggcatggtggcgtgcctgtaatccccagctacttgggaagctgaagcaggagaattgcttaaacctgggaggcagaggttgcgctgagccgagatcacaccactgcattctagcctgggcaacagagcgagactccatctcaaaaataagtaaataaataaaaataaaaataaacaagaacaacaaaactcagcccaattgtcgccctgcctagaaccactgcgtgactttgggcaaatcagtaaatccttctgaaccttcattttcctcattggtggaatgaaatggtcagagcaggtgaccactgatgtgcacctgtctttgcactgacattcagtgacttgaaagcaggggctgcagactcagacacctgtagcggagaggcagggcatgagatgtgggccgaggggagggcgtgggccgtggcaggcagcctgtcctcagctttggagaggcactgggaagtggtgaggactgtggcgtgctggtgagtgtgtcccctgcccagagctgcagcgagtggttgccaggatagaacacaggcccagtgctatcagtgtgcagttcttcaagaaaatctgtaaatttgcacttttatctgaaatctcctggctctgaaatgttggcatctcattcaaatggttatttatttatttatttatttatttagcgaaaggatctcattctgccacccaggctggagtgcagtggtgcaatcatagttcactgcagcctccaactcctgggctcaagccatcctcccgcctcagcctcctgagtagctgggactacaggtgtgagtaccatgcccaactaatttaaaaaattttttttgtagagatggggtctcactatgttgcccaggctgatcttgaattcagcatcaagtcatcctcccacctcggtctcccagagtgctgggattacggccatgagccaccacttcttcagatagctttgaacctggtgtaaggccagtatatcggtggccagatgtcacacaggagtcatcatttgcaacgtttttgttctagggactatgatgaggatggggtctctgaggcctgagatatctctattgccatctgacaagggagggcctttgtttttgcggactcagttgtttcagtggccccaaattaaagagcgctgaaggagagagccagttgtaacagttggtgtcactggatctgataaccctgcttagctgggctagggccctgggtctgaaatattccagcaccgcctccgtggatgcagccgagcctctcaggtctcccgctagagctttgggaaatgcctcagagtctgtggcctccaaggcagccggcttctccgaaccccactggttgggtggggtgctgtattatcttcctagagaagccgtgaccaagtctcacactgggcggcttaaagaacagagatattaggcagggcgtggtggctcatgcctgtaatctcagcactttgggaggctgaggcgggtggatcatctgaggtcagtagtttgagaccagcctgaccaacatggtgaaaccctgtctccactaaaaatacaaaaattagccgggcatggtggtgggtgcctgtaatcccaactactcaggaggctgaggcaggagaagcacttgaacttgggaggcggaggttgcagtaagccgaaattgcgccattgcactccagcccgggggacagagcaagactctgtcaaaaagaaaagaaaagaaaaaaaagaacagagatatattctgtcatttctggaggccagaagtctgggatcaagccttggcagggttcgtcccttctgaaggctccgaggggagtctgttccaggcctctcctggctgctggtggttgttgataatctctgatgctccttggcctctagaaggagcatcgtctccgcctccatctccgtgtggccttccccctccgtgctggctggctgtgtgtctacctttcccatttattggactaggcctgttggactggggcccaccctaatgacctcattttaacttcataatctctgtaaagacctgtctccaaataaggccacattctgaggtcctgagggttagaactgccacataacatttttgggggacacagttcaactcacagcagggtctgagcccagtccctgtagcattgccctgggctgccctctcgtcatcatcatccacttcccacaaagctgtagcccttccagcccctccttccccactttgttcctgctcccgggctccagacccaggaaacttgtttctgttgcctccactctcccgcctcttttccacagagggccttctcagaagctgtttcctctgctgggaacaagttcctgctcctttagtatctactcaccctgtaggtctcagcctaatagacgttcaccaagaggggccttctttcacccaccgcctcccttcaaatctaaagtggtcccctctggtattctctttgatcatatcctggtcttctgccccagtctgtgcttatagattcacttgggacctactttttctttttcaagatggactctcgctttgtcacccaggctagagtgcaatggcccaatcttggctcaccacaacctctgcctcccaggctcaagcgattctcctgcctcagcctcccaagtagctgagattacaggcgcccgccaccacacctggctatttttgtatttttagtagagacggggtttcaccatttggccaggctagtcttgaactcctgacctcaggtgatccacccgtctcggcctcccaaagtgctgggattccaggcatgagccaccgcacccggccttgtgcacctacttttaaatgttggtccccctcattggactgtcagtcccctcgagggcaaaaaccacatctgttttgtttatccagcacgtgatcattgctttataattactacatgtaagaacaaatgaatgaatgaatgaatgaacgcatttccttgaggacctctgtgggcctcagtttccccatgtgagacagggtgtggctgagcccattttcccaaggaggacattgatgtcccgggcaggacatcatccgtagccttggcaggatcctcggagctgttttgggcctttttgttgtgcccgggatgaggcaacctcaggggagcctgcacaggtgtgtccgggcttgggagcacctctttggcacccactggcagcttgctgcgcgggaggtagcggatgcaggttggaaacagcccctaggaaatgagaatgtgtttcctggaggcccgcgtctagcgggggacctgccccgataatcacataggttcttttctattttcctaagcgtcggctggcttgagaaataaagggacagagtacaaaagagagaaattttaaagctgggcgtccgggggagacatcacatgtcggtaggttccgtgatgccccacaagccacaaaaaccagcaagtttttattagggattttcaaaaggggagggagtgtgcgaataggtgtgggtgacagacatcaagtacttaacagggtaatagaatatcacaaggcaagtggaggcagggtgagatcacaggaccacaggacccaggtgaaattaaaattgctaatgaagtttcgggcaacattgtcattgataacatcttatcaggagacagggttttgagatcaaccggtctgaccaaaatttatcaggtgggaatttccccttcctaataagcctgggagcgctatgggagatgggagcgctatgggagactggagtctatctcacctctgcaatctcgaccataagagacaggtacgccccggggggtgccagttcagagacctacccctaggtacgcattctctttctcagggacgttccatgctgagaaaaagaattcagcgatatttctcccatttgcttttgaaagaagagaaatatggctctgttctgcccggctcaccggcgatcagagtttaaggttatctctcttattccctgaacgattgctgttatcctgttcttttttcaaggtgctcagatttcatattgcacaaacacacatgctgtacaatttgtgcagttaatgcaattatcacagggtcctgagacgatatacatcctcctcaactgacaggattaagagattaaataagacaggcataagaaatcacgagggtattgactggggaagtgataagtgtccatgaaatctttacaatttatgtttagagattgcagtaaagacaggcataagaaattacaaaagtattaatttggggaactaataaatgtccataaaatcttcacaatccatgttcttctgccatggctttagccggtccctccgtttggggtccctgactttggctggctgagcccattttcccaaggaggacattgatgtcccgggcaggacatcgtccgtggccttggcaggatcctcggagctgttttgggcctttttgttgtgcccaggatgaggcaacctcgggggagcctgcacaggtgtgtccgggctcgggagcacctctttggcacccactggcagcttgctgcgcgggaggtagcggatgcaggttggaaacagcccctaggaaatgagaaggtgtttcctggaggcctgcgccactcagcttcctggcagaggaaggagcgtttccctcatcctggcccgggtcccgggtccatctgctccaggaaggctctggtggctcgtgatgagctgccctgtgagagggaacagggtagaggcaaggccttgggggatggcctctgcctggatttcatggggaaggatgcagggccagggctgacattttgtcaaatccaagcaactttgcaaaaaagtcctcctctcacgctccgccctctggaatcgaatgcttcactgtccttccctggcagagggcctggtcctgtgagggttacatggccaggcggttatctccgtgctgggtgcctgatgagagctcagttgaatgttagccgttgctgtttccaggctaaactattgtctttttgcatgatttcttctgcacagagtgttggtagctttcatcagatctttgtagggtctgtgacccccaaaccgttcaggacactggcctagactctaggtgtctgtgaggccagaagcccctggatgcatctcttcctgtcagggcctgcgtccctggggctcctctctgctgagctctggggtttcacgcttgccctgccagcgccgacgtccctgcccggggtctgagctgtctctcctctccatcctccaacagaccgcagaggccgagactccgtcagagctgtgagggaggcccgggccagatgccagcttgccaaggaggccgattaaaagcagccttgctgggggcggatggctcagtgcccttggcctggtgtagagttcgataagcaattgttttcctgttggtgagaaaaaaacaaatctccattgactttcccaggcactgctcagcctcattttcttctcaggaactcttgcagccctatcagaggcagctctaggataggggagagactgactgcctgccctgggggacgcaggccacacagccagggctgagggacacacttaagagcaggccagctcgcttggacattggtcctcgtgggaacattccagagcataggctacctaccagagcaggccatgggcatctgtattagtccgttttcacgctgctgataaagacatacccgagactgggcaatttacaacagaaaggtttaactggacttatagttccacttggctggggaagccccataatcatggcggaagtcaaggaggagcaagtccggtcttacatggacggcagcaggcagcgagaatgaggaagatgcaaaagcggaaccccctgataaaaccatcagatctcgtgaggcttaccaccatgagaacagtatgggggaacccgcccccgtgattcaattatctcccactgggtccctcccacaacacacgggaattatgggagtacaattcaaggtgagatttgggagaggacacagagtcaaaccatagcatccaacaggtgtttgttgaagtaatagtttttgagtacttaaccacttgcagggcatgattctgagtgcttggttcatctaatcctatgactatcagatgggcaccaactttacaggatgtcaatgaccttaagctgttgaacttcagggtatcttgagtttcctcttctgggacataaggaccatgagaaggagaagtaaagtagcagcagctagggccatagagaaatatcaaacttgagttgtattctctcattgatggggaaactgagacagggacagagttgatgatttctttctgagatacagtaagggggaatgggggacagagaaataggagataagaccaactgctcccctctcctgacctcctgccccgtctgatcccgtagcatcctaggccttatcatcataactccgatcatggttacaggtattttctttcctttaaaacactttttatttatttatttattttagatggagtcttgctctgttacccaggctggagtgcagtggcgcaatctcgcctcactgcaacctgtgcctcccgggttcaagtgattctcctgcttcagcctcctgagtagctgggatgacaggtgcccaacaccacgcctggctaatttttgtatttttagtagagatggggtttcaccatattggccgggcttatctggaactcctaacctcaagtgatctgcctgccttggcctcccaaggtgttgggattacaggtgcgaaccactgcatctggcctgaatttgactattctagatacttcatgtaactgaaatcttacaacacttgtcctttagtatctggcttgcttcacttagcgtatgtcttcacggttcgtctgtgttgtagtgtgagtcagagtttccttcttttttgtggctgtatagtattctgttgtatggctctgccacattttgtttattcattcgtctgttgatggacacttggttataccttttggctattgtgaatgatgttgctatgaacattagtgtacaagtatccgtttgaatccctaccttcaattcttttgggtctatacctaggagaggaattgctggttatatggcaactctacgtttaactttttggggagccaccaggctgcctgattgtagtttgaatttgcagttctcttactgtgaggttgaacatcttgccgcatgattggactctttggcgttctcttaccacacactctgtgtgcatgagtcaggcccgtgtcagggctggggcgttgggttttcccttttgcctttcctgttgggctttccctgccacgtgcctggcgtagtagctatttcatcagttcttctggaaggaccgttccgagagcgctgagggccattttctgcctctcagccagatcctccagggagctctggctttccgctgtctgtaccttcctctcttttaccccactacctcccaatgtcatcggagataccattttattcattcataaaatctctgctgagccctcactgttttcctgggacatctagagagaccccccccccaccccgccctttttttttgagatggagtctccctctgttggcaggctggtgtgcagtggtgcaacctcagctcactgcaacctccgcctcccaggttcaagcaattctcctgcctcagcctctccagtagctaggattataggcatgagccactacacctggcttattgttgtatttttagtagagacggggtttcaccatgttggccaggatggtccagagagaccctttgtgatgtgggtgattagcatggagtggccatcatccacaggtgtctgtccacaaatgtactccctgaattccagtggtacctgtgacatttgtccagcagaatttgtcaaacacgttaagcaaaggttaatgttctgtcccagagacggtaagaattgacagcctaaggggatgtgttaatcttttttatttttattttttgagatgagtcttgttcagtcacccaggctgcagtgcagtggtgcgatctcggctcagtcattgcaaccttcacctcccggattcaagtgattctcctgcctcagcctcccgagtagctgggattacaggtgcccaccaccatgcccaggtaatttttgtatttttagtagagatggggtttcaccaggttggccaggctggtcttgaactcctgacctcaggtgatccacctgccttggcctcccaaagtgctgggaggattacaggtatgaaccactgtgtccgacttctctctctttttttttttttttgagatggagtctcactctgtcatccaggctgaagtgcagtggcgtgatctcggctcattgcaacctccgcctcccgggttcaagtgattctcctgcctcagcctcctgagtagctgggactacaggtgtacatcaccacacttggctaatttttgtatttttagtagagatggggtttcaccatgttggtcaggctggccttgaactcctgacctcatgatccacccgccctgtcctcccaaagtgctgagattacaggcgtgagctgccgtgcctggccttttttaaaaaattgagatataagttcatgtaacataagttggccattttgaagtgtatagttcagtggcatttagtacgttcacaatgctgtgcaaccattacctctatctagtttcaaaacgttttgatcaccccaaaaggaaaacctgtgcccattaagcagccattccccacacccactaatgtcaccacccccatagtcctaggcaaccattagtctactttctgtctctgtggagttgcatattttaaaaatttcatataaatagaatcatatatatgtgaccttttgtgactggcttccttcagttagcataatattttagaggttcatccatattgtggcatatacttgattccccccgaccttttttttttttttttttttgagacagtcttggtctattgctgagttgctgaggctggagtgcagtggcatgatctcggctcactgcaacctccgcctcctggattccagcgattctcctgcctcagcctcctgagtagctgggattacaggcacacgccaccatgcccggctaatttttgtatttttagtagagatgaggtttcaccatgttggccaggctgatctggaattcctggcttcaagtaatctgcctgccttggcctcccaaaatgctaggattacaggtgtgagccaccgtgtccagccctgacctgcattgttaatgcccagcatttaaaaataaaaagtcaggcaaacttattaacctccttagggcttctcttgggaaaaacaaagggaagaccagcaatagtaggcccagattcctgccgagcaacaattggcttgagctggaagcagctgtcaattctgtaggggatatgtgtgctctatttgggggttttcttatacttgttcctataggaattgagttaggaattattgtcatggtatgtgagaagtggttccagctacttgggaggctgagatgggaggatcacttgagcctaggagttcaagggtacagtgagctatgatcgcaccactgtactccagcctgggcaacagagagagggagagaccttgtctcaaaaaaaaaaaaaagaaaaaaaaagaaaaaataataaaagaaaaaatataagaagatgcagactctgcttttctgtatagactcagagatcagatcacaccatgttttgcaagatttttttaggatgtcaactggaggcaggaattagacagcagcctgggccagggaggagaggggatcctttcctgtccctgcccgtaggagctgggccagctgaccctttctctttctgcaggtggctccgctgccggatgggagtgccccagtgtgctggatgaagctggcgcatgcaccatgtcatcatgtgtctctagccagcccagcagcaaccgggccgccccccaggatgagctggggggcaggggcagcagcagcagcgaaagccagaagccctgtgaggccctgcggggcctctcatccttgagcatccacctgggcatggagtccttcattgtggtcaccgagtgtgagccgggctgtgctgtggacctcggcttggcgcgggaccggcccctggaggccgatggccaagaggtcccccttgacacctccgggtcccaggcccggccccacctctccggtcgcaagctgtctctgcaagagcggtcccagggtgggctggcagccggtggcagcctggacatgaacggacgctgcatctgcccgtccctgccctactcacccgtcagctccccgcagtcctcgcctcggctgccccggcggccgacagtggagtctcaccacgtctccatcacgggtatgcaggtgcgtgagccggtggtgagccaggtcctaggggtccctggtgcccttccctgcccccagcagggcctctgtggaaggttgggctcccccagaaggatctgagtgccacggttgacctaggagttgactccagggaaccttgggggcggctggggccaaaaaggggccctaggggggtcgtgaatcagcatggggaagggaaggcagtcagcaaagggtgggtcatggagccgattaccagtgtggagtgtgggccgctggggctttttccttccgtgggaccctggggaacagcacagagcagcagcctcagtcatcccaccaggggcaagggagctggggtatttatactcatgggtgagggctgctggggcaggtgtgtgtgaccccctgtgggtgtggacagagcagttgcagggccggagggagcctccagcaaagagactgaggtgtgggcgaaggtgtgatggaatgaggcgggtcactgagagcctggcgacgacccgcctggccgagcgtgtgttggcaccaggcactgggttcagcacttgctgtgcatttctcacaggacccttaccgtaaaccctgcggggatacagagaactcagatcctcaccagggttcacagggccctgtgtggtctgaccctttcccatccctcctgccattctgctgccagctccctaagctccctctgttcctgccttcacattcctcggaatccaagctcttgccttgggtctgtactctcgctgttccttctgcttggaaccacctcccccaccaccccatgccaactttgtaaggcctattccgataatgtccaagtctcaactccagtatcacctcctccaaaaggcttcccgggccaccatccctaaagcaccctccagcctctctctgccccatggccctatttgctttccttcataacgttaatcagcatctgattatctgtgcgttggtttagttgtttattgcctgtctccacccagccagaacgtaagctccataggatcatttcatccacctccacaccctatcccatccccagagcctagcacagtacctggtgcatagtaggagcgcaaaaatatttgttgaaggaacgaatgaatttaattggaagaagacccaacatcaggatgcctttctaaaggggcttttttttgttgttgttgttgagacagagggttgctgtgttgcccaggctggagtgcagttgcgtgattttggctcactgcaacctccacctcccaggttcaagctattctcctccctcagctcatgagtagctgggactacaggtgtgcaccaccatgcccagttaattttttttttttttttttttttaagtagagatggggtaatgccatgttggccaggctggtctcgaactcctgacctcaggtgatccacctgcctcagcctcccaaagtgctgggattacaggcatgagccactgtgcactgccaaaggggctgattttgaaggggctatagggactacattttgaaggccaggaaaaactttcataattggagatgaaaattgggccctggagagttgagaggagggagaattcacagcatgagccaaaaacagagctaggacctatgagcaatggctcctttttagcttagcttctttcacagcatcatgattttgagatttatccatgttgtggcgtatatctgtagttcctttttattgctgaataatttcaattgtatggacgtaccacagtttgtttattcatttacctgttgaaggacatttggattgcttccaattttttattattacaactaaagctgttattaatatttatatgcaagtctttgtaaacacattttcacttctattgggtagagtggcctgtggtacggtagatgtttgttaagaaactgtcaaggcctggtacaatggcttatgcctgtaatcccagctacttgggagactgaggcgggaggatcacttaagaccaggagtttgagaccagcctgggcaacataggaagacccatctctacaaaaaacaaaataggctaggcccagtagctcacgcctgtaatcccagcattttgggaggccaaggcgggaggataacctgaggtcaggagttagagaccagcctggccaacatggagaaaccccatctctactaaaaatacaaagaatttagctgggcgtggtggtgggtgcctgtaatcccagctacttgggaggctgaggcaggagaattgcttgaatctgggaggcggaggttgcggtgagctgagattgtgccattgcactccagcctgggcaacaagagcaaaactccatctcaaaaagaaaaaaaagccaaagttttaattttggtgaagtccaatttatcatttgtttcttttgtctgtaccttttttgtattatctaagaaacccttgtctaccccaaggttgcacagacttgcttttcttgtatcactttatgtttttacaggacaatgtagccaaggattacttgtttgatttaaaatttactttttaaaagtaggaacaaccttctttaaaaaatgggttttacaagagtccacagtgtgtggttacattttgacaaagtacaacaagcaaaatcagcgttgttagaagtcaagagagtggccacctgggggagggcagaggtgcgagtggcttctgggagctggggatgttctctttcttgatttgggttctggttacctgtatgtgtttaatttggagaaatgtatctagttgcaaacttttttttttttttttttgagacacagttttactcttttgcccaggctggagtgcaatggtgcaatctccgctcaagcaacctccacctcctgggctcacgcgattctcgtgcctcagcctcctgagtagctgggattacaggtgcccaccaccacgcctggctaatttttatattattaatagagatgggatttcaccatgttggccaggctggtctggaactcctgaactcaagtgatcctcccaccttggtctcctgaagggcttgtaggtgtgagccaccgtgcctggcctctagttgcaaacttaaaattcattttgcacgtgtctctccttactctctaggactgtgtgcagctgaatcagtataccctgaaggatgaaattggaaaggtaaatatccctggggctaggctggctttctgcattcaccaggggcgttcagatactgtggagggaacggggtaaagctgggagcaggagaggagtctttgaaggcgaggttggtggagagggttttgtcattaatgatctaggtttttggtttagttttgttttcttgtatcttaaaattaaatatgtttctgcagaagctcagaaagcttccaacgaaattccatatcgccttggtgatagttacatccccaatacatttggggttttgtttcaccccgaggtactctgacatctagttttgcttttgttttagctaatggggggtatcatcaccatggtcaaaactccaaatgccagtagaaaacaagtaagtaatataaaggagtgaggcatgccagctgtaaggtagtagggagtggtaaggacagtggcaaaccattaacatatggaaatgagggctacatatagctagatctttccattttttcaaaataaactaggaatcttgatttttttttttttttttagacagggtgttgctctatcaccaaggctggagcgcagtggcgcaatctcggctcactgcaacctctgcctcctaggctcaagcgattctcctgcctcagcctcccaagtagttgggagtacaggtgtgcaccaccacacctggctaatttttgtaatttttgtagagacagggtttcactatgttgcccaggctgttctcaaacctgacctcaagtgatctgcccgcctcggcctcccaaagtgctgggattacaggtgtaagccaccttgcctggcaaggaatatagatttctatatcagacctttctgtttttttttgagactgaatttcactgtgtcgcccaggctggagtacagtgccgaaatcttggctcactgcagcctctgctttcgggtttaagtgattctcaagcctcagccccctgagtagctgggattacaggtgcctgctaccatgccccggctaatttttgtatttttagtagagacgcggtttcatcatgttggccaggctggtctcaaactccttaactcaagtgatccgcctgcctcggcctcccaaagtattgggattacaggtatgagccactgcgctccgcccagatctttctgtttttaaatcttggcaactaatccaaactttgtaaaaacctgggctccaacaaaatacagttgcgggacagatttgaccaatgggctgccggtttgcaacgtctgtattagggttctcattttgcagatcttaacttctggatagtatgtcatgggcatctccctttatccagggctcctatggtgtcgtcaagttggcctacaatgaaaatgacaatacctactatgtgagtatccgcattctcctccctgcccccatccttatccacagaagagcctcctttccagcactcagcttcctggaaagttttcctagctgttgtctcattttattcttaggtcatgtttattttgtgccttaggaaggaagtggtatgcccattttacagataggaaaatggggaggtgaggggattggcccagaaaaagttactcattcagcaaaaggcttttatgcccttcctctgagctgtcatctctgcatcctccatagtattgagaacaaggcagcagtgagacagatgtctgtgtgggtggctttggagtcagtccagcgtagttttgaacctgaatctatcgtgtgccaaccatgtgaccttgacaagtgatatttctccatgtgtaaaacagctgagcctcagtttccccatgtgtaaaacagctgagcctcagtttccccgtgtgtaaaacaaccagtcctgcccctcctttgcccattgctccagctcacttgtgttttgattcgatggcagcaagtcctgaggctcgtggtttcccagctgagagaggcgaccgtgagcctcaggaacacctcagagctggaggcaccccaggagtccagcctccctacaaccccatggctgcttgaccctctctggtaatgaggggctcactctgttgacctgagcctgccagggggccaggagcttgggccggctttggagtagaggaaccccgactgcgccctccttccccttttcctccctgctttaaacaggacctggctaaaggtgctgtccttcattttcctgcaggcaatgaaggtgctgtccaaaaagaagctgatccggcaggccggctttccacgtgagtttggcgggcctttgttgttaggtacaggggctgggacaagacagggcagagccccctgaatgggaaccattgcactgggcatggtgccacatgcctgtagttccagctacttgggaggctgaggcacaagaattgcttgaacctgggaggaggagtttgcagtgagccaagatcgcaccactgcactccagcctgggtgacagagcaagactctgtctcaaaaaataataaaataaaaatatttattaaagttatataggtatcaagtcaaaaaatccaatagaggaaaacactggcaattcctcaaaaagttaaacatggtgttaccgtatgactcagtaatttcactcctacttatatacccaagagaacaggacatccgtgttcacctaggagcttgtatgtgaatgttcatagcaggtttagccacaataactaaaaagtggaaacagcacacacggcttcagagaatgaatagagtatatatgcatccagtggaatattcatccattaaaagtaatatgaatagagtatatatatatatatatgcatccaatggaatattattcagccatgaaaagtaatgaagtaccaattcatgccccaacacagaggggtcttgaagacattatgctaagtgaaagaagcctaacacaaaagctcacatattatgtgattctgtttatgtgaaatacccagaataggccaatccataggaacaaaagtagatttgtgattgctgggggctctggggaacaggggaaatgaggggtgaatgctgatagatatcagatatgtatatagatatttagggaggcattgaaaatattctgcagttggccgggcacggtggctcacacctgtaatcccagcactctgggaggccgaggcgagtggatcacttgaggtcaggagttcaagaccagccaggcccaacatggtgaagccctatctttactaaaaatagaaaaactagctgagcgtagtggtgtgtgcctgtaatcccagctactcgggaggctgaggcaggagaattgcatgaaccaaggaggtggaggttgcagtgagccgagatcatgccactgcactccagcctgggtgacagagcaagactccatctcaaaaaaagaaaaaaaaatatgcaatagataatggtgatggttgcacaaccttgtcagcactaaaaaccattaaaatacacattttaaaatggtaaatttagcagggcacggtggctcatgcctataatcctagcactttgggaggccaaggtgggtggatcacgaggtcaggagtttgagatcattctggccaatatggtgaaaccctgcatctactaaaaaaatacaaaaattagccaggcatggtggcatgcatctgtaaatccctggctactcgagaggctgaggcagcagaatcgctggaacccgggaggcggaggttggagtgagctgagattgcgccactgcactccagcctggacgacagactgagactccatctctcaaaaaaaaaaaaaaaaaaaaaagataaattaaaaaaatttaaataccacgaggtatttgaattatatctaccaaaaaaaaaaaaaaaaaaaaaaaaaaaaaaaggccagagcacaggagggctcatcatggagaccagtttcttgctgacctctttccttctcctataggcagccttggcttttagcacttttagttgctggtagctcctgtgtgtggtcagatgataggctgcaggtgagagtatcagaggctgcttcaacataagctccctgccagcattgctgggcaaaatgtcagcttgggccaaaaagagaaattagataagaacaaacagccaggcatggtggctcatgcctgtaatcccagcactttgggaggccgaggcgggtggatcacgaggtcaggagttcaagatcagcctggtcaagatggtgaaaccctgtctctactaaatatacaaaaaagtagccaggcatggtgggtgcctgtaatcccagctactcgggaggctgaggcagagaattgcttgaacctgggaagcagaggttacactgagccgagatcgcgccactgcactccagcctaggcgacagagcgagactccatctcaaaaaaaaaaaaaaacccatcctaacagtaggaccctggtttatcctgcttatccaaacgctgcaccaggtcataatcctcacgtcactattatcaatttttgacatctgcttctggcttcttccagtgacaatagaggatttcgcttgcttaaacactccttcttacctcttgtcttaacaaaataacaaatggtgtcctgtaacaacgtacgagagactgggtggcttaacctaaccgatatttatttctcacacttctggaggctggttcatagttagcaccatctcaggccgggagcggtggctcacgccagcactttgggaggcagtggtgggcaaatcacttgagcccaggagtttgagaccagtgtgggcaatgtagtgagacccctgtctctaccaaaaatttaaaaattagctgggcatggtggtgtgcacctgtagtcctagctactcgggaggctgaggcgggaggatcccttgagcctgggagttcaaggctgcagtgattcttgattgcgccactgcactccagtctggtagacagaccctgtctcaaaacagacaaacaaacataggtagtgccttctgaccgcatccttacatggcagaggggctagacagctctttggggtcttttttttttttgagacggagtcacagagtctcactctgtcaccaggctggagtacagtggcgctatcttggttcactgcaaacttcacctcctgggttcaggcaattctcctgcctcaggctcccaagtagctggggctacaggcgtgcaccaccacacctggctaatttttgtatttttagtagagacggggtttggccaggatggtctcgatctcctgacctcatgatccacccacctcggcctcccaaagtgcttggattacaggcctgagccactgcgcccagcctgaggtctcttttataacagcactaatctcattcatgagagctgtatcctcgtgacctactcttctcccaaatgtcccatctcctaataccatcacgttggggattaggttttgacatatgaattttggaggagcacaaacatcctgaccgtagcacctccctttccccagcaggcagtggaacgctctcctgatggtcagctcctctgtggacacacacccaccactttcccctctctccagctatatgacgcgtgtctcccacctccccacaccctcccttttcctttggactcagctttcctcctttcacatcctccctctgacacctgtacttctgcctttgcttttccaaggccgatcacatccctgttctattctgttagtcacactcagagccttacttacatgggatgtgtgccatcgtgagggttttcactgtgggtctgtacatccttgtgactgcctattgtttactgcaggatcaagcggtggcctgagtgcctctcctttctagatagccttttgtttttctctcccgatgcttgcttcttttcttctccctggcttcattttacatcagtgctatttagtttttgttttttttgttttttgttttgatagggtctcgctctgtcacccaggctgagtgcagtggcatgatcacttctcactgcaggcttgatcttcctgggcgcaggtgatcctcccaccccagcctcttgagtaactgggaccacaggcacgtgccaccatacctgactaattttttgtgattattattattattattattattattattattatttttgagactgagtcttgctgtgtcacccaggctcgagtgcagtggcgctatcttggctcactgcaagctccgcctcccaggttcacgccattctcctgcctcagcctccccagtagctgggactacaggcgcccaccaccacgcccggctaattttttgtatttttagtcgagacagtgtttcactgtgttagtcaggatggtctcaatctcctgaccttgtgatccacccgtctcggcctcccaaagtgctgggattacaggcatgaggcactgtgcccggccctaattttttgtgatttttatagagtcagggtttcgccgtgttgcccaggctggtcttgaactcctgggctcaagaaatccacccgcctcagccttccaaagtgctgggatcacaggcatgagccatagcgcccagccagccatctgtgctatgagttaaggagataagagttaatgtttatgtccattttatggactgcaaaaactgagcccagagaggggaagtgattgactcaccctgggtgttgagattgctgagctagactgcagttgcctcagcactcctgcctttcactgtggaccagggcatggactggggatgtgacgggaaggagggaattcacaggacggccgagggctccgccctcactcacttccagcagcagaggagacagaggagtagagggttagttaaagcccctggtggcagcagccactccagccctgcagagtggctttttggcatcccaccttttggcatcccacctgcagctgccctctgcggaggaaagtctctttgccctgaccctgggtctgtttttgtttccttcaggtcgccctccaccccgaggcacccggccagctcctggaggctgcatccagcccaggggccccattgagcaggtgtaccaggaaattgccatcctcaagaagctggaccaccccaatgtggtgaagctggtggaggtaaaagggtggaggcgcccaggagggagggaggccctggctttgttaatacccaaacaccccgccactggtttccagggagagccaggtcacaccagaccgctcactgcagggctgagttgtatttactgctccctaagagtatttgttactcacattaactattttttctcttctttcttttgcctgctttgtttttctgtcagatatttattactctcattttacggacaaaggaattgaggctcagagggatcccttcacccatttctgtctctttgaagctggttctctttctacttacacatatgggtagtcatagcgcaaaagcagccacacacatgatgtaaacaaatggcatggctgtgttctagtaaaactttatttacaaaaacaagtccgggtgcactggctcgcgcttataatgacagcactctgggaggccaaggtggacagatcacttgagatcaggagtttgagaccagcctggccaacatggtgaaaccctgtctttactaaaaatacaaaacaaacaaacaaacaaaccagacagagggctgaatttggcccacatgctgtagtttgccagcccctgctctagatcagccgttctcatactttttggtctcaggatgcctttgtactcgattaaaaatacaaaaaaattagctgggcgtggtggcgggtgcctgtaatcccagccacttcaggaggctgaggcaggagaatcgcttgaactggggaggcagaggttgcagtgagctgagatcacgccattgcattccagcctgggcaacaagagtgaaactctgtctctaaaaaaaaaaactttttttgaagacccaaaagcactttcacttatatgagttatatttattaatatctaccacattataatttaaaactgagaaaatttaaactattaattatttaaaaacaataggctgggcacgatggctcacgcctataatcccagcactttgggaggctgaggtgggaggatcacctgaggacagcagtttgagaccagcctgagcaacatggtgaaaccttgtctctacaaaaaatttaaaaaattagcccggtatggtggtgcacgcctttggtcccagctattccgaaggccgaggtgggagaatcacttcagcccaggagttcgaggctacagtgagccatgattgtgccactgcactcgagcctgggagacagagtgagaccctgtttctaaaaaagaaaagaaaacaataagcttattgcgtattaacatgagtaatacatttttttttttttgagacggagtctcactctgttgcccaggctggagtgcagtggcacaatctcagctcactgcaacctctgcctgttgggttgaagtgattctcctgcgtcagcctcccaagtagctgggactccaggtgcccgctaccacgcctggctaattttttgtatttttaatggagatggggtttcaccgtgttagtcaggatggtcttgatctcctgaactcgtgatccagccgccttggcctcccaaagtgctgggattacaggagtgagccactgcacccggccgagtaatacatttttatgaaaaataaaaagtagaagagtggcttcatttttcatttttgcctttttttgggttactgtttggtttgataggagacatttggattctcatctctgcttttgcattcaatgttttgtgacatcacatatcatcaggtttctggaaaaccctgtagactagtggagaatgatagtcaaaaaggcaaatactgtcttcgttttaaagtgaaaatagtgaaccttgtaaactccatgaagcatcttggggatctgcagacatctccagattgtgtttggagcacctctggtctagacgacaaggacttgtcaccgtgctggatgttcagagtgccatgggagtacaaagcgggggcagccagctcactgggagaagctgggagaggcctcttagaggaagtgatgtttgagatggccgtggtggttcctggatgagaagtcacggaaaggcattgcagggcagggagctgcatgtggaaagggctggaagcctctgtttgggggagtacatggtgccttcgggagatgtgagggctagctaccactttgcctgggactcatctggtgcagaactctaggcggacaaggccctgggtgtgccttccccacagggcatggctcagggcttcaggctgctagcccaggctctgcctagggtgcctccctttcttggggcctgttgtcttattgatcttgggtgactggagaaagcggacgtgatgagggaagaatcagggggactagtctagccagggaggctgcatttgtttcttcccaaagaagagagatggcagttgcaggccatcaccaccggtcacactaagtgacacaatctcgactcactggtgctagagttggccattttccaggaagcccaagggcatttggttagcgaggggccctgggtcctggcagggtgtcttttctctccgctgccctatggcatttggccttttcacccaacaagactctttgccagcccatctgtttgttcattcatcagatattccctgggcaccttctgtatgccgtgccctgtacaggacgccaccgaggaaatcaaggtggatgtagcctgatgcctgccctttggagagagagaaagtgctgtggctgttctgggcagggagacatcatttcctgtggggttaggggcaatggggaggcttcgtggagtcacttgagcccagataggatttgaattttcaccctgaacaccgttgtctcctaggagctgggttggattcttttttttttttttttgagacagagtcttgctctgtcatccaggctgaagtgtaatggcgtgatcgtggctcactgcaacctctgcctcccaggttcaagcgattctcctgcctcagcctcctgagtaggtggattactcaggcatgcaccaccacaccggactaattttgtatttttagtagagatggggtttctccatgttggtcaggctggtattgaactcccgacctcaggtgatccgcccgcctcggcctcccaaagtgctgggatttcaggcatgagccactgcgcccagccggagataggctggattcttattcaagcatgagatatttccaggggagtattttggcccctcccttttgcgacctcctgagtgttcagatcctcgaggatcagacagagaggcatttattttccgaatagccattaggatctcacactctgggggttttccctatcttccatcttaactgggaaacacgctgccaaatgcagccctcctgttggcaaacgcagccacgtggatgctgcctcctccctgctcatatctattctctctttttctcccccgccatccgtctcctgcctattccatgtggctgtgccaaggtcctggatgaccccaatgaggaccatctgtacatgggtaaggaagcccttttcttctgccaccctcacccaggcaccacacctgccaatgcccaggggtcctctcgaggcagcctgtgccctggcaccttccaccaaagacagctttccctttcctggtccagctggccccaccggaggccacacccctggttgggatcagcaggtggaagggagttcttgctggaactttatctgatcctattcattcatttgcatgtatttattttttttgagtcagggtcttgctccgttgcccaggcttacagttcagtggtgtgatcacagctcactgcagccttgatctcccaggctcaagtgatcctcccacctcagcctcctgagtagctggattataggcatgggccaccatacccagctaatttttaaaatttttctagagacaaagtgtcactatgttgtccagcctggcctcaaatgcctgggcccaagagatcctcctgcattggcctcccaaagcatgtatatattgacaacctcctatatggtgggcactgttctaggtggtacacagaaaaaaggtagaaaaacaattttatatttaatttaacattgtataggaaaaactataaccagcaccccaaactcatagtttcatggatattatcatctaggacaaggctaaaaaattaaaaactgagtcaatttaaagaaaaacattcaataaataattgatgtggcatataggtatggccagattataaacatagtaggcaaataaatgaagtttggggagatacagcagaaatcacaatatgccaaaagtcattttagcccagaatggcattcttagcgtaattctctcacttgggaccccagatccaggtcagaatggctttgagctctttctgaggcgtgcctttgttcattcaacaaatgttacaatttgtcagaccctgctgtaggttcatcagggacaacattcaaaaacccctgtccttggggagcgcacctgagtgtgatgcgtgggttttgaaagcgacaacaccgtaacaaaacaaaaaccccgagcaggacacgaggggctgctagttttgggttgggggatggagaaatacagtggctccccagggaatgtctcaccaaggtgacatttgggcagaacagcagggaccaggtggcagaaggtattttacaacattgtaaagaacttggatcgggcacagtggctcacccctgtaatcccagcgctttgggagtccgagcgggtggatcacctgagctcaggagtttgagaccagcctgggcagcatagcgaaaccccgtctctactaaaaatacaaaaattagctgggcatgggggtgtgcacctataatcttggctactcgggaggctgaggcacgagaatcacttgaacctgagaggcggaggttgcagtgagccaagatggcgccactgcattccagcctgggcaacaaagtgagactgtctcaaaaaaaaaaaaaaaaaaattggctttgactctgagagtgatggaagccattggggggtttgagctgacgggtggaatgagaataaagagaacatggtccaagcctcaaagaagagtttcgtgatctgcttgagctgggcagctgcagggatagtttttcacaactcgaggtggcagttgcagaaagccatgctaatttggggtatgtgattccagtggttttgaaaatcctgacacggttatattttactttccagccacagccgtgtgagactgagacagacagggcagtgcatgaggccgggtagtaggtatcagaaagggtctgcagctacaggcctgacatgcaaagggcagaaaactcagtccaggtgcggtggctcatgcctgtaaccccagcacttgggaggctgaggtgggaggattgcttgaggccaggagtttgaggctgcagtgagctatgattgtgccactgcactctagcctgggcgacagagtaagaccctgtctcaataaaacaaaaaaaggtggaggagggggctgggtgtggtggctcatgcctgtaatctcagcactttgggaggccaaggcaggtggatcccctgaggtcaggagttcgagaccaacctaaccaacatggtgaaaccatgtttctgctaaaaatacaaaattagccagatgtggtggcacatgcctgtaatctcagctacttgggagggtgaagcaggagaatcacttcaacctgggaagcggaggttgcagtgaaccgagatcgtgccattgcactccagtctgggtgacagagctagactttgtctcaaaaaaaaaaaaaaaaaaagtagaaaactcgatctctatttctagaggttaaaaaattcccacccactgctcagccccaaaagtggttgaactgttagcgactgaaaatagacctgtttcaacaggccaccctccctcatgccacctgatttatggtgcttgggtgggtgggaggatggtgcagaaattcatgaagcttgcaagtgaagacttaaataaccaaggcaggaaaggccagagctgagggggccagcgctgggttgtctgtagaagctgtaccttagcagcattgcctttgtttttaactacagcctgaagcaatagcaaatctgccctaactcacactggttgatgaaactgaagatggggaaggcctgggagagttcagttcttttcctgatcagaacctttaagccttctttttgtctgagtagcttccctgttccccttggccacctcagcccttggagagctttgaaacaaccctttggtttcatttttaaaaaatttttttgcctgtaaccccagcactttgggaggccgaggtgggtggatcacctgatgtcagaagttcgagaccagcctgaccaatacggtgaaaccccatctttactaaaaatacaaaaaattagccgggtgtggtggcaggtgcctgtagtcccagctactcgggaggctgaggcagaagaattgcttgaacccaggaggcagaggttgcagtgagccaagatcgtgccactgcactccagcctgggcaacagagcaagactccatttcaaaaaaaaaaaaaaagtttttttaatttttgtgggtacatggtaggtggatatagtcataggttacatgagatgttttaataccggcatgcagtgcataataatcccatcatggaaaatggggtatcccctctggtttctattacatgctcatctcattgtgggtgtatgattccagaacaacaagcaaccccagagtcatcctccactggattttgaaatcgactgtgctctttttttttttaacttcctaaagtacagccttgtattccaatttatgcttgtcatagcagaatcaaattaaataactataccacgtgacccagaaattccactcctaggtatatacccaaaagaaccaaaaacagatatccacacatgaacatatccatgtacacgaacgttcattgcagcacttcccaacagccaaagagtagaaacagtccatatgcccctcaacagatgaatggacaaagaaaatgtggtctatccatacaatggaatattattcagccattaaagggaatgaagcactgatccatgcaccagtgtggatgaaccttaaaaacgtgctaatgatgctaagtgaaagaagccagacacaaaaggccacatagtgtacaattccatttatatgaaatgtccagaacaggcaaatctatagagacaggaaacagattggtggtggccaggggattgagggagggaagaatagggagtgactgctaatgggtatgaggttttcttttgaggtgatgagaatgttctggaactagatagttgtgatgattgcccaaaattgtgaatatactaaatgccactcaattgcacgctttaaaatgggtaattttatgttacgtaaatttcatctcaaagaaattttttttttgggacattcttgctctgttgcccaggctagagtgcaggggtgcaatcttggctcactgcaacctccgctgtccaggttcaagtgattcttgtgcctcagcctcccaagtagctgggattacaggcacctgccaccacgcccggctgatttttgtatttttagtagagatagggttttgccacgttggccaggctggtctcgagctcttgacctcaggtgattcgcccacctcagcctcccagagtgttgggattacactggcgtgagccaccgtgcccagccccctgccgtgttttctttgaccagtggatcctgggccaatttgagcactagaagtcaagccagactgtgggcctggggacgtcagaaatccctggttctttgccttctgatggaaatttagcaaagcaggaccttggccagcttggttcagtggactgttcctctccccagctctaatactagtttctgtctttcttggtgtttctggaggtggttgggaggtggggaggacagagagagatggatgttcagtttcccatgtaacagtttcacccttttcttccctacagtgttcgaactggtcaaccaagggtgagtgtcccagctcccagcaggggtgatgcaagaagcttctgtagctgcatagctgagtgaggtgccactgggctctgctcatgagagagggcaagggctggcgggtctgctttgtgtttcacatgagtgtcgacctttcaggcccgtgatggaagtgcccaccctcaaaccactctctgaagaccaggcccgtttctacttccaggatctgatcaaaggcatcgagtactgtgagcagggcctgcgggagggctctcacccagtgggtagttagcattctgagcgtgggtgcaaagtggaaagtgtcttattttcttcctggagcacagggaggtgggcgggtggattggggtcctctagagggacagaactaataggagatacatatatatatatataaaattatatatataaaattatatatataattatatataaaattatatataattatatatatataaaattatatatataattatataaaattatatattatatatataattatatatatatttatatatataattatatataattatatatatatatatatatataaaattatatatataatatatatatataattatatataaaaaattatatatataattatatatataaaggggagtttattaagtattaacttacacgatcacaaggtcccacaatatagtctgtctgcaagcttgaggagcaaggagagcccatctaactctcaaaactaaagaacgtggagtctgacgtttgagggcaggaagcatccagataggaaaaaaacataggctgggaggctaggccagtctcacctttcacgtttttctgcctgctttatattcgctggcagctgattagattgtgggtctgccttccccagcccactgactcaaatgttaatctcctttggcaacacccacacagacacatccaggattaatactttgtatccttcagtccaatcaagttgacactcagtatcaaccatcatagtgggaaacagaattgtgtgaaatgcagaatcagggccagctgcagagagccaccctatggccatggtccaggcgagccaaaacccttcttcctgccacttggcaaaatgaagagcagtagcaatagtgactatttagcactttctatgtgcaccaggcactgtttggggctctattttttttgtctcttattcctcccagtgaccctgggatcagggtcctgttcacctcctggaaccttagcttcctcatctgtaaaatggggataacatatctctcaccagggctgagatcagccagtacacatcagtggtttgattggcaggtgtcctttctgcttctgcttgttaaacatcttagctctttttttcctttgagattcttgccctgttgcctgggctggagtgcagtggcgcgatctcaggtcactgcaacctctgcctcctgggttcaagcaattctcatgcctcagcctcccaagtagctgggactacaggtgtacgccaccatgcccggctaatttttgtattttttgtagagatggggtttcgctatgttggccaggctggtcttgaactcctgacctcaggtgatccccctgccttgcctcccaaagtgctgggatgacaggcgtgagccaccgtgcccggccaccacgttatctcttatccctgcctgtcacataggatggttgtgaggtttaattaaatgtaaaatgtgaatgtgaaacacaacgcagggccgggcccctcacttggtgctctgctgctgctttcactgaaatcgtcttcatcatcatcatcaccccagaaatggcagttgggtcttccaggccatagaactgtcctgtaccatgggctgatatccagccaggaggagttagccaagccccgagttctgtgtgtggttcacatttcaaatcggcctgctcaggtcattgtcggtttggtaaatcagttgagtattggctgttggtaaatgaaactatgtttcactgtcagtttcacaactagctgtgagccaagcccagcaaaaactttccatgcactgtcacttgtgacttaataaataacaggcgattacgaattgctattggcagtgttttatgtgtcattgttgagaaggggtggggtgatggtgggctgggacttccttgaagacacttttcccctcatcttttagagcatgtcagtgcccagcgggtttggggagtggaaggttggaaaaggcctggggctgtgggagacaaggcatcagaggggtgccatgcctgtgtctccaggccatgtggccgcatagaggtgctcacgaggttttcctgcccctatctcccacctgctgtctacgcctccccagtacactaccagaagatcatccaccgtgacatcaaaccttccaacctcctggtcggagaagatgggcacatcaagatcgctgactttggtgtgagcaatgaattcaagggcagtgacgcgctcctctccaacaccgtgggcacgcccgccttcatggcacccgagtcgctctctgagacccgcaagatcttctctgggaaggtaagcttgggcctgcctcagccacagagttctgcctgtgttagtgtcttctggattgtaagcagcagaaacccaacgcacacaggcttaaacagtgaatcccctggatcaagatactgaggggtaggcttcaggcttggctagatccagggactcaaacagaaaccatctcccgccatctttcagttgtttttcttatttggtttcctccacaggtgggtcaggcacccagggaccaggttactttctatcatttgccaacctcagtggcaagagcattcctcattctgaatagtgcctgtgaaaaccctggggttggctctgattggcccaacatgggtcatgtgcccatgcttgaaccaatcactgtggctgggggtagtggtgctctcattggcctggcctggatcctgtgcctgccccagagcctaggagacaagattggtcccgccccaactccaagggctgaaagtcaagaggtggttccccaaaggaaaactggaggattggaggctggaccgccccttgtgccctcacactaagctctttttcttgcaggccttggatgtttgggccatgggtgtgacactatactgctttgtctttggccaggtaagagggcggggtgtctgtcccctcagtactgctgggtggcccctgggttaatagtcacccttgcggggagacagtacttacttatttaagagttattttaggctgggcatggtggctcacgcctgtaaacccagcactttgggaggctgaggcaggcggatcaccagaggttaggagttggagaccagcttggccaacatggtgaaaccccgtctttactaaaaatacaaaaaattagccaggcgtgatggcgcatgcctatagtcccagctactctggaggctgaagcaggagaatcgcctgaacccaggaggcggagcttgcagtgagctgagattgcaccattgtattccagcctgggcaacaagagcgagactccgtctcaaaaaataaaataagagaagagttattttatttctacacctagatctcaatgtgaaaaaggatgccttcctaaatatacatgtgtatgtatgtcatgatcatatctatgaaaaaatgatctgttaaaacagaaggattggcagaggctctagagtttataaatagttgataaatttagggcaaggacagcagttctgccacctctcccatttctgagcccaaggcagacatcactaatcaataactgtgctcgttcctcctgagcctgatactgctctgatgttctttccgtcagggtattcctagaagcttttgtcagaggggtagcattggaatggaagttaaaagctgtttaccattattgatttagggagtgctgtttgggcttttctgttgttgttattttgttattattgatatctgggggcttctctctctatttttttttttttttttttgagatggagtcttgctctgtcacccaggctggagtgtagtggtgcgatctcggctcactgcaacctccgcctcccgggttcaagccattctcctgcctcagcctcctgagtagctgggactacagatgccagccaccacacccggctaatttttgtatttttgtagagatagtgttttgccatgttggccagactggtttcaaactcctgacctcaaatgatctgccagcctgggcctcccagagtgctgggatttgggattacaggtgtgagccaccacgcctggccttctcgttttaactctgaagttcagtttgattatgtgagcaataaaaacgtagatttttccctttcctgagcttgtgttcttattgaggaaagcctaagaaactggtcccatgaagaagtaaaggagtttataccgattgcctctcaatatttgattagaaaatttttcaatcatgtagcaaagctggaagaagtgtccagtgaacacccacatacccaccacctggattctactatattaaccttttcctgtgcttgtctgttcattccttacccatccctcagtccatctggtttcttaatgtatttcagagtaagttaccaccatctccactcttccttccaaatgccttagaaggcagtgattagctagagctcaagtcactgctcttaatgaaatcgttttccttagacgggtggttcaggtacctctctgccaccttctccaacattttcagtgtcccgtgtaaggattccttttccagcacacatgaccaagctgctcttgagtcaggccctcagctgggtgaaagcatcgatttgtcacccagaaggtggtgcaaaaataggcttcagagtcagctgaatctaggcttaaatccctcttcgtacttcctgggacacattatttctctgaacttctgtttttctcttctgtaaaatgagaatactacttattatttctgatgacttctgagaggattgacagaaataattcaagtatccattaattcagcagatatttattgagcccttactttgtgcaggaacgctcctaggcacggagagtccgcagtgagcaagacagccagaaatccctgccttcttggagctaacgttcccgtgggaggggttaaacaataaacaaatctgtacgataacgtcagggataagtgctacgatgaggagtgatgtgggcggtggcggcattgggggttgtctgttttagacagggcttcaggaagtcctccctgagaaggtgagctttagtcagacacctgcatggtgggagagaccaagccacgtagatgttggtgagaagaacattccagggacggggaacagtgaatgaaaacctcagggcagggcgtggcgcgatccaggctaagcccttgaaaatcactgctgctgccacaaataacacaaagtcttttgtgttattcttgttgttcctgttgttcacctggcaagtaggtgacgagcagtgtttgctttggtgtaagtaggtaaactgaggcccagctacagagggagcctgcagtgtgcttgggaaaggctctagcccttcgagagggccattcctggctctgccctgcgtcggccaggccccacacccctgtgtcttggccattctcggggagaatgggaactgcttgccccctagcctgggccgcaattgttgatttctctgctgtatcctatgtggagtggcacagcacaggtggccctcgaagggcagatgtggccgccattgactgccactctgtccctggcctctttgcagtgcccattcatggacgagcggatcatgtgtttacacagtaagatcaagagtcaggccctggaatttccagaccagtgagtatctcccgccgtcccgcatctctcctgtccgagttcttggcggtcccgtgtctgccaccctgacgcctctccatccccaggcccgacatagctgaggacttgaaggacctgatcacccgtatgctggacaagaaccccgagtcgaggatcgtggtgccggaaatcaaggtacccttggctcagcctgtgccccgtgctcggaattgtttggctcagccatgcctcagccagaccccacacccttgtgtccacagcaccacaccctccttggcaccgctgttctcctatgccccagggcctctgagctgctgggggctgttgagggctgggtaggaagatttgggcattgtgtgcactgtgactgtgggagtgggatctatgacccgccagcctgcacttgctctgattggcgtgggctgatgggatccaccctctgcagaccggcatggggcctccgtgctccacaccctattcccagagctcaggtcctttccaaaggcccgtccctttgagaaactgcagtgaggatgggaggaaattaatgagcaattcgacctccccagcctgctgaatcccaccctcttgcagaaagcacttttaggaaagtgtattcccctacacatctccactaatgccacacacatatatctggccctctaggaaatctagagatttgccctgggacttcctaggcagctagctaactggcatttgaaggtcttaacagaaggcagcccaaaaaatcatggattggggcttggacccaagggggcagacccctgcctgggtcctctcctgatcctgtcctgccagctggtcccaccatgcctccaagcctctcctgctgtgagatggggagaatgctgcctgctgtgcactgagcctcccaggtgtcagggattgtggctgaggagtgatggatgctccttgggcagccaggcaaggcagatgccaaattcccatcacttcggccaagacccggggccggatggagaatcgccccacttccatttcagccttgtagctcctcccgtcctgtctctccgtcttcatgtttccgcccctttgctcacccctgccctctgctcgccagctgttttgcatgcctgaccacaggcccttgcctctccgtcctgcatgcccttgtggctccgctcgctggcagggccccccggtagccagccacacctgcccctcacccctcctgtcgttcgttgaagctgcacccctgggtcacgaggcatggggcggagccgttgccgtcggaggatgagaactgcacgctggtcgaagtgactgaagaggaggtcgagaactcagtcaaacacattcccagcttggcaaccgtggtaaggtggatggacccctgacccagagcagggacccaggagcctgaggtggggcctggccaggacaggccggacacaggcgggtgcccgggagtcagatgtccgggggccacccctaatccacagctgctggcctctgggccttggtcatgtatcaggccaggtgacccctgcatcttctgagccaggttccatgttaccataggaaggggaagattatccttctggaattcctgctttcagagctcatcaggggagaggaactaggagaagttccaggcaggggcaagggttgggagctggagcccaggtctctaagccaggattcccgcctagctggaattttaggctccagggtggatggcgtagcatatctcacgtctgctgtgtgggcagccaccaggggtaggggcagggacttccacgcacacactcagaaagttctgcccatctcctgagagtgagaattgcttaggagcaagtaggtccccttttatggccttgaatttggatcctgacccaggaagaaggagccagaatgtagagtcctcaggcctaaccttggaggctctgggaatcgccactgaccaagtccctgtccaggagggcagttagctccaagagagagaccaagagtcccagggatccaggttccaggcagcaggcttggggacagagaccagcaggttgtcccaccacagccacctcgaaaggcctggttgcagttggccagcactagtcccagtgggccggcgggcccctgggctctgggagggacccttgagactggctggaaaggcacagaaggtccagctgtgaaggattgcccctgtaggagcccagatgctgctcctgctcctccagctttgcacctctcttctctgcttccccacacacttcctctctcctcctcccaaagctgagccctggctggggcatccatccacatcttcctccactctttccccacctggggctgtgcaggaccttcactgttgaagacccacccacacccactcacccttcctcaaccaccccttgtgcctgtagacgaggagacagctggcgtcggactctgcacccaccgtgggttactgtgttccaggctcaggaggttctcagtcctgaatcagttgccctccctttccttcctgggtctctgggacgggttcttgggagaaagcgtctggccctggaggtctggagtaggcattcattattcgggaaacacttgttgaacaccgagtggtttctcaggcctgtgctgggagcaggggctgggtggagtgatgaacaaaacccccatggcctctgccatgcttgagaggcagatgctggtcaaaccaacaaatgtatgtacagtgcagtagagggaccacaggacatgcccctaatggaggcacacttggacccactgggaagaagtggatagacaccgagaggatggtagggtgttaactccgccgagagagggcggacgggctaacacactgggtggggccactgaagcagggcaaggaaggtggagggagggtgtggcgaggttttacatgtttactccaagagcatgggtttgaatcagggtttgaaccagggcagctggagcagggatgggcgggtagatactgggaagtggtctgacttgggacaagatggcaaggtccaggccccctgcatgtgttcatcatttagcaaacacggagcagccagtgtgtgccaggcataggtgtcaaagatgagcttagcccagtgcctgctctcaggggtagggggctggggggctgggggaggggctcctggccttataagaaagatggacctgggaagaatcagcctcctgtgtgatcagaggccagtgcagagagatgcaagggctgggggcttcacagaggaggagctcctgctctgggttgacaaggccacaggggaggcggcagggtgggctcacctggggagtgacatctgctcagacacagaggaaagaggggctggcatgtcccagtgactgtaagaacctcagtaggggaagaggccttcattctctctctcttttttttttgagatggagttttgctctcgttgcccaggctggagtgcagtggtgtggtcttggctcactgcagcctccgcctcccaggttcaagcaattcttctgcctcagcctcccatgtagctgggatgacaggtgcctaccaccatgcccagctaatttttgtatttttagtggagacggggtttctccatgctggccaggctggtctcaaactcctgacctcaggtgatccacctgcctcagcctcccaaagtgctggtattacaagcatgagccaccacgcccgcctccccccccccgctccttcttttaaattgaggtagaattcacataacataaaattaaagtgaacaattcagtgacatttgggacattcacagtgacatgcaattatctcctcaatagttctgaacattttcattacttcacacccccgcccatcagcaatgactctccattcacctccccccagccctggcacccactcacctgccctctgtgtctatagatttgtgtattctggtggaatcctacactctgaggcctttcgggcctggctactttgacgtaggagaaggttttcagggtccgtttgtgttgtagcatggatcagtgcttcactccttatggctgaatcatgttccattgcacagacagaccgctttgagtttatcttcttcagttgatgggcatttgggtgtttgcatcttttggtaaatcagtgtttcttaaacacttatttttcttgttagcagcaaatgcttaaaaagtcagaagctctgtgaattcccaaaacagcttgaaggggcaccgtgccctggttggggtggggtgaggggcccagtgactcttatggggccctcaggccattcccttcatgggaaatggcagccaagagcatcaccaagaatgactggttcacgtccttgctccagaactttccggggctctctggctgaccacaggccaagttccagacccctctgggtggggatgctgagtcagggagtgaggggaccagatctgggttttggaagggatgggagggagggaggtggaaagcagggaggcctgggagagacgctgagcagtggctgagggtgtggtgcaggacagcaccttttcccagaggattctttcggcgggggttggttgcggggtggtgctgcccagtttctctcaaagtctgccatcggtcaccagccctgggagctggcaggggctggggagaaggaagagggaggatgttgcccagaatcgcccccacatggccaagcagttgcctgccacctcctcttttctccctcttcagatcctggtgaagaccatgatacgtaaacgctcctttgggaacccattcgagggcagccggcgggaggaacgctcactgtcagcgcctggaaacttgctcacgtgagtggccgcctgccttcttgggtgggggagtggtggctggaggctaggcttggggcagccctgcccagaccactctgcacaggtcctccctgaagtggtgccatctggagagactcagatgaaacccacctggtgcactgggacagtcagcaccccaacctgggctcagcccacctccttttgctgacagctaatccacctgaagtttacctttctcgggaacttgcactgtagctggggggctcttggtcagtcagaagaaaagcacttttgtggcccgggaccgtgagtgcctgatggggaggtttgaggctctgtgctgggcgagcagtgtggtctcactcaggaccctgtgtgtccatgcagagaggtgtccactcatctgctgtcaacgccaccctggctccagctctatgaagctggtgtttggggtctgagtgtctcagggtgggggaacgggcatcccgtggatcccaagggtcccttctcacttcccttttccctccctctggtgattccagcaaaaaaccaaccagggaatgtgagtccctgtctgagctcaaggtaacgcccgcctgcctgtgccgtagcctctgctggggcctgaggggggcgggtgggcagctgcagagcacgggggcatccccacccgggcagatgctccttccagcctgggctgctgtggcccggctcaccgcgggcctccagacccagtattagaatgaggggcctcgggggcttggacccaatggtgggtcatgcatgtgggctggggctgcgggtgcatggcgctccagctggaatgcctgagaatgcacccaggtctgaagatcctgtgtggcacccatgtcttctcagtgcacgtcaatggtgttgaagctctgtcacggggcccatgggtgcccccccgagtccgcatggtcagcacataggtcaggcatgctgcactgtgtggctcttcgctaggggctctccagcctccacttctctttctttgatgtgtttagacctagaaaataagtccccttcctgcctgttgcaaagtaacgtaagagttccctcacccgagtggatgcagaccttcttgctgtcagccacccttccttcatacacatagccagcccaggtgaccagaacctcccaggacagatgaggctttgtgtccttatgagactgggagaacctgctgggcacccctgctgcaggtgctgtggtgggtggggaccccactgcccttcccactgagcacatcgtggctacctgacttggtgggagctccaggcagtcacttctgtttcttaaacatagctttactgaggtacaattcacataccatgtaattcacccacgggaagtgtatgattcagtggtttctaatacagacttctgcagccattaccaccatcaactttacgacattttcatcagcccaagaagacaccctacactccttagctgtccccatccaactcccccaccccagtaaccactcagaataggtatggatttgcctattctggacgtttcgtataaatggcgtcatacactacgtggccttctgtgtctggcttctttctctcagcatcatgttttcaaggttcatccatgctctacatgtattagtgcttcattccttttcatggccaaataagattccattgtttggatgcacctcactttgttcatccattcctctgtggatggacttgtctccaccttttggctatcgaatgaagactgatgctatgaacatttgtgtacaagtgttaggagttggcttacgagatgaaatggattgaccagcaggctggatgcagtggctcacgcctgtaatcccagcactttgggaggccgaggcaggtggatcatgaggtcaggagtttgagaccagcctggccaatatggtgaaaccccgtctctactaaaaatacaaatattagccgggcatggtggcgcacacttgtagtcccagctactcgggaggtgaggcaggagaatcacttgaacccaggaggtggaggttgcggtgagctgagatcacgtcattgcactccagcctgggcaacaagagcaaaaatctgtctcaaaaaaaaaggctgggcgcggtggctcacgcctgtaatcccagcgctttgggaggccaaggcaggcgaatgacgaggtcaggagatcgagaccatcctggctaacacagtgaaaccccgtctctactaaaaatacaaaaaattagccgggcgcggtggcgggcgcctgtagtcccagctactcgggaggctgaggcaggagaatggcgtgaacccgggaggcggagcttgcagtgagccgagattgcgccacagcactccagcctgggcgacagagcgagactccgtctcaaaaaaaaaagaaaagaaaaagaaatggattggccacccatcccgtgggagtcagggcttatatggtaatctaggaggaacacctgtttgggaattatttatgcttttgagagaaaccttgccctccagcatagagcagggaaaatggcagtccttcagaaccggtcttcagcagtctcagaaggcagacacagtccccagcttgtgcccagacagacgcctgggcagccccgccttgggtgtgagcctcacggatgatggagtggaaacccagcgggctggcctttcctcggccttcctcctctcaatctccattttagggtttgccaaaccggggctgcctcctgtctctgagcaagtctgctgttggtttctttcctattttctttctttctttctttctttcttttttttttttgagacagggtcttgcactgttgcccaggttggagtgttggagtgtagtggtgtgatctcggctcactgcaacctctgcctcctaggctcaagcgattctcctgcctcagcttcctgagtagctgggtttacagacatgtgccaccatgcccagctaatttttgtatttttttagtagagatgggggtttcaccacgttggccaggctggtcttgaactcctgacctcaggtgatctgcctgcctcagcctcccaaagtactgggattacaggcatgagccactgcgcccggccttcgtttcaatgagatcaaaattgcaagacaccagcagatggagactggccccaaagggctatgctgccccttcctttcttcacctgggatcccctgccctcagcccccagcaggtaggatgccttggtcatgggagctcacagagctgattcaggcactgggggtcttggactgggggcctgcctgccgtctgcagtaagacccaacccctaccaacaggcaactgcgagggcagagactgagggcctgacctaacgtctagttacagcgcccccctccccagggaccttacccacattctccatcagaaacatagcaagccagacatcacgcttcctttcccttgtgtaaggacagtctccctcctggacaggagacacggattgttgtgggggaaggacagacagtaacccatgtggcatgcccagtgacctccctaagaacaggggagctgtgtgatggtggtgaggggataggctcggggattcccctcgcacctgtcacgccatccacgctgtcacaccggcggctccagcctgggctcttcagggaaacaagggctctcctcctcccacttccaagagggaaggggcctcctcttctgtctgaggtgctcctccctcagggctggctgcaggagggctgaggcgggaggatccctggagcagttgtcatctgccctttcttgagggccagctgtgtgccaggccaggcaggggaggctctgatcacccccacacacaaggaactcaacatctggtgactgaggacaagcgtcacagtcccttccctgtaagggctcatagcctaagtgggggatcgaagtacctaaaaacctggtatgacaggcgccgtggggtggggggtgccttctacttgggatttgtgcagtgaattttggtgttacatagttttggaactgttgtacgggtccttgctatttttggcaaatgatgctggtctttcatttacagaggggctgcgtgcaaagtctcctttgaaaaatttatgtgagcaaggaaaaggggagaggatctcaaagactgggttacgtagatcacgttccagggggtgcgcgacggcccacttgggcagggggcccagatgtgggagcagctggctcagggcctcgctggcatttctcagagtcttaatgttggttttctgttcggtgagcaggaagcaaggcagcgaagacaacctccagggcaccgacccgccccccgtgggggaggaggaagtgctcttgtgagaggcagtccctgcgtggaaagttgctgggcccccgcccccggctcccccgcacgcatgcatccactgcggccggaggaggccatggagcccgagtagctgcctggatcgctcgacctcgcatgcgcgccgcgtcgcctctggggggctgctgcaccgcgtttccatagcagcatgtcctacggaaacccagcacgtgtgtagagcctcgatcgtcatctctggttatttgttttttcctttgttgttttaaaggggacaaaaaaaaaaaaaaaaggacttgactccatgacgtcgaccgtggccgctggctggctggacaggcgggtgtgaggagttgcagacccaaacccacgtgcattttgggacaattgctttttaaaacgtttttatgccaaaaatccttcattgtgattttcagaaccacgtcagatataccaagtgactgtgtgtggggtttgacaactgtggaaaggcgagcagaaaactccggcggtctgaggccatggaggtggttgctgcatttgagagggagtagggggctagatgtggctcctagtgcaaaccggaaaccatggcaccttccagagccgtggtctcaaggagtcagagcagggctggccctcagtagctgcagggagctttgatgcaacttatttgtaagaaggatttttaaattttttatgggtagaattgtagtcaggaaaacagaaagggcttgaaatttaataagtgctgctggaaggggattttccaagcctggaagggtattcagcagctgtggtggggaaacatttctcctgaaagactgaacgtgtttcttcatgacagctgctcaaagcaggtttctgagatagctgaccgagctctggtaaatctctttgtcaaattacgaaaacttcagggtgaaatcctatgcttccatgtacattacatggcttaagattaaacaaaaacatttttcaagtctctaactagagtgaactctagagcacagtagttcagaaactatttagagcttccaggatatatttcacagcttcaggcatgtgatcagttagagccgatgaaacctatgcccgcctgtatatatattagcagcttagctagttcataacctgtatattctaaagactgctaaggttttgttttcattttaaatcctagctgattgttgtggtcaatgaaatacccagtttctggagggccaggtgggaaatgctttcactggaccaacacacaaatgatcatcctgaggatctgagcttccctagactccacacaataaccttggggcacccttttagagaagactgttgaaacccacagcactcgttggggtatgaggaaaccagggcttggcacaggaagttcccctttgtagctaaaagtccagaaagaaagggttcatctttttgacttccaactgatattgggaagtttggttgaggttcaagtgtgactccttccagagccacaggtaggggagtgtgaagttgagggggaggaaagctggaaggactctgccttgggagattcccagctctgctttccagcgcttggtggaatctgggctggggaaagacggcaccgggaaactctgcttccccattgtttccatctgatcagctgtggtgtgaggacttctcagacaaaggcaaggcctcgtgcccctgcccagcccattcatggagccctgggccttcttggcttccatagatcctaagctcttgactgtagtttagccagacttgttttgctatcttataagcagttcagaattagggaatgctggttttgaagagcaaaggacaggtagtctagagagggtcgtctggcctgcttgctgggtctttgtaacccagcacttcctcttgccctcctggctttatgtttatggggagaggactcaatagctccaccccttctggcaccagatggggcttggttagtttgcaataagcaccttgcagaggttaaagccagcgggtccctagtcttaggcccagcctgcttgtgtgggctctggcctggcctggtggctggcccagggggcagcagtgcttagagcttctgcagggcttctcttgtttacacagctgcatcagacaatgccatttctccccaccacggaaccttccatctaagatttcttccagggaatgccagcaatcaggcagcacccagctgtgggggcagtggggtgggggagacccacattgatgactttttttttttcttttaatgaagaaacaccaaagaaagctgtggaaaggacctgccccacatgaaaaggataagccaagatggctgtaaacacagagcatttgagctgccactcttggagcacattgatttttcaaaagccagctctgtcaggaaaggaggtgctgttatgagcagctcttccagtgggcaaagaggacgcccataatttcttccattgctagctcatctgtgggaccaatttggtgtaagcaacctgtggcctgcacttgtggcctcgaaggaagcacaaaccctccatccacttcccatttcctctgcccttttccacctcccccttccatcccaccagctgccagtggctcccagaaagccttattgagccccttgttgacacttggggctgcggaggcctctccctactggtctggcctttcctgagaggcaggtcttccgtcctcagagcctttctggaacaaggagaatgcctgtgcaggtggacacacaggcctggcctgtcgctctcacttgtcttccagcggggagcttcacgttgccgagtggaagaaccatgacctccacttgcttccaaggtgctagggaagtttcagggtacgctggttcccctctccagctggaggccgagtttctggggactgcagatttttctactctgtgatcgattcaatgcccgatgcttctgtttcattcccgaccctttctactatgcattttccttttatcaggtgtataaagttaaatactgtgtatttatcactaaaaagtacatgaacttaagagacaactaagcctttcgtgtttttccacaggtgtttaagcttctctgtacagttgaaataaacagacagcaaaatggtgccaagcctgggcctcttggggaggtttgtattggtgattgtttatttaggccgcctgccctgatgtctgtattccttcctcaggctgacagcgaggtcagatgcccaagtcaaggctaatgtattcagcaaatctctaatttagagcatgtcctaggaccttgctactcagtgtggctcccagaccagtagcgccagtgtcacctgtgagtgggttagaaacgcaggtgccggccgggcacggtggctcacacctgcaatcccagcactttgggaggccaaggtgggaggattgcttgagcctaggagtttgagaccagcctggacaacatggcaagaccccatctcttaaaaaaaaaaaaaaaaattaaaaaattaattgagtgtggtggtgcatgcctatggtcccacagctactcaggaggctgaggtggggggattacgtgaaccctggaggtcaaggctgcagtgagctgtgatcatgccactgcacaccagcctgggcaacagggcgagaccctgtttcaaaaattaaaagaaaaaaataaatgcagatacccaggcttggcttaaacctgctccccaggtgactcgtccgtgtgctgaagtttgagcagcactgctttcgcaggcaggtaattgcaagattctggtggaggccagacaggtgggcagcccccgagcagtctcagtcacactgaactatggcctggtatgccacatgacactttaccccacgaggtagggattaacctcgttttatggatcatcgtctgtgaggtgaggctccagaaagttaagtcagttgtccaagggttagaatttgccagcaaaacccttctggttttcttttttgagacagggtctcgttctgtcacccagcctggagtgcagtggcagtctcggctcactgcaatctccacctctcaggcttaagtgatccatccactttgggttccaaagtagctgggaccacaggggcccaccaccacaccagcccccacacccagataattcttaaattttttatagagacagaatctcactatattacccaggcctggtctcaaactcctggactcaagcagtcctcccacctcagcctcccgagttgctgggactacagatgtgcaccaccatgcctggctaatttttaaattatttgtagggatgaggtctcactacctgttgcccaggctggtctcaaactcttggaccaagtaatcctcctgcctcagcctcccaaagtgctgggatgacaggcgcgcatcaccacacccagcctcctgctggtgttcatggcatctagaaacacacccgcccctcaccccaacactggcttgctttcacatttgttttagaaaagaggctaaacagcatctcccccacttcggaagacagccagtgaccatcactccttgacgagcaagatcataaacacacccattgcccttaagtctgttttgtgctgctgttacagggacctaagactgggtaatttataaagaacaataattgatttctcacatttctggaggccaggaagttcaagatcaaggtgctggcaggtttggtatctggtgagggctgctctctgcttccaagagggtgccttggtgccgcatcctttggagggaggaacacttgtcctcgcgtggcagacagtggcaaggcagacgggggatgagctccctctctagccctcgtatagggcaccaaccccattcatgagggcagcgcaatcctgactcagtcacctccccaaggcttcacctcccaataaggttgccttggggatgaagtttccaaaatgtgaattttggtagacacattcagcccatatcaccattcctaaacattccagcttcatttgacccatgtgcctaagcaagcactttttattttttcagacagggtctcactttggtgcccaggctggagtacagtggcaccatcatagctcactgcagcctcaacctcctgggctcaagtgatcctccggcctcagccacccaagtagctgggactacagatatataccgccacacccggctaatttaattttttgtagagatagggtctcaccatgttgactgggctggtcttgaatgcctacgcttaagtgatccaccttggcctcccaaagtcctgggattacaggcaacaagcatttttttttaaaaggcagcatgaaccagagcttcaataaagggagttggtaaacttttttttttttttccaaaagcaagaaaagcccaggttggccatttatccagcagaagcagagtatttgtaaaataatggttcctctcagtacttggaagtgaattcatggcagaggcgaagggcaaactgcttcctctagggggattctgaatacctgatgcagaattcagctggtgtgtggctgggtgcagtggctcacgcctgtaatcccagcactttgggaggctgaggcggtggatcatgaggtcaggagttccagaccagcctggccaacatggtgaacctctgtctctactaaaaatacaaaaattagctgggtgtggtggcagatgcctgtaatcccagctacttgggaggctgaggcaggagaattgcttgaacccaggaggcagaggttgcagtgagccgagatcatgccactgcactccagcctgggcaatagggcaagactctgtctcaaaaacaaaaaaacacaaacatttagttggtgtgaagctgcagctggaaatagcttcatgaacatttcgaacctgtgcggagctaggtatgcgtgctgctgcttttggttggagacttttgggaagcaaacagggaagggagaggaagccacttccatgttaccaaaaattgtgttacccacagcatagaattgtaattttatgtcaaaatggaggcacaggtaagatgtcactagagaaaaagtgtcctgtgaactgtgcaggaagacaagctaatgacaaattattaggctttaaaaagtaggcagctgggtgcagtggctcatgcttgtaatcccagcactatgggaggctgaggtaggaggatcgcttaagcccaggaggtggagactgcagtgagcagtgattgcgccactgcactccagcctgggtaataaaaaaaataaataggccaggtgtggtggcgcacacctgtaatccaatcactttgagaggctaaggcagatggatcatttgaggtcaggagttcgagaccagcctggctggccaatgtggtgaaaccctgtctctactaaaaatacaaaaattagccgggcatggtggcatgcacctgtaatcccagctactcgggaggctgaggcaggagaatcgcttgaacccgggaggcagaggttgcaatgagccgagattgcaccactgcgctccagcctgggcgacagagtgagactctgcctcaaaaataaaataaataaataaagaagtaggggaaaatgtgcataagtgccagaaacagaccatcccatggaccttttctgagcacagtgagccggaatagtggatttactggttgtcgtaaaagggtaggaaggaaagttctagcacatgctatgagacaacagacagggattaagaaaatcacgctttaatgtctggtcctcgatcaccttagcacagcgcttctctgaggagaaatgccagctctgccgcatggctgcagggaatggtcggggggaagcctgcagcccaggcctgctacaagtctagtgactgcagccaggcggcctcccctgccgcataaagtgcttgaacagagccgccgtgcctcagaggactgggcctgtcctggagagagctggagacaggaggcttctgagcaaagccagctccagccctgaaagccacagcagtgccactgcgtcgggccagcgctcccccgacaaccccaggttgcgggaaaagcagagttgacccagccaagaacagactgctgacctcctgggccgagtgggcaaacagatcctgcacacaacacacaggagctgctggggaaccctgagtgcttgtggagtggagactcaatcagattccagaaatttctctggggtgatgtggtggccatttctccctcctcctcctctctgttctttgatggggctgtggagagcccaggtgtggggtaggcctcactggtccagctcactagcaagaccctgcaaagaaggacacaagcagatcaaggtgcccctgggaccccttgtggcaggcgggagggaggtgcgctcctgggacttcaccgccaggggttctcaagttggtcccaggcctggaacccaacccttcctgttccgcaaggtgcactgaagtagtgtgtgcccacaggcattctcagagcatgcattatcatcaccaacctgagatgtcgctcattgaaacgaggctgggtttaaagagtcaatctagtacaggggcctagggatggagcagctgctgagagtggcaggactgcccgggttaacggggacaccacgccacactggtgccagcctctgcagaagggcctccccagacaggcccacgcccagggctcccacacccaagagatgagaggcctgtgcctgctgggggccaggaggggcctacctgctcgtaatcttccacatatttatatttcttctcccgatagtagagtcttttcttcatgcagtagaggactatgatgtcacacagcacggtcgcctgagtttagcatagggtgagagtgagccaggatgcttgcaacccatcaacccatcttattctttgcgtgccccttcctgagaagcctggaatctttaccggaatggaaaggcactcccatctcttgggagaaggctgggacctgaggggggtggtcttggagaagggaaggtgggaggagggctgggggccaagggaaagaaggtaggagggtcaagtttagaaacacatctgaggtctagggcctagggccaggaccaggaccccagcccagggtctcacctcaccgtgagggtgaaggcagggcctaaaccactcaccatgcctagcagtgccaggccagagccgatgttgatcatagtggggatgatgtcaaatttccctgcctgccaagacaccgaaaaagaaaaaaagtgtttctgcaggggcagggagaggccccttgtccctgcagggagtgacggaggggagccagtggcggcgagctaccttcccaaacacaatgatgtcgaagcggatgccataggccttgatgagcgtgcgctgctcgttgccagccaggtctctgtagtacttggcaaacctgaggggaaggaggatggatcagggggagatggctggggcaggaccttgggccctgtgagagaacgttagagtggagctggcacaggtgaatggtccactctgccggctgaatggacgctggagcggctcggggcctctcctggctgaggcgggctgtgcaagcaggaggatgcggggcccacgaggtacaggggcacagggagacctcctcctccagcaccagtgtcctctcctgaacctgaacagtttgctctcaacatcccacctggtacatcctgcctgcctccctcaagggaccctgacctccaacatctaacagtaagaatgtgaccagccagcattgcaggaggggactaagccagccccaacacagcatcagtgcagggacttttttttttttttttttttgagatggagtctccctctgttgccaggctggagtgtaggggcaccaatcttggctcactgcaacctccacctccccagttcaagcaattcttctgcctcagcctcccgagtagctgggactacaggcgcacaccaccatgcccagctaatttttggattttttagtagagacggggtttcaccaagttggccatgatggtctcaatctcttgacctagggctttttaaatttatttattttttcaaagaaacattgattctgtgcacacagtcttcaacaacaacaacaacaacaaaaagaaccactcgttcgtcacacagataaagagatgaacaaaacgtcgtctgtcaacacagcagaatatgatttggccataaaaagagacgaggtactgacacaggctacgacatggatgaagcttgaaaacatcaggctaaggggaaggagccagacgcaaaaggccacatattgattatatgaaatgctcagaagaggcacatctgcagagacagaaagtagaccactgttgccaggggccgggggatgacagaagggtgcagggtttctttttgagatgacggaaatgttctaaaatcgactgtggtgaagcctgcacttatctgtgaatatagtgaaaactatgaattctgcacttcaaatgtgtgaacggtatggcatgtgaattgcatctcagtaagaccatttaaaaatatatggctgggtgcggtggctcacacctgtaattccggcactttgggaggccgaggcaggtggatcacttgaggtgaggagctcgagaccaccctggccaatgtggagaaaccccgtctctaataaaaatacaaaaaattagctgggtgtggtggcgggcgcctgtaatcccagctactcaggcggctgaggcaggagaatgtcttgaacccgggaggcaaaggctgcagtgagctgaaatcgcaccactgcactccaacctgggtgacagagcaagtcactcccttaaaaaagaagaagaaaaaaaaatatatatatatataatggctatatatataatggctatatatatatatacacatatatacatatacatatatgagagagagagagagcgagcacgcgagagagcgcacacgcatgagcaggggatggatggttggtgaagaaccgtcaagacataccatctgctgccccatgttctccagggatccatcaggagcctcggcccgcaccctagctccatgctctatctggcccacaacttccacgccatgggccaggcctgggagacacaggcagggcctggtgctgcccgaggttgggggataggcgtcctgagttctttccgttttagggctctgacctaagcttgaggtttccacaagaagtgtgtgacagtagagatggaataacacaaatctaactgctagaaaagaaaaattcaaatatctgctttactcagtgagccagaaggttcaaaaggacagcagatcccacaattacagaggtcttaggatcccgtatggatcggattccacacgtcaccactagggggaggcaagtgcagcccaaagcaccgctgaccgcgcccagggatggtccttgcagggcctcttttttttccccctgagacggagacttgctttgtcgcccaggctggagtgcagcagtgcgatctcggctcactgcaacctctgcctccctggctcaagcgattctcctgcctcagcctcccaagttgctgggattacaggcatgcgccaccatgcccagctaatttttgtattttttttagtagagatggggtttcgccatgctggcctcaggtgatctgcccgccttggcctcccaaagtgctaggattacaggtgtgagtcactgcgcccggcctggagcgcttcctttttaaggactgtgaaaaatgcaacaaagggtacgtggaaatttacctggctatagattctgatcatgagatcatcagctgtagtgggttgaacagtgtgtccccaaaaattcacatctacctgaagcttgggagtgtgaccttatttggaaatgggatattggcagacgtaatttgttaagatgaggtcatactagagtagggtgggccctaaattcagtgactgatatccttacaagaagaaaagacacagagacacatacaaggcagaaggcctcatgacaggagaggcagagactggagtgatgcatccacaagccaaggaacaccgtgggctaccagaagccaggagagacaagtaaggactctctccagagccttcagagcgagcacagccctgctgatgcctggattttaggttgtggcctctagaactgtgagaactgtgagagaatcaagtcctgtagttgcaagccactgtttgtgggactcgcttacatctgccccaggacaccgagatgccagcatttgcagcagggaacccagcaaggcctttcaggggcctcagacctgtgtcccctgcactctggagattctggcacaggttcaacctttgagaaaccaattcctgggccaggccccagaggcctttggactggaggatcacaagatcatccgctccttgaggcagtgaatggaggtcatggctgaggcaggtgctggaaagcttaagcccccagcttctcctggctgctctaagaaccatctcaacatgtttcttgcggcaggaaagggcaaggaggggtctcgggggccgggatggccccggagcaggacaccactaagggcattttcccagcatggccttcccgccgccttggacgggggaccggcagcctgcccttggggtgctgcctgagtgctggtcttcagtgggcggcccactggcacgtacgcagccaccagcaccccctacaacatgagcgaggggcccaagctcacgcccacctgaaattgtagccaggagatacgttgtgctcaacgtcccgtgtatcgaggcggcggaaggagtacctgggcaagcagagggaggcggctctgtccaggttgcagtcccagttgacctggatgcccatgatgcctccctggggatgagcagcagagacacggcaaggctttcctcagcacctggcacgagacgcctccagggctgggtcaggagagccagggcccgcacccacctccacggccatgtcctggaaactgtgtcctgcgttctccactattttgccaagacggaatatggggcagaagggatctgttttagcatcataaatgcacgacttgaggtaagtagtggtgatgttgggaaggatattcctcctaaagtcgagaggaagcagaaaatcagagcgacgaaaacctcagagaagagagaagagccagaagtttctccaagaccctggtgaactcacacacctggccaccacttacttgctgaaattaaatttgggataccagatgttgttcttaaccaaaagagtgaagttttctgcagcctttaaaaaagcaggtctgaaaaacaatgataacattactgttaataaaatacatacaaatactcacataaccatgttatatatatatatatacacacatatatatatgtattgtgtgtgtgtgtctgtgtgtgtgtgtgtgtatatatatatatatatattttttttttttttttttttgagatggagtcactctgtcacctcgagtgcaggcttgagtgcaatggcgcgatctcagctcactgccacctcagcctcccgtgtagctgggattacacaggtgtgagccactatgcctggttaactttttttgtatttttagtagagacagggttccaccatgttggtcaggctggtctccaactcctggcctcaagtgatccgcctgcttcagcctcccaaagtgctgggattacaggcataagccatcacgcccagcctatatatatttttgagacagggtcttgctctgttgcccaggctggagtacagttgcatgaacacagcttcttgtagcctcgacctcccaggctcagggggttctcccacctcagcctctcaagtagctggaactataggcatgcatcaccatgcctggctaatgaaattttttttttttttttttgtagacatgaagtcttcctacattgcccaggctggtcttgaactcctgacctcaagcaatcttcctacctccgcctccctgtgctggactacaggagtgggccaccatgttcagcccctatgtaatatttttaaaaacatatacacacatcttacaatgtcattttgtcaagaagatgaaacacgtctagcattttctacacccttctgcatgcacactcttctcttccaagagaagacactgagc

SEQ ID NO: 438 - DNA, 2964 bp, Homo sapiens
gagcctggggaggtcgagggtgcagcgagccgtgatcgtgctactgcactccagcctgggcaacacagagagaccctgtctcaaaacaaacaaacaaacaaacaaacaaacaaaaaaaacaaagaaaaaaaaatgggagtgggccgggcgcggtgactcacacctgtaatcccagcactttcggaggccaaggcgggtggatcacgaggtcaggaattcaagattagcctggacaacatggtgaaaccccatctctacgaaaaatacaaaaattagccaagtatggtggccggcgcctgtaatcccagctactcgggagactgaggcagagaactgcttgaacctgggaggcagaggttgcagtgatccgagatcgcgtcactgcactccagcgtgggcgacagagcgagactccgtttcagaaaagaaaaaaaaaaaaaaaaaaaagggagtcggggtggagctctcattggctcgttgcatgtgagtgtccctacggcctagaaatacaagagaagcacatcggaacgggctggaaatccacccagttaactagagggctttgaaccttttattaacttggaggttgactctcctgtcaactcgattcccttttggctgtttggcagggtcagtgagacatcccctgggtcgctcgaccccgtaggacggttcagggagccctccaggtcttcgtttctcctcttccccgcacagtgctgttatccagctgggggatccaacgcacacttaaggctccagcaaagtggctccgctgccggatgggagtgccccagtgtgctggatgaagctggcgcatgcaccatgtcatcatgtgtctctagccagcccagcagcaaccgggccgccccccaggatgagctggggggcaggggcagcagcagcagcgaaagccagaagccctgtgaggccctgcggggcctctcatccttgagcatccacctgggcatggagtccttcattgtggtcaccgagtgtgagccgggctgtgctgtggacctcggcttggcgcgggaccggcccctggaggccgatggccaagaggtcccccttgacacctccgggtcccaggcccggccccacctctccggtcgcaagctgtctctgcaagagcggtcccagggtgggctggcagccggtggcagcctggacatgaacggacgctgcatctgcccgtccctgccctactcacccgtcagctccccgcagtcctcgcctcggctgccccggcggccgacagtggagtctcaccacgtctccatcacgggtatgcaggactgtgtgcagctgaatcagtataccctgaaggatgaaattggaaagggctcctatggtgtcgtcaagttggcctacaatgaaaatgacaatacctactatgcaatgaaggtgctgtccaaaaagaagctgatccggcaggccggctttccacgtcgccctccaccccgaggcacccggccagctcctggaggctgcatccagcccaggggccccattgagcaggtgtaccaggaaattgccatcctcaagaagctggaccaccccaatgtggtgaagctggtggaggtcctggatgaccccaatgaggaccatctgtacatggtgttcgaactggtcaaccaagggcccgtgatggaagtgcccaccctcaaaccactctctgaagaccaggcccgtttctacttccaggatctgatcaaaggcatcgagtacttacactaccagaagatcatccaccgtgacatcaaaccttccaacctcctggtcggagaagatgggcacatcaagatcgctgactttggtgtgagcaatgaattcaagggcagtgacgcgctcctctccaacaccgtgggcacgcccgccttcatggcacccgagtcgctctctgagacccgcaagatcttctctgggaaggccttggatgtttgggccatgggtgtgacactatactgctttgtctttggccagtgcccattcatggacgagcggatcatgtgtttacacagtaagatcaagagtcaggccctggaatttccagaccagcccgacatagctgaggacttgaaggacctgatcacccgtatgctggacaagaaccccgagtcgaggatcgtggtgccggaaatcaagctgcacccctgggtcacgaggcatggggcggagccgttgccgtcggaggatgagaactgcacgctggtcgaagtgactgaagaggaggtcgagaactcagtcaaacacattcccagcttggcaaccgtgatcctggtgaagaccatgatacgtaaacgctcctttgggaacccattcgagggcagccggcgggaggaacgctcactgtcagcgcctggaaacttgctcaccaaaaaaccaaccagggaatgtgagtccctgtctgagctcaagacctagaaaataagtccccttcctgcctgttgcaaagtaacgtaagagttccctcacccgagtggatgcagaccttcttgctgtcagccacccttccttcatacacatagccagcccaggtgaccagaacctcccaggacagatgaggctttgtgtccttatgagactgggagaacctgctgggcacccctgctgcaggtgctgtggtgggtggggaccccactgcccttcccactgagcacatcgtggctacctgacttggtgggagctccaggcagtcacttctgtttcttaaacatagctttactgaggtacaattcacataccatgtaattcacccacgggaagtgtatgattcagtggtttctaatacagacttctgcagccattaccaccatcaactttacgacattttcatcagcccaagaagacaccctacactccttagctgtccccatccaactcccccaccccagtaaccactcagaataggtatggatttgcctattctggacgtttcgtataaatggcgtcatacactac

SEQ ID NO: 439 - protein, 531 aa, Homo sapiens
MSSCVSSQPSSNRAAPQDELGGRGSSSSESQKPCEALRGLSSLSIHLGMESFIVVTECEPGCAVDLGLARDRPLEADGQEVPLDTSGSQARPHLSGRKLSLQERSQGGLAAGGSLDMNGRCICPSLPYSPVSSPQSSPRLPRRPTVESHHVSITGMQDCVQLNQYTLKDEIGKGSYGVVKLAYNENDNTYYAMKVLSKKKLIRQAGFPRRPPPRGWAPGGCIQPRGPIEQVYQEIAILKKLDHPNVVKLVEVLDDPNEDHLYMVFELVNQGPVMEVPTLKPLSEDQARFYFQDLIKGIEYLHYQKIIHRDIKPSNLLVGEDGHIKIADFGVSNEFKGSDALLSNTVGTPAFMAPESLSETRKIFSGKALDVWAMGVTLYCFVFGQCPFMDERIMCLHSKIKSQALEFPDQPDIAEDLKDLITRMLDKNPESRIVVPEIKLHPWVTRHGAEPLPSEDENCTLVEVTEEEVENSVKHIPSLATVILVKTMIRKRSFGNPFEGSRREERSLSAPGNLLTKKPTRECESLSELKT

SEQ ID NO: 440 - DNA, 5390 bp, Homo sapiens
gagcctggggaggtcgagggtgcagcgagccgtgatcgtgctactgcactccagcctgggcaacacagagagaccctgtctcaaaacaaacaaacaaacaaacaaacaaacaaaaaaaacaaagaaaaaaaaatgggagtgggccgggcgcggtgactcacacctgtaatcccagcactttcggaggccaaggcgggtggatcacgaggtcaggaattcaagattagcctggacaacatggtgaaaccccatctctacgaaaaatacaaaaattagccaagtatggtggccggcgcctgtaatcccagctactcgggagactgaggcagagaactgcttgaacctgggaggcagaggttgcagtgatccgagatcgcgtcactgcactccagcgtgggcgacagagcgagactccgtttcagaaaagaaaaaaaaaaaaaaaaaaaagggagtcggggtggagctctcattggctcgttgcatgtgagtgtccctacggcctagaaatacaagagaagcacatcggaacgggctggaaatccacccagttaactagagggctttgaaccttttattaacttggaggttgactctcctgtcaactcgattcccttttggctgtttggcagggtcagtgagacatcccctgggtcgctcgaccccgtaggacggttcagggagccctccaggtcttcgtttctcctcttccccgcacagtgctgttatccagctgggggatccaacgcacacttaaggctccagcaaagtggctccgctgccggatgggagtgccccagtgtgctggatgaagctggcgcatgcaccatgtcatcatgtgtctctagccagcccagcagcaaccgggccgccccccaggatgagctggggggcaggggcagcagcagcagcgaaagccagaagccctgtgaggccctgcggggcctctcatccttgagcatccacctgggcatggagtccttcattgtggtcaccgagtgtgagccgggctgtgctgtggacctcggcttggcgcgggaccggcccctggaggccgatggccaagaggtcccccttgacacctccgggtcccaggcccggccccacctctccggtcgcaagctgtctctgcaagagcggtcccagggtgggctggcagccggtggcagcctggacatgaacggacgctgcatctgcccgtccctgccctactcacccgtcagctccccgcagtcctcgcctcggctgccccggcggccgacagtggagtctcaccacgtctccatcacgggtatgcaggactgtgtgcagctgaatcagtataccctgaaggatgaaattggaaagggctcctatggtgtcgtcaagttggcctacaatgaaaatgacaatacctactatgcaatgaaggtgctgtccaaaaagaagctgatccggcaggccggctttccacgtcgccctccaccccgaggcacccggccagctcctggaggctgcatccagcccaggggccccattgagcaggtgtaccaggaaattgccatcctcaagaagctggaccaccccaatgtggtgaagctggtggaggtcctggatgaccccaatgaggaccatctgtacatggtgttcgaactggtcaaccaagggcccgtgatggaagtgcccaccctcaaaccactctctgaagaccaggcccgtttctacttccaggatctgatcaaaggcatcgagtacttacactaccagaagatcatccaccgtgacatcaaaccttccaacctcctggtcggagaagatgggcacatcaagatcgctgactttggtgtgagcaatgaattcaagggcagtgacgcgctcctctccaacaccgtgggcacgcccgccttcatggcacccgagtcgctctctgagacccgcaagatcttctctgggaaggccttggatgtttgggccatgggtgtgacactatactgctttgtctttggccagtgcccattcatggacgagcggatcatgtgtttacacagtaagatcaagagtcaggccctggaatttccagaccagcccgacatagctgaggacttgaaggacctgatcacccgtatgctggacaagaaccccgagtcgaggatcgtggtgccggaaatcaagatcctggtgaagaccatgatacgtaaacgctcctttgggaacccattcgagggcagccggcgggaggaacgctcactgtcagcgcctggaaacttgctcacgaagcaaggcagcgaagacaacctccagggcaccgacccgccccccgtgggggaggaggaagtgctcttgtgagaggcagtccctgcgtggaaagttgctgggcccccgcccccggctcccccgcacgcatgcatccactgcggccggaggaggccatggagcccgagtagctgcctggatcgctcgacctcgcatgcgcgccgcgtcgcctctggggggctgctgcaccgcgtttccatagcagcatgtcctacggaaacccagcacgtgtgtagagcctcgatcgtcatctctggttatttgttttttcctttgttgttttaaaggggacaaaaaaaaaaaaaaaaggacttgactccatgacgtcgaccgtggccgctggctggctggacaggcgggtgtgaggagttgcagacccaaacccacgtgcattttgggacaattgctttttaaaacgtttttatgccaaaaatccttcattgtgattttcagaaccacgtcagatataccaagtgactgtgtgtggggtttgacaactgtggaaaggcgagcagaaaactccggcggtctgaggccatggaggtggttgctgcatttgagagggagtagggggctagatgtggctcctagtgcaaaccggaaaccatggcaccttccagagccgtggtctcaaggagtcagagcagggctggccctcagtagctgcagggagctttgatgcaacttatttgtaagaaggatttttaaattttttatgggtagaattgtagtcaggaaaacagaaagggcttgaaatttaataagtgctgctggaaggggattttccaagcctggaagggtattcagcagctgtggtggggaaacatttctcctgaaagactgaacgtgtttcttcatgacagctgctcaaagcaggtttctgagatagctgaccgagctctggtaaatctctttgtcaaattacgaaaacttcagggtgaaatcctatgcttccatgtacattacatggcttaagattaaacaaaaacatttttcaagtctctaactagagtgaactctagagcacagtagttcagaaactatttagagcttccaggatatatttcacagcttcaggcatgtgatcagttagagccgatgaaacctatgcccgcctgtatatatattagcagcttagctagttcataacctgtatattctaaagactgctaaggttttgttttcattttaaatcctagctgattgttgtggtcaatgaaatacccagtttctggagggccaggtgggaaatgctttcactggaccaacacacaaatgatcatcctgaggatctgagcttccctagactccacacaataaccttggggcacccttttagagaagactgttgaaacccacagcactcgttggggtatgaggaaaccagggcttggcacaggaagttcccctttgtagctaaaagtccagaaagaaagggttcatctttttgacttccaactgatattgggaagtttggttgaggttcaagtgtgactccttccagagccacaggtaggggagtgtgaagttgagggggaggaaagctggaaggactctgccttgggagattcccagctctgctttccagcgcttggtggaatctgggctggggaaagacggcaccgggaaactctgcttccccattgtttccatctgatcagctgtggtgtgaggacttctcagacaaaggcaaggcctcgtgcccctgcccagcccattcatggagccctgggccttcttggcttccatagatcctaagctcttgactgtagtttagccagacttgttttgctatcttataagcagttcagaattagggaatgctggttttgaagagcaaaggacaggtagtctagagagggtcgtctggcctgcttgctgggtctttgtaacccagcacttcctcttgccctcctggctttatgtttatggggagaggactcaatagctccaccccttctggcaccagatggggcttggttagtttgcaataagcaccttgcagaggttaaagccagcgggtccctagtcttaggcccagcctgcttgtgtgggctctggcctggcctggtggctggcccagggggcagcagtgcttagagcttctgcagggcttctcttgtttacacagctgcatcagacaatgccatttctccccaccacggaaccttccatctaagatttcttccagggaatgccagcaatcaggcagcacccagctgtgggggcagtggggtgggggagacccacattgatgactttttttttttcttttaatgaagaaacaccaaagaaagctgtggaaaggacctgccccacatgaaaaggataagccaagatggctgtaaacacagagcatttgagctgccactcttggagcacattgatttttcaaaaaggacgcccataatttcttccattgctagctcatctgtgggaccaatttggtgtaagcaacctgtggcctgcacttgtggcctcgaaggaagcacaaaccctccatccacttcccatttcctctgcccttttccacctcccccttccatcccaccagctgccagtggctcccagaaagccttattgagccccttgttgacacttggggctgcggaggcctctccctactggtctggcctttcctgagaggcaggtcttccgtcctcagagcctttctggaacaaggagaatgcctgtgcaggtggacacacaggcctggcctgtcgctctcacttgtcttccagcggggagcttcacgttgccgagtggaagaaccatgacctccacttgcttccaaggtgctagggaagtttcagggtacgctggttcccctctccagctggaggccgagtttctggggactgcagatttttctactctgtgatcgattcaatgcccgatgcttctgtttcattcccgaccctttctactatgcattttccttttatcaggtgtataaagttaaatactgtgtatttatcactaaaaagtacatgaacttaagagacaactaagcctttcgtgtttttccacaggtgtttaagcttctctgtacagttgaaataaacagacagcaaaatggtgccaagcctgggcctcttggg

SEQ ID NO: 441 - protein, 496 aa, Homo sapiens
MSSCVSSQPSSNRAAPQDELGGRGSSSSESQKPCEALRGLSSLSIHLGMESFIVVTECEPGCAVDLGLARDRPLEADGQEVPLDTSGSQARPHLSGRKLSLQERSQGGLAAGGSLDMNGRCICPSLPYSPVSSPQSSPRLPRRPTVESHHVSITGMQDCVQLNQYTLKDEIGKGSYGVVKLAYNENDNTYYAMKVLSKKKLIRQAGFPRRPPPRGWAPGGCIQPRGPIEQVYQEIAILKKLDHPNVVKLVEVLDDPNEDHLYMVFELVNQGPVMEVPTLKPLSEDQARFYFQDLIKGIEYLHYQKIIHRDIKPSNLLVGEDGHIKIADFGVSNEFKGSDALLSNTVGTPAFMAPESLSETRKIFSGKALDVWAMGVTLYCFVFGQCPFMDERIMCLHSKIKSQALEFPDQPDIAEDLKDLITRMLDKNPESRIVVPEIKILVKTMIRKRSFGNPFEGSRREERSLSAPGNLLTKQGSEDNLQGTDPPPVGEEEVLL

SEQ ID NO: 442 - DNA, 5618 bp, Homo sapiens
gagcctggggaggtcgagggtgcagcgagccgtgatcgtgctactgcactccagcctgggcaacacagagagaccctgtctcaaaacaaacaaacaaacaaacaaacaaacaaaaaaaacaaagaaaaaaaaatgggagtgggccgggcgcggtgactcacacctgtaatcccagcactttcggaggccaaggcgggtggatcacgaggtcaggaattcaagattagcctggacaacatggtgaaaccccatctctacgaaaaatacaaaaattagccaagtatggtggccggcgcctgtaatcccagctactcgggagactgaggcagagaactgcttgaacctgggaggcagaggttgcagtgatccgagatcgcgtcactgcactccagcgtgggcgacagagcgagactccgtttcagaaaagaaaaaaaaaaaaaaaaaaaagggagtcggggtggagctctcattggctcgttgcatgtgagtgtccctacggcctagaaatacaagagaagcacatcggaacgggctggaaatccacccagttaactagagggctttgaaccttttattaacttggaggttgactctcctgtcaactcgattcccttttggctgtttggcagggtcagtgagacatcccctgggtcgctcgaccccgtaggacggttcagggagccctccaggtcttcgtttctcctcttccccgcacagtgctgttatccagctgggggatccaacgcacacttaaggctccagcaaagtggctccgctgccggatgggagtgccccagtgtgctggatgaagctggcgcatgcaccatgtcatcatgtgtctctagccagcccagcagcaaccgggccgccccccaggatgagctggggggcaggggcagcagcagcagcgaaagccagaagccctgtgaggccctgcggggcctctcatccttgagcatccacctgggcatggagtccttcattgtggtcaccgagtgtgagccgggctgtgctgtggacctcggcttggcgcgggaccggcccctggaggccgatggccaagaggtcccccttgacacctccgggtcccaggcccggccccacctctccggtcgcaagctgtctctgcaagagcggtcccagggtgggctggcagccggtggcagcctggacatgaacggacgctgcatctgcccgtccctgccctactcacccgtcagctccccgcagtcctcgcctcggctgccccggcggccgacagtggagtctcaccacgtctccatcacgggtatgcaggactgtgtgcagctgaatcagtataccctgaaggatgaaattggaaagggctcctatggtgtcgtcaagttggcctacaatgaaaatgacaatacctactatgcaatgaaggtgctgtccaaaaagaagctgatccggcaggccggctttccacgtcgccctccaccccgaggcacccggccagctcctggaggctgcatccagcccaggggccccattgagcaggtgtaccaggaaattgccatcctcaagaagctggaccaccccaatgtggtgaagctggtggaggtcctggatgaccccaatgaggaccatctgtacatggtgttcgaactggtcaaccaagggcccgtgatggaagtgcccaccctcaaaccactctctgaagaccaggcccgtttctacttccaggatctgatcaaaggcatcgagtacttacactaccagaagatcatccaccgtgacatcaaaccttccaacctcctggtcggagaagatgggcacatcaagatcgctgactttggtgtgagcaatgaattcaagggcagtgacgcgctcctctccaacaccgtgggcacgcccgccttcatggcacccgagtcgctctctgagacccgcaagatcttctctgggaaggccttggatgtttgggccatgggtgtgacactatactgctttgtctttggccagtgcccattcatggacgagcggatcatgtgtttacacagtaagatcaagagtcaggccctggaatttccagaccagcccgacatagctgaggacttgaaggacctgatcacccgtatgctggacaagaaccccgagtcgaggatcgtggtgccggaaatcaagctgcacccctgggtcacgaggcatggggcggagccgttgccgtcggaggatgagaactgcacgctggtcgaagtgactgaagaggaggtcgagaactcagtcaaacacattcccagcttggcaaccgtgatcctggtgaagaccatgatacgtaaacgctcctttgggaacccattcgagggcagccggcgggaggaacgctcactgtcagcgcctggaaacttgctcaccaaaaaaccaaccagggaatgtgagtccctgtctgagctcaaggaagcaaggcagcgaagacaacctccagggcaccgacccgccccccgtgggggaggaggaagtgctcttgtgagaggcagtccctgcgtggaaagttgctgggcccccgcccccggctcccccgcacgcatgcatccactgcggccggaggaggccatggagcccgagtagctgcctggatcgctcgacctcgcatgcgcgccgcgtcgcctctggggggctgctgcaccgcgtttccatagcagcatgtcctacggaaacccagcacgtgtgtagagcctcgatcgtcatctctggttatttgttttttcctttgttgttttaaaggggacaaaaaaaaaaaaaaaaggacttgactccatgacgtcgaccgtggccgctggctggctggacaggcgggtgtgaggagttgcagacccaaacccacgtgcattttgggacaattgctttttaaaacgtttttatgccaaaaatccttcattgtgattttcagaaccacgtcagatataccaagtgactgtgtgtggggtttgacaactgtggaaaggcgagcagaaaactccggcggtctgaggccatggaggtggttgctgcatttgagagggagtagggggctagatgtggctcctagtgcaaaccggaaaccatggcaccttccagagccgtggtctcaaggagtcagagcagggctggccctcagtagctgcagggagctttgatgcaacttatttgtaagaaggatttttaaattttttatgggtagaattgtagtcaggaaaacagaaagggcttgaaatttaataagtgctgctggaaggggattttccaagcctggaagggtattcagcagctgtggtggggaaacatttctcctgaaagactgaacgtgtttcttcatgacagctgctcaaagcaggtttctgagatagctgaccgagctctggtaaatctctttgtcaaattacgaaaacttcagggtgaaatcctatgcttccatgtacattacatggcttaagattaaacaaaaacatttttcaagtctctaactagagtgaactctagagcacagtagttcagaaactatttagagcttccaggatatatttcacagcttcaggcatgtgatcagttagagccgatgaaacctatgcccgcctgtatatatattagcagcttagctagttcataacctgtatattctaaagactgctaaggttttgttttcattttaaatcctagctgattgttgtggtcaatgaaatacccagtttctggagggccaggtgggaaatgctttcactggaccaacacacaaatgatcatcctgaggatctgagcttccctagactccacacaataaccttggggcacccttttagagaagactgttgaaacccacagcactcgttggggtatgaggaaaccagggcttggcacaggaagttcccctttgtagctaaaagtccagaaagaaagggttcatctttttgacttccaactgatattgggaagtttggttgaggttcaagtgtgactccttccagagccacaggtaggggagtgtgaagttgagggggaggaaagctggaaggactctgccttgggagattcccagctctgctttccagcgcttggtggaatctgggctggggaaagacggcaccgggaaactctgcttccccattgtttccatctgatcagctgtggtgtgaggacttctcagacaaaggcaaggcctcgtgcccctgcccagcccattcatggagccctgggccttcttggcttccatagatcctaagctcttgactgtagtttagccagacttgttttgctatcttataagcagttcagaattagggaatgctggttttgaagagcaaaggacaggtagtctagagagggtcgtctggcctgcttgctgggtctttgtaacccagcacttcctcttgccctcctggctttatgtttatggggagaggactcaatagctccaccccttctggcaccagatggggcttggttagtttgcaataagcaccttgcagaggttaaagccagcgggtccctagtcttaggcccagcctgcttgtgtgggctctggcctggcctggtggctggcccagggggcagcagtgcttagagcttctgcagggcttctcttgtttacacagctgcatcagacaatgccatttctccccaccacggaaccttccatctaagatttcttccagggaatgccagcaatcaggcagcacccagctgtgggggcagtggggtgggggagacccacattgatgactttttttttttcttttaatgaagaaacaccaaagaaagctgtggaaaggacctgccccacatgaaaaggataagccaagatggctgtaaacacagagcatttgagctgccactcttggagcacattgatttttcaaaagccagctctgtcaggaaaggaggtgctgttatgagcagctcttccagtgggcaaagaggacgcccataatttcttccattgctagctcatctgtgggaccaatttggtgtaagcaacctgtggcctgcacttgtggcctcgaaggaagcacaaaccctccatccacttcccatttcctctgcccttttccacctcccccttccatcccaccagctgccagtggctcccagaaagccttattgagccccttgttgacacttggggctgcggaggcctctccctactggtctggcctttcctgagaggcaggtcttccgtcctcagagcctttctggaacaaggagaatgcctgtgcaggtggacacacaggcctggcctgtcgctctcacttgtcttccagcggggagcttcacgttgccgagtggaagaaccatgacctccacttgcttccaaggtgctagggaagtttcagggtacgctggttcccctctccagctggaggccgagtttctggggactgcagatttttctactctgtgatcgattcaatgcccgatgcttctgtttcattcccgaccctttctactatgcattttccttttatcaggtgtataaagttaaatactgtgtatttatcactaaaaagtacatgaacttaagagacaactaagcctttcgtgtttttccacaggtgtttaagcttctctgtacagttgaaataaacagacagcaaaatggtgccaagcctgggcctcttggg

SEQ ID NO: 443 - protein, 586 aa, Homo sapiens
MSSCVSSQPSSNRAAPQDELGGRGSSSSESQKPCEALRGLSSLSIHLGMESFIVVTECEPGCAVDLGLARDRPLEADGQEVPLDTSGSQARPHLSGRKLSLQERSQGGLAAGGSLDMNGRCICPSLPYSPVSSPQSSPRLPRRPTVESHHVSITGMQDCVQLNQYTLKDEIGKGSYGVVKLAYNENDNTYYAMKVLSKKKLIRQAGFPRRPPPRGWAPGGCIQPRGPIEQVYQEIAILKKLDHPNVVKLVEVLDDPNEDHLYMVFELVNQGPVMEVPTLKPLSEDQARFYFQDLIKGIEYLHYQKIIHRDIKPSNLLVGEDGHIKIADFGVSNEFKGSDALLSNTVGTPAFMAPESLSETRKIFSGKALDVWAMGVTLYCFVFGQCPFMDERIMCLHSKIKSQALEFPDQPDIAEDLKDLITRMLDKNPESRIVVPEIKLHPWVTRHGAEPLPSEDENCTLVEVTEEEVENSVKHIPSLATVILVKTMIRKRSFGNPFEGSRREERSLSAPGNLLTKKPTRECESLSELKEARQRRQPPGHRPAPRGGGGSALVRGSPCVESCWAPAPGSPARMHPLRPEEAMEPE

SEQ ID NO: 444 - DNA, 5433 bp, Homo sapiens
gagcctggggaggtcgagggtgcagcgagccgtgatcgtgctactgcactccagcctgggcaacacagagagaccctgtctcaaaacaaacaaacaaacaaacaaacaaacaaaaaaaacaaagaaaaaaaaatgggagtgggccgggcgcggtgactcacacctgtaatcccagcactttcggaggccaaggcgggtggatcacgaggtcaggaattcaagattagcctggacaacatggtgaaaccccatctctacgaaaaatacaaaaattagccaagtatggtggccggcgcctgtaatcccagctactcgggagactgaggcagagaactgcttgaacctgggaggcagaggttgcagtgatccgagatcgcgtcactgcactccagcgtgggcgacagagcgagactccgtttcagaaaagaaaaaaaaaaaaaaaaaaaagggagtcggggtggagctctcattggctcgttgcatgtgagtgtccctacggcctagaaatacaagagaagcacatcggaacgggctggaaatccacccagttaactagagggctttgaaccttttattaacttggaggttgactctcctgtcaactcgattcccttttggctgtttggcagggtcagtgagacatcccctgggtcgctcgaccccgtaggacggttcagggagccctccaggtcttcgtttctcctcttccccgcacagtgctgttatccagctgggggatccaacgcacacttaaggctccagcaaagtggctccgctgccggatgggagtgccccagtgtgctggatgaagctggcgcatgcaccatgtcatcatgtgtctctagccagcccagcagcaaccgggccgccccccaggatgagctggggggcaggggcagcagcagcagcgaaagccagaagccctgtgaggccctgcggggcctctcatccttgagcatccacctgggcatggagtccttcattgtggtcaccgagtgtgagccgggctgtgctgtggacctcggcttggcgcgggaccggcccctggaggccgatggccaagaggtcccccttgacacctccgggtcccaggcccggccccacctctccggtcgcaagctgtctctgcaagagcggtcccagggtgggctggcagccggtggcagcctggacatgaacggacgctgcatctgcccgtccctgccctactcacccgtcagctccccgcagtcctcgcctcggctgccccggcggccgacagtggagtctcaccacgtctccatcacgggtatgcaggactgtgtgcagctgaatcagtataccctgaaggatgaaattggaaagggctcctatggtgtcgtcaagttggcctacaatgaaaatgacaatacctactatgcaatgaaggtgctgtccaaaaagaagctgatccggcaggccggctttccacgtcgccctccaccccgaggcacccggccagctcctggaggctgcatccagcccaggggccccattgagcaggtgtaccaggaaattgccatcctcaagaagctggaccaccccaatgtggtgaagctggtggaggtcctggatgaccccaatgaggaccatctgtacatggtgttcgaactggtcaaccaagggcccgtgatggaagtgcccaccctcaaaccactctctgaagaccaggcccgtttctacttccaggatctgatcaaaggcatcgagtacttacactaccagaagatcatccaccgtgacatcaaaccttccaacctcctggtcggagaagatgggcacatcaagatcgctgactttggtgtgagcaatgaattcaagggcagtgacgcgctcctctccaacaccgtgggcacgcccgccttcatggcacccgagtcgctctctgagacccgcaagatcttctctgggaaggccttggatgtttgggccatgggtgtgacactatactgctttgtctttggccagtgcccattcatggacgagcggatcatgtgtttacacagtaagatcaagagtcaggccctggaatttccagaccagcccgacatagctgaggacttgaaggacctgatcacccgtatgctggacaagaaccccgagtcgaggatcgtggtgccggaaatcaagatcctggtgaagaccatgatacgtaaacgctcctttgggaacccattcgagggcagccggcgggaggaacgctcactgtcagcgcctggaaacttgctcaccaaaaaaccaaccagggaatgtgagtccctgtctgagctcaaggaagcaaggcagcgaagacaacctccagggcaccgacccgccccccgtgggggaggaggaagtgctcttgtgagaggcagtccctgcgtggaaagttgctgggcccccgcccccggctcccccgcacgcatgcatccactgcggccggaggaggccatggagcccgagtagctgcctggatcgctcgacctcgcatgcgcgccgcgtcgcctctggggggctgctgcaccgcgtttccatagcagcatgtcctacggaaacccagcacgtgtgtagagcctcgatcgtcatctctggttatttgttttttcctttgttgttttaaaggggacaaaaaaaaaaaaaaaaggacttgactccatgacgtcgaccgtggccgctggctggctggacaggcgggtgtgaggagttgcagacccaaacccacgtgcattttgggacaattgctttttaaaacgtttttatgccaaaaatccttcattgtgattttcagaaccacgtcagatataccaagtgactgtgtgtggggtttgacaactgtggaaaggcgagcagaaaactccggcggtctgaggccatggaggtggttgctgcatttgagagggagtagggggctagatgtggctcctagtgcaaaccggaaaccatggcaccttccagagccgtggtctcaaggagtcagagcagggctggccctcagtagctgcagggagctttgatgcaacttatttgtaagaaggatttttaaattttttatgggtagaattgtagtcaggaaaacagaaagggcttgaaatttaataagtgctgctggaaggggattttccaagcctggaagggtattcagcagctgtggtggggaaacatttctcctgaaagactgaacgtgtttcttcatgacagctgctcaaagcaggtttctgagatagctgaccgagctctggtaaatctctttgtcaaattacgaaaacttcagggtgaaatcctatgcttccatgtacattacatggcttaagattaaacaaaaacatttttcaagtctctaactagagtgaactctagagcacagtagttcagaaactatttagagcttccaggatatatttcacagcttcaggcatgtgatcagttagagccgatgaaacctatgcccgcctgtatatatattagcagcttagctagttcataacctgtatattctaaagactgctaaggttttgttttcattttaaatcctagctgattgttgtggtcaatgaaatacccagtttctggagggccaggtgggaaatgctttcactggaccaacacacaaatgatcatcctgaggatctgagcttccctagactccacacaataaccttggggcacccttttagagaagactgttgaaacccacagcactcgttggggtatgaggaaaccagggcttggcacaggaagttcccctttgtagctaaaagtccagaaagaaagggttcatctttttgacttccaactgatattgggaagtttggttgaggttcaagtgtgactccttccagagccacaggtaggggagtgtgaagttgagggggaggaaagctggaaggactctgccttgggagattcccagctctgctttccagcgcttggtggaatctgggctggggaaagacggcaccgggaaactctgcttccccattgtttccatctgatcagctgtggtgtgaggacttctcagacaaaggcaaggcctcgtgcccctgcccagcccattcatggagccctgggccttcttggcttccatagatcctaagctcttgactgtagtttagccagacttgttttgctatcttataagcagttcagaattagggaatgctggttttgaagagcaaaggacaggtagtctagagagggtcgtctggcctgcttgctgggtctttgtaacccagcacttcctcttgccctcctggctttatgtttatggggagaggactcaatagctccaccccttctggcaccagatggggcttggttagtttgcaataagcaccttgcagaggttaaagccagcgggtccctagtcttaggcccagcctgcttgtgtgggctctggcctggcctggtggctggcccagggggcagcagtgcttagagcttctgcagggcttctcttgtttacacagctgcatcagacaatgccatttctccccaccacggaaccttccatctaagatttcttccagggaatgccagcaatcaggcagcacccagctgtgggggcagtggggtgggggagacccacattgatgactttttttttttcttttaatgaagaaacaccaaagaaagctgtggaaaggacctgccccacatgaaaaggataagccaagatggctgtaaacacagagcatttgagctgccactcttggagcacattgatttttcaaaaaggacgcccataatttcttccattgctagctcatctgtgggaccaatttggtgtaagcaacctgtggcctgcacttgtggcctcgaaggaagcacaaaccctccatccacttcccatttcctctgcccttttccacctcccccttccatcccaccagctgccagtggctcccagaaagccttattgagccccttgttgacacttggggctgcggaggcctctccctactggtctggcctttcctgagaggcaggtcttccgtcctcagagcctttctggaacaaggagaatgcctgtgcaggtggacacacaggcctggcctgtcgctctcacttgtcttccagcggggagcttcacgttgccgagtggaagaaccatgacctccacttgcttccaaggtgctagggaagtttcagggtacgctggttcccctctccagctggaggccgagtttctggggactgcagatttttctactctgtgatcgattcaatgcccgatgcttctgtttcattcccgaccctttctactatgcattttccttttatcaggtgtataaagttaaatactgtgtatttatcactaaaaagtacatgaacttaagagacaactaagcctttcgtgtttttccacaggtgtttaagcttctctgtacagttgaaataaacagacagcaaaatggtgccaagcctgggcctcttggg

SEQ ID NO: 445 - protein, 543 aa, Homo sapiens
MSSCVSSQPSSNRAAPQDELGGRGSSSSESQKPCEALRGLSSLSIHLGMESFIVVTECEPGCAVDLGLARDRPLEADGQEVPLDTSGSQARPHLSGRKLSLQERSQGGLAAGGSLDMNGRCICPSLPYSPVSSPQSSPRLPRRPTVESHHVSITGMQDCVQLNQYTLKDEIGKGSYGVVKLAYNENDNTYYAMKVLSKKKLIRQAGFPRRPPPRGWAPGGCIQPRGPIEQVYQEIAILKKLDHPNVVKLVEVLDDPNEDHLYMVFELVNQGPVMEVPTLKPLSEDQARFYFQDLIKGIEYLHYQKIIHRDIKPSNLLVGEDGHIKIADFGVSNEFKGSDALLSNTVGTPAFMAPESLSETRKIFSGKALDVWAMGVTLYCFVFGQCPFMDERIMCLHSKIKSQALEFPDQPDIAEDLKDLITRMLDKNPESRIVVPEIKILVKTMIRKRSFGNPFEGSRREERSLSAPGNLLTKKPTRECESLSELKEARQRRQPPGHRPAPRGGGGSALVRGSPCVESCWAPAPGSPARMHPLRPEEAMEPE

SEQ ID NO: 446 - DNA, 5562 bp, Homo sapiens
gagcctggggaggtcgagggtgcagcgagccgtgatcgtgctactgcactccagcctgggcaacacagagagaccctgtctcaaaacaaacaaacaaacaaacaaacaaacaaaaaaaacaaagaaaaaaaaatgggagtgggccgggcgcggtgactcacacctgtaatcccagcactttcggaggccaaggcgggtggatcacgaggtcaggaattcaagattagcctggacaacatggtgaaaccccatctctacgaaaaatacaaaaattagccaagtatggtggccggcgcctgtaatcccagctactcgggagactgaggcagagaactgcttgaacctgggaggcagaggttgcagtgatccgagatcgcgtcactgcactccagcgtgggcgacagagcgagactccgtttcagaaaagaaaaaaaaaaaaaaaaaaaagggagtcggggtggagctctcattggctcgttgcatgtgagtgtccctacggcctagaaatacaagagaagcacatcggaacgggctggaaatccacccagttaactagagggctttgaaccttttattaacttggaggttgactctcctgtcaactcgattcccttttggctgtttggcagggtcagtgagacatcccctgggtcgctcgaccccgtaggacggttcagggagccctccaggtcttcgtttctcctcttccccgcacagtgctgttatccagctgggggatccaacgcacacttaaggctccagcaaagtggctccgctgccggatgggagtgccccagtgtgctggatgaagctggcgcatgcaccatgtcatcatgtgtctctagccagcccagcagcaaccgggccgccccccaggatgagctggggggcaggggcagcagcagcagcgaaagccagaagccctgtgaggccctgcggggcctctcatccttgagcatccacctgggcatggagtccttcattgtggtcaccgagtgtgagccgggctgtgctgtggacctcggcttggcgcgggaccggcccctggaggccgatggccaagaggtcccccttgacacctccgggtcccaggcccggccccacctctccggtcgcaagctgtctctgcaagagcggtcccagggtgggctggcagccggtggcagcctggacatgaacggacgctgcatctgcccgtccctgccctactcacccgtcagctccccgcagtcctcgcctcggctgccccggcggccgacagtggagtctcaccacgtctccatcacgggtatgcaggactgtgtgcagctgaatcagtataccctgaaggatgaaattggaaagggctcctatggtgtcgtcaagttggcctacaatgaaaatgacaatacctactatgcaatgaaggtgctgtccaaaaagaagctgatccggcaggccggctttccacgtcgccctccaccccgaggcacccggccagctcctggaggctgcatccagcccaggggccccattgagcaggtgtaccaggaaattgccatcctcaagaagctggaccaccccaatgtggtgaagctggtggaggtcctggatgaccccaatgaggaccatctgtacatggtgttcgaactggtcaaccaagggcccgtgatggaagtgcccaccctcaaaccactctctgaagaccaggcccgtttctacttccaggatctgatcaaaggcatcgagtacttacactaccagaagatcatccaccgtgacatcaaaccttccaacctcctggtcggagaagatgggcacatcaagatcgctgactttggtgtgagcaatgaattcaagggcagtgacgcgctcctctccaacaccgtgggcacgcccgccttcatggcacccgagtcgctctctgagacccgcaagatcttctctgggaaggccttggatgtttgggccatgggtgtgacactatactgctttgtctttggccagtgcccattcatggacgagcggatcatgtgtttacacagtaagatcaagagtcaggccctggaatttccagaccagcccgacatagctgaggacttgaaggacctgatcacccgtatgctggacaagaaccccgagtcgaggatcgtggtgccggaaatcaagctgcacccctgggtcacgaggcatggggcggagccgttgccgtcggaggatgagaactgcacgctggtcgaagtgactgaagaggaggtcgagaactcagtcaaacacattcccagcttggcaaccgtgatcctggtgaagaccatgatacgtaaacgctcctttgggaacccattcgagggcagccggcgggaggaacgctcactgtcagcgcctggaaacttgctcaccaaaaaaccaaccagggaatgtgagtccctgtctgagctcaaggaagcaaggcagcgaagacaacctccagggcaccgacccgccccccgtgggggaggaggaagtgctcttgtgagaggcagtccctgcgtggaaagttgctgggcccccgcccccggctcccccgcacgcatgcatccactgcggccggaggaggccatggagcccgagtagctgcctggatcgctcgacctcgcatgcgcgccgcgtcgcctctggggggctgctgcaccgcgtttccatagcagcatgtcctacggaaacccagcacgtgtgtagagcctcgatcgtcatctctggttatttgttttttcctttgttgttttaaaggggacaaaaaaaaaaaaaaaaggacttgactccatgacgtcgaccgtggccgctggctggctggacaggcgggtgtgaggagttgcagacccaaacccacgtgcattttgggacaattgctttttaaaacgtttttatgccaaaaatccttcattgtgattttcagaaccacgtcagatataccaagtgactgtgtgtggggtttgacaactgtggaaaggcgagcagaaaactccggcggtctgaggccatggaggtggttgctgcatttgagagggagtagggggctagatgtggctcctagtgcaaaccggaaaccatggcaccttccagagccgtggtctcaaggagtcagagcagggctggccctcagtagctgcagggagctttgatgcaacttatttgtaagaaggatttttaaattttttatgggtagaattgtagtcaggaaaacagaaagggcttgaaatttaataagtgctgctggaaggggattttccaagcctggaagggtattcagcagctgtggtggggaaacatttctcctgaaagactgaacgtgtttcttcatgacagctgctcaaagcaggtttctgagatagctgaccgagctctggtaaatctctttgtcaaattacgaaaacttcagggtgaaatcctatgcttccatgtacattacatggcttaagattaaacaaaaacatttttcaagtctctaactagagtgaactctagagcacagtagttcagaaactatttagagcttccaggatatatttcacagcttcaggcatgtgatcagttagagccgatgaaacctatgcccgcctgtatatatattagcagcttagctagttcataacctgtatattctaaagactgctaaggttttgttttcattttaaatcctagctgattgttgtggtcaatgaaatacccagtttctggagggccaggtgggaaatgctttcactggaccaacacacaaatgatcatcctgaggatctgagcttccctagactccacacaataaccttggggcacccttttagagaagactgttgaaacccacagcactcgttggggtatgaggaaaccagggcttggcacaggaagttcccctttgtagctaaaagtccagaaagaaagggttcatctttttgacttccaactgatattgggaagtttggttgaggttcaagtgtgactccttccagagccacaggtaggggagtgtgaagttgagggggaggaaagctggaaggactctgccttgggagattcccagctctgctttccagcgcttggtggaatctgggctggggaaagacggcaccgggaaactctgcttccccattgtttccatctgatcagctgtggtgtgaggacttctcagacaaaggcaaggcctcgtgcccctgcccagcccattcatggagccctgggccttcttggcttccatagatcctaagctcttgactgtagtttagccagacttgttttgctatcttataagcagttcagaattagggaatgctggttttgaagagcaaaggacaggtagtctagagagggtcgtctggcctgcttgctgggtctttgtaacccagcacttcctcttgccctcctggctttatgtttatggggagaggactcaatagctccaccccttctggcaccagatggggcttggttagtttgcaataagcaccttgcagaggttaaagccagcgggtccctagtcttaggcccagcctgcttgtgtgggctctggcctggcctggtggctggcccagggggcagcagtgcttagagcttctgcagggcttctcttgtttacacagctgcatcagacaatgccatttctccccaccacggaaccttccatctaagatttcttccagggaatgccagcaatcaggcagcacccagctgtgggggcagtggggtgggggagacccacattgatgactttttttttttcttttaatgaagaaacaccaaagaaagctgtggaaaggacctgccccacatgaaaaggataagccaagatggctgtaaacacagagcatttgagctgccactcttggagcacattgatttttcaaaaaggacgcccataatttcttccattgctagctcatctgtgggaccaatttggtgtaagcaacctgtggcctgcacttgtggcctcgaaggaagcacaaaccctccatccacttcccatttcctctgcccttttccacctcccccttccatcccaccagctgccagtggctcccagaaagccttattgagccccttgttgacacttggggctgcggaggcctctccctactggtctggcctttcctgagaggcaggtcttccgtcctcagagcctttctggaacaaggagaatgcctgtgcaggtggacacacaggcctggcctgtcgctctcacttgtcttccagcggggagcttcacgttgccgagtggaagaaccatgacctccacttgcttccaaggtgctagggaagtttcagggtacgctggttcccctctccagctggaggccgagtttctggggactgcagatttttctactctgtgatcgattcaatgcccgatgcttctgtttcattcccgaccctttctactatgcattttccttttatcaggtgtataaagttaaatactgtgtatttatcactaaaaagtacatgaacttaagagacaactaagcctttcgtgtttttccacaggtgtttaagcttctctgtacagttgaaataaacagacagcaaaatggtgccaagcctgggcctcttggg

SEQ ID NO: 447 - protein, 586 aa, Homo sapiens; identical to SEQ ID NO: 443

SEQ ID NO: 448 - DNA, 5519 bp, Homo sapiens
gagcctggggaggtcgagggtgcagcgagccgtgatcgtgctactgcactccagcctgggcaacacagagagaccctgtctcaaaacaaacaaacaaacaaacaaacaaacaaaaaaaacaaagaaaaaaaaatgggagtgggccgggcgcggtgactcacacctgtaatcccagcactttcggaggccaaggcgggtggatcacgaggtcaggaattcaagattagcctggacaacatggtgaaaccccatctctacgaaaaatacaaaaattagccaagtatggtggccggcgcctgtaatcccagctactcgggagactgaggcagagaactgcttgaacctgggaggcagaggttgcagtgatccgagatcgcgtcactgcactccagcgtgggcgacagagcgagactccgtttcagaaaagaaaaaaaaaaaaaaaaaaaagggagtcggggtggagctctcattggctcgttgcatgtgagtgtccctacggcctagaaatacaagagaagcacatcggaacgggctggaaatccacccagttaactagagggctttgaaccttttattaacttggaggttgactctcctgtcaactcgattcccttttggctgtttggcagggtcagtgagacatcccctgggtcgctcgaccccgtaggacggttcagggagccctccaggtcttcgtttctcctcttccccgcacagtgctgttatccagctgggggatccaacgcacacttaaggctccagcaaagtggctccgctgccggatgggagtgccccagtgtgctggatgaagctggcgcatgcaccatgtcatcatgtgtctctagccagcccagcagcaaccgggccgccccccaggatgagctggggggcaggggcagcagcagcagcgaaagccagaagccctgtgaggccctgcggggcctctcatccttgagcatccacctgggcatggagtccttcattgtggtcaccgagtgtgagccgggctgtgctgtggacctcggcttggcgcgggaccggcccctggaggccgatggccaagaggtcccccttgacacctccgggtcccaggcccggccccacctctccggtcgcaagctgtctctgcaagagcggtcccagggtgggctggcagccggtggcagcctggacatgaacggacgctgcatctgcccgtccctgccctactcacccgtcagctccccgcagtcctcgcctcggctgccccggcggccgacagtggagtctcaccacgtctccatcacgggtatgcaggactgtgtgcagctgaatcagtataccctgaaggatgaaattggaaagggctcctatggtgtcgtcaagttggcctacaatgaaaatgacaatacctactatgcaatgaaggtgctgtccaaaaagaagctgatccggcaggccggctttccacgtcgccctccaccccgaggcacccggccagctcctggaggctgcatccagcccaggggccccattgagcaggtgtaccaggaaattgccatcctcaagaagctggaccaccccaatgtggtgaagctggtggaggtcctggatgaccccaatgaggaccatctgtacatggtgttcgaactggtcaaccaagggcccgtgatggaagtgcccaccctcaaaccactctctgaagaccaggcccgtttctacttccaggatctgatcaaaggcatcgagtacttacactaccagaagatcatccaccgtgacatcaaaccttccaacctcctggtcggagaagatgggcacatcaagatcgctgactttggtgtgagcaatgaattcaagggcagtgacgcgctcctctccaacaccgtgggcacgcccgccttcatggcacccgagtcgctctctgagacccgcaagatcttctctgggaaggccttggatgtttgggccatgggtgtgacactatactgctttgtctttggccagtgcccattcatggacgagcggatcatgtgtttacacagtaagatcaagagtcaggccctggaatttccagaccagcccgacatagctgaggacttgaaggacctgatcacccgtatgctggacaagaaccccgagtcgaggatcgtggtgccggaaatcaagctgcacccctgggtcacgaggcatggggcggagccgttgccgtcggaggatgagaactgcacgctggtcgaagtgactgaagaggaggtcgagaactcagtcaaacacattcccagcttggcaaccgtgatcctggtgaagaccatgatacgtaaacgctcctttgggaacccattcgagggcagccggcgggaggaacgctcactgtcagcgcctggaaacttgctcacgaagcaaggcagcgaagacaacctccagggcaccgacccgccccccgtgggggaggaggaagtgctcttgtgagaggcagtccctgcgtggaaagttgctgggcccccgcccccggctcccccgcacgcatgcatccactgcggccggaggaggccatggagcccgagtagctgcctggatcgctcgacctcgcatgcgcgccgcgtcgcctctggggggctgctgcaccgcgtttccatagcagcatgtcctacggaaacccagcacgtgtgtagagcctcgatcgtcatctctggttatttgttttttcctttgttgttttaaaggggacaaaaaaaaaaaaaaaaggacttgactccatgacgtcgaccgtggccgctggctggctggacaggcgggtgtgaggagttgcagacccaaacccacgtgcattttgggacaattgctttttaaaacgtttttatgccaaaaatccttcattgtgattttcagaaccacgtcagatataccaagtgactgtgtgtggggtttgacaactgtggaaaggcgagcagaaaactccggcggtctgaggccatggaggtggttgctgcatttgagagggagtagggggctagatgtggctcctagtgcaaaccggaaaccatggcaccttccagagccgtggtctcaaggagtcagagcagggctggccctcagtagctgcagggagctttgatgcaacttatttgtaagaaggatttttaaattttttatgggtagaattgtagtcaggaaaacagaaagggcttgaaatttaataagtgctgctggaaggggattttccaagcctggaagggtattcagcagctgtggtggggaaacatttctcctgaaagactgaacgtgtttcttcatgacagctgctcaaagcaggtttctgagatagctgaccgagctctggtaaatctctttgtcaaattacgaaaacttcagggtgaaatcctatgcttccatgtacattacatggcttaagattaaacaaaaacatttttcaagtctctaactagagtgaactctagagcacagtagttcagaaactatttagagcttccaggatatatttcacagcttcaggcatgtgatcagttagagccgatgaaacctatgcccgcctgtatatatattagcagcttagctagttcataacctgtatattctaaagactgctaaggttttgttttcattttaaatcctagctgattgttgtggtcaatgaaatacccagtttctggagggccaggtgggaaatgctttcactggaccaacacacaaatgatcatcctgaggatctgagcttccctagactccacacaataaccttggggcacccttttagagaagactgttgaaacccacagcactcgttggggtatgaggaaaccagggcttggcacaggaagttcccctttgtagctaaaagtccagaaagaaagggttcatctttttgacttccaactgatattgggaagtttggttgaggttcaagtgtgactccttccagagccacaggtaggggagtgtgaagttgagggggaggaaagctggaaggactctgccttgggagattcccagctctgctttccagcgcttggtggaatctgggctggggaaagacggcaccgggaaactctgcttccccattgtttccatctgatcagctgtggtgtgaggacttctcagacaaaggcaaggcctcgtgcccctgcccagcccattcatggagccctgggccttcttggcttccatagatcctaagctcttgactgtagtttagccagacttgttttgctatcttataagcagttcagaattagggaatgctggttttgaagagcaaaggacaggtagtctagagagggtcgtctggcctgcttgctgggtctttgtaacccagcacttcctcttgccctcctggctttatgtttatggggagaggactcaatagctccaccccttctggcaccagatggggcttggttagtttgcaataagcaccttgcagaggttaaagccagcgggtccctagtcttaggcccagcctgcttgtgtgggctctggcctggcctggtggctggcccagggggcagcagtgcttagagcttctgcagggcttctcttgtttacacagctgcatcagacaatgccatttctccccaccacggaaccttccatctaagatttcttccagggaatgccagcaatcaggcagcacccagctgtgggggcagtggggtgggggagacccacattgatgactttttttttttcttttaatgaagaaacaccaaagaaagctgtggaaaggacctgccccacatgaaaaggataagccaagatggctgtaaacacagagcatttgagctgccactcttggagcacattgatttttcaaaaaggacgcccataatttcttccattgctagctcatctgtgggaccaatttggtgtaagcaacctgtggcctgcacttgtggcctcgaaggaagcacaaaccctccatccacttcccatttcctctgcccttttccacctcccccttccatcccaccagctgccagtggctcccagaaagccttattgagccccttgttgacacttggggctgcggaggcctctccctactggtctggcctttcctgagaggcaggtcttccgtcctcagagcctttctggaacaaggagaatgcctgtgcaggtggacacacaggcctggcctgtcgctctcacttgtcttccagcggggagcttcacgttgccgagtggaagaaccatgacctccacttgcttccaaggtgctagggaagtttcagggtacgctggttcccctctccagctggaggccgagtttctggggactgcagatttttctactctgtgatcgattcaatgcccgatgcttctgtttcattcccgaccctttctactatgcattttccttttatcaggtgtataaagttaaatactgtgtatttatcactaaaaagtacatgaacttaagagacaactaagcctttcgtgtttttccacaggtgtttaagcttctctgtacagttgaaataaacagacagcaaaatggtgccaagcctgggcctcttggg

SEQ ID NO: 449 - protein, 539 aa, Homo sapiens
MSSCVSSQPSSNRAAPQDELGGRGSSSSESQKPCEALRGLSSLSIHLGMESFIVVTECEPGCAVDLGLARDRPLEADGQEVPLDTSGSQARPHLSGRKLSLQERSQGGLAAGGSLDMNGRCICPSLPYSPVSSPQSSPRLPRRPTVESHHVSITGMQDCVQLNQYTLKDEIGKGSYGVVKLAYNENDNTYYAMKVLSKKKLIRQAGFPRRPPPRGWAPGGCIQPRGPIEQVYQEIAILKKLDHPNVVKLVEVLDDPNEDHLYMVFELVNQGPVMEVPTLKPLSEDQARFYFQDLIKGIEYLHYQKIIHRDIKPSNLLVGEDGHIKIADFGVSNEFKGSDALLSNTVGTPAFMAPESLSETRKIFSGKALDVWAMGVTLYCFVFGQCPFMDERIMCLHSKIKSQALEFPDQPDIAEDLKDLITRMLDKNPESRIVVPEIKLHPWVTRHGAEPLPSEDENCTLVEVTEEEVENSVKHIPSLATVILVKTMIRKRSFGNPFEGSRREERSLSAPGNLLTKQGSEDNLQGTDPPPVGEEEVLL

SEQ ID NO: 450 - DNA, 5235 bp, Homo sapiens
gagcctggggaggtcgagggtgcagcgagccgtgatcgtgctactgcactccagcctgggcaacacagagagaccctgtctcaaaacaaacaaacaaacaaacaaacaaacaaaaaaaacaaagaaaaaaaaatgggagtgggccgggcgcggtgactcacacctgtaatcccagcactttcggaggccaaggcgggtggatcacgaggtcaggaattcaagattagcctggacaacatggtgaaaccccatctctacgaaaaatacaaaaattagccaagtatggtggccggcgcctgtaatcccagctactcgggagactgaggcagagaactgcttgaacctgggaggcagaggttgcagtgatccgagatcgcgtcactgcactccagcgtgggcgacagagcgagactccgtttcagaaaagaaaaaaaaaaaaaaaaaaaagggagtcggggtggagctctcattggctcgttgcatgtgagtgtccctacggcctagaaatacaagagaagcacatcggaacgggctggaaatccacccagttaactagagggctttgaaccttttattaacttggaggttgactctcctgtcaactcgattcccttttggctgtttggcagggtcagtgagacatcccctgggtcgctcgaccccgtaggacggttcagggagccctccaggtcttcgtttctcctcttccccgcacagtgctgttatccagctgggggatccaacgcacacttaaggctccagcaaagtggctccgctgccggatgggagtgccccagtgtgctggatgaagctggcgcatgcaccatgtcatcatgtgtctctagccagcccagcagcaaccgggccgccccccaggatgagctggggggcaggggcagcagcagcagcgaaagccagaagccctgtgaggccctgcggggcctctcatccttgagcatccacctgggcatggagtccttcattgtggtcaccgagtgtgagccgggctgtgctgtggacctcggcttggcgcgggaccggcccctggaggccgatggccaagaggtcccccttgacacctccgggtcccaggcccggccccacctctccggtcgcaagctgtctctgcaagagcggtcccagggtgggctggcagccggtggcagcctggacatgaacggacgctgcatctgcccgtccctgccctactcacccgtcagctccccgcagtcctcgcctcggctgccccggcggccgacagtggagtctcaccacgtctccatcacgggtatgcaggactgtgtgcagctgaatcagtataccctgaaggatgaaattggaaagggctcctatggtgtcgtcaagttggcctacaatgaaaatgacaatacctactatgcaatgaaggtgctgtccaaaaagaagctgatccggcaggccggctttccacgtcgccctccaccccgaggcacccggccagctcctggaggctgcatccagcccaggggccccattgagcaggtgtaccaggaaattgccatcctcaagaagctggaccaccccaatgtggtgaagctggtggaggtcctggatgaccccaatgaggaccatctgtacatggtgttcgaactggtcaaccaagggcccgtgatggaagtgcccaccctcaaaccactctctgaagaccaggcccgtttctacttccaggatctgatcaaaggcatcgagtacttacactaccagaagatcatccaccgtgacatcaaaccttccaacctcctggtcggagaagatgggcacatcaagatcgctgactttggtgtgagcaatgaattcaagggcagtgacgcgctcctctccaacaccgtgggcacgcccgccttcatggcacccgagtcgctctctgagacccgcaagatcttctctgggaaggccttggatgtttgggccatgggtgtgacactatactgctttgtctttggccagtgcccattcatggacgagcggatcatgtgtttacacagtaagatcaagagtcaggccctggaatttccagaccagcccgacatagctgaggacttgaaggacctgatcacccgtatgctggacaagaaccccgagtcgaggatcgtggtgccggaaatcaagctgcacccctgggtcacgaggcatggggcggagccgttgccgtcggaggatgagaactgcacgctggtcgaagtgactgaagaggaggtcgagaactcagtcaaacacattcccagcttggcaaccgtgatcctggtgaagaccatgatacgtaaacgctcctttgggaacccattcgagggcagccggcgggaggaacgctcactgtcagcgcctggaaacttgctcaccaaaaaaccaaccagggaatgtgagtccctgtctgagctcaaggggacaaaaaaaaaaaaaaaaggacttgactccatgacgtcgaccgtggccgctggctggctggacaggcgggtgtgaggagttgcagacccaaacccacgtgcattttgggacaattgctttttaaaacgtttttatgccaaaaatccttcattgtgattttcagaaccacgtcagatataccaagtgactgtgtgtggggtttgacaactgtggaaaggcgagcagaaaactccggcggtctgaggccatggaggtggttgctgcatttgagagggagtagggggctagatgtggctcctagtgcaaaccggaaaccatggcaccttccagagccgtggtctcaaggagtcagagcagggctggccctcagtagctgcagggagctttgatgcaacttatttgtaagaaggatttttaaattttttatgggtagaattgtagtcaggaaaacagaaagggcttgaaatttaataagtgctgctggaaggggattttccaagcctggaagggtattcagcagctgtggtggggaaacatttctcctgaaagactgaacgtgtttcttcatgacagctgctcaaagcaggtttctgagatagctgaccgagctctggtaaatctctttgtcaaattacgaaaacttcagggtgaaatcctatgcttccatgtacattacatggcttaagattaaacaaaaacatttttcaagtctctaactagagtgaactctagagcacagtagttcagaaactatttagagcttccaggatatatttcacagcttcaggcatgtgatcagttagagccgatgaaacctatgcccgcctgtatatatattagcagcttagctagttcataacctgtatattctaaagactgctaaggttttgttttcattttaaatcctagctgattgttgtggtcaatgaaatacccagtttctggagggccaggtgggaaatgctttcactggaccaacacacaaatgatcatcctgaggatctgagcttccctagactccacacaataaccttggggcacccttttagagaagactgttgaaacccacagcactcgttggggtatgaggaaaccagggcttggcacaggaagttcccctttgtagctaaaagtccagaaagaaagggttcatctttttgacttccaactgatattgggaagtttggttgaggttcaagtgtgactccttccagagccacaggtaggggagtgtgaagttgagggggaggaaagctggaaggactctgccttgggagattcccagctctgctttccagcgcttggtggaatctgggctggggaaagacggcaccgggaaactctgcttccccattgtttccatctgatcagctgtggtgtgaggacttctcagacaaaggcaaggcctcgtgcccctgcccagcccattcatggagccctgggccttcttggcttccatagatcctaagctcttgactgtagtttagccagacttgttttgctatcttataagcagttcagaattagggaatgctggttttgaagagcaaaggacaggtagtctagagagggtcgtctggcctgcttgctgggtctttgtaacccagcacttcctcttgccctcctggctttatgtttatggggagaggactcaatagctccaccccttctggcaccagatggggcttggttagtttgcaataagcaccttgcagaggttaaagccagcgggtccctagtcttaggcccagcctgcttgtgtgggctctggcctggcctggtggctggcccagggggcagcagtgcttagagcttctgcagggcttctcttgtttacacagctgcatcagacaatgccatttctccccaccacggaaccttccatctaagatttcttccagggaatgccagcaatcaggcagcacccagctgtgggggcagtggggtgggggagacccacattgatgactttttttttttcttttaatgaagaaacaccaaagaaagctgtggaaaggacctgccccacatgaaaaggataagccaagatggctgtaaacacagagcatttgagctgccactcttggagcacattgatttttcaaaaaggacgcccataatttcttccattgctagctcatctgtgggaccaatttggtgtaagcaacctgtggcctgcacttgtggcctcgaaggaagcacaaaccctccatccacttcccatttcctctgcccttttccacctcccccttccatcccaccagctgccagtggctcccagaaagccttattgagccccttgttgacacttggggctgcggaggcctctccctactggtctggcctttcctgagaggcaggtcttccgtcctcagagcctttctggaacaaggagaatgcctgtgcaggtggacacacaggcctggcctgtcgctctcacttgtcttccagcggggagcttcacgttgccgagtggaagaaccatgacctccacttgcttccaaggtgctagggaagtttcagggtacgctggttcccctctccagctggaggccgagtttctggggactgcagatttttctactctgtgatcgattcaatgcccgatgcttctgtttcattcccgaccctttctactatgcattttccttttatcaggtgtataaagttaaatactgtgtatttatcactaaaaagtacatgaacttaagagacaactaagcctttcgtgtttttccacaggtgtttaagcttctctgtacagttgaaataaacagacagcaaaatggtgccaagcctgggcctcttggg

SEQ ID NO: 451 - protein, 555 aa, Homo sapiens
MSSCVSSQPSSNRAAPQDELGGRGSSSSESQKPCEALRGLSSLSIHLGMESFIVVTECEPGCAVDLGLARDRPLEADGQEVPLDTSGSQARPHLSGRKLSLQERSQGGLAAGGSLDMNGRCICPSLPYSPVSSPQSSPRLPRRPTVESHHVSITGMQDCVQLNQYTLKDEIGKGSYGVVKLAYNENDNTYYAMKVLSKKKLIRQAGFPRRPPPRGWAPGGCIQPRGPIEQVYQEIAILKKLDHPNVVKLVEVLDDPNEDHLYMVFELVNQGPVMEVPTLKPLSEDQARFYFQDLIKGIEYLHYQKIIHRDIKPSNLLVGEDGHIKIADFGVSNEFKGSDALLSNTVGTPAFMAPESLSETRKIFSGKALDVWAMGVTLYCFVFGQCPFMDERIMCLHSKIKSQALEFPDQPDIAEDLKDLITRMLDKNPESRIVVPEIKLHPWVTRHGAEPLPSEDENCTLVEVTEEEVENSVKHIPSLATVILVKTMIRKRSFGNPFEGSRREERSLSAPGNLLTKKPTRECESLSELKGTKKKKKGLDSMTSTVAAGWLDRRV

SEQ ID NO: 452 - DNA, 74204 bp, Mus musculus
  misc_feature (1)...(74204): n = A,T,C or G
acccactgtatagagcaggctcatagagattcacctgtctttgcctcctgagtgctgggattaaaggctcaggaaagaagacctgactatctctcctttctcaaaaaccacattaaagctaccatgatgttgttcgtcaacttgaccggatctagaatcacccaggagacaagcttctggacatatttatgtgaaaagtggggattatgttggttaggttgagatggaacgattcagcttaaacgtggaaggcaccattcccctggcccaaagtcctgaaccatagaagaaggaaggtgtctgggcatgaggtacattcactgctgcccacttcctgactggggacacagctctcatgcctagagtctcccaccatgagggactgtatgtgagtcaaaacaaactctgccttccttaaatcaccggttgcctttctcctccctcatagcaacgagacaattagtagctactgtcagaaagtgacagagagaaatgttattcagatccatgctgctgtgccaccgggcagccagagggagccaaggctgagcctgcacagtgcgatacatgctctctcttttgttccctgaaggaaaagaaaatgcgcctcgtgagaaccttcaaaaaggtatctgcagctgggcagggtgacacatgcctttgatccctgcccacactcaggaggcagaggcaggtggatctcctgtgagtttggagccagcctggtctagagttccaggatagccagggctatggagtgagaatcttgtcttgggggtatagggagaggcatctgcgtctcaactgagggtcagctgcttttgaatgtgttctaaaccccagctttctaggaggtttggagacctaacacagagttgtatcactgaatgcaggagttatgaaaattttgacaataaaagtattctgaatatacagcaactagaaattaattgaaaatctaacccacgttgggtctaaggtgttctggaagcaagcatcttggttgcatcacgtgacttgtagccttgggtacaaacctacaaaatccagactttgggctacaaatgctgtctgtcatgccaccccaacatctcagctctggttctagacttttctagacctcaaactgcagtgtttctactgcaaagtgttctgctcttgcccaaacatggtttaatttgggaaaccataggcttttgaatatttccctaccatcattcctcagtgtacaagtatcaaattagtatagctttgggttgtatggtgttaaagtatttgttttttttttcaaattactgtttgaattgctagcaggaatttcataaaattttactaaggctgtagttcagctggtagagtgcgtgccaagcattcatgaaactcagggtaatgttagccttgaggagtagagcagaagattcataagttcaaggtcagcaaggtggccagcctaggaaacaggagactctgactcaagaaaaaaaaaagttgttcggtataatttggtttgggtttagttagaacagttttcaaatggccccagatactcttctgccattttgtactatatgtttaggggaaacttcaccgcctgcattgacaaatataaaatcaaaatatcactgagcagcggtggcacacacttttaatcccagcacttgggaggcacagaggcaggctgatctctgggttcaagactagactggtctacagagtaagttgccagacagccaatgcaacatggagaaactctgtcttgaacccctccccgccaaaaaatatatgtgtgtgttatatgtgtaaaatgaaataaaaatatatgttctgtatcctaccatgtcaaacattcagccaaactttgtttgattttaaatagttatttattttgtgtattttgtgtgttgtatgcatgtgtgttgtatgcacacgcgtatttgaaggttgtaagggagtcaggcctctttttatcatgtgggttccagaatcaaattagtagcaatcagtcttagtaacaagcacttttactcactgagccatatcactggcccaagatttacatatcaccagcatcagttgtcccagtagtgccttttattcttgactctaaaaccagagctatggggccgaagctgccaagttttgctgcttgctgggactagagcatgcccccttgttctattacttcatcaccagctttctgttttccaactccttcactgtctaagcttgggtttcatggaatctgctctgtaggctgaccctgaatgcagagatctgaatggctctgtctcctagaattaaaggcatgtaccaccattgctgggcctaagcttttcatagaaatcaggcttcaagatccagatcaaaattttgtgtcatcctatgtcaatttgatacatgattatatctcctctttatgtccaaataaaagtaataataaactaactacccattgttcagctgcaaatacaaacaataagcttagctgggtgggatctcgccctgagatcactactcccttagtctgtttatctccttgaacacaagattcagctcttgtgttcctcctgcctctttattactcgaaccatatattttgtactttttctttttaagcttgctatgcttgatcaaaatactcttcataagattgatccaaaggataaaatctaaacttggcttctttgagacttcctttgtcaatacaattaatctgaatcttttcactttagcctcagtcagactttaaagacaagggcaaaaaagcagccatgtttttcaccaaaatatcacaagaacggtgtctaggtcactaccattctcctcctttgaaaactcttgagccagacagacccccgtccagttcaaatcaccctcagcatcaatgtctttcatagtcctactaggatggcccagtaagtcccacttaaatcattcccctgcttcccaaatccaaagtcccaaatccacattcttccaaacaaaaacatggttgggcctaacacagcaataccccactcctggtaccaactcctatcttagtgagggtttccactgctctgaagagacatcataaccaaggcaactcttataaaggacaacatttaattggggctggcttacaagttctgaggttcagttcattaccaccatgagggaagcatggcagtgtccaggcaggcatggtgctgaaggagctgagcgttctacatcttgatccaaaggcaaaccggagaagactatcttcaggcagctagaaggatgatctcagagcccaaccctatagtgacatacttcctccaataaggccacacctgctaatagtgccaggcccgtattcaaacaccacagtggttcattattgttgtggggtagtcatcagagaggactgcttgaacatgggtttaagccaataaaacgtctgttagctgcctgacaactacactgggtgttcaggatcgcagtgtagccttgagtctttctcagggcgaggctttaagcaccaaaaccatgttttgggttgacatacttcagttaacaagaacagttagctaggagcagaactacagaagtaaaaaagcaaggttagtacatttagagactttcctagaactgtggacgttgagagattaagtctttgtttttattttggcaggtggtactatatgctgaatttctagcctgaatggtacttccaccatggagacagttatgccaaggtctggggtcctgttacatttatcaataagtgtttagttttatcttgttttaaacagtcctgactatgtggttctggctgtagaccgggctggcctcgaactcacagagatcctcctgcctttatctcccaagtgctaggcctaaaggtgtgcaccactacactacaccaccacacccagctaccatgctgctttttaggctcagccacttgagctaattcgtgaagggtgattaatatgttgttattccccgggtcgcatggatagttctcagggcagctggaaggtacgtttaataaacagcttaagcagccctgctccgagaccatccaaatgatcgtgtgatccttactggttgtctggttgtctagctggcttttgacacaattttctgtgtggtgacaggcctgctactttgatttcttctctgaagcctttgccatgtttaattttaatgagtggtaatactaagagcccaacaatagcatgaaaaacaaagaagcaatttgtttttagtttgatgagaactaaaaacctcactcagcatggttggcctggaactcacttcgtagactagactaaccctagggttttagggtaggccagtgcttccactggtcactcgtggataatggcagtctcagagacacctgtctaaagtgacatcactgagggccaaattatcccttctgtgtttgtattgtcctcagttactttgtaacatgccctgtgggacagctgtagacaacctacatttcttctcacccatgttgaagcatgtaattttccatctgttgggagatctctagcttcctctcatccttttttcccatctttagagagatggggaagcagcctcagcttgtgcctcctgcaggaagagttggacatatgctttggagctaacaatactgttctctattctctgagttccctttccataaagcaatgtctcctgcaatggagtctgaccttctcggacatgtgtgtgtgtatcatatatatataattatatatgtgatacttgtgtacgtgagatcgtctttattgctaataggtgcaacctcctcctccacttaattgtcccttcctccctgcatcaagtgtctccagtggcccaaagcccctgcagtgctgaggctcagctggcctagaggcagggacctgacctgagacctgagctccctgctagatactctctctcctcctcataccctaccctactgtaattcaaatcagaaagcaagtcttgaagggcggcccagaacaccagtaaatgctatgttaatcaggagtcagatctaattcgaagcttaggccacaggtaagtctgacaagcaaagtgggctgacctttgatacatggttcataaaattctagatcctgagctccagccaccgttgggctcatatctagatctagatggcagatgccagagtccattttttttcctcctgacttctttgctggaggttattgttgttagttcttcctggatgcgtatgtgtgcatgtgtgaatttgtgtgcatgaatgtgtgtgtgagtgtgtatgtggtgtatgtatgtgtgtgcatgtatagctatcagctctgacttcacaactgtgatgaaggtatgtggtcaggtcatagaaagctgccttcatagaagaacctggtgtagaagttttgcccagccagttgaaacacccaaagccgagttagtgagatggctcagcagataaaggcactcgctgtcaagacttaaaaaacctgagtttaaccccaagaatccacgtggtattaaaaaaaaaaaagaaccagctattgcaagtttgttgcatgtgcatgcacacacacacacacacacacacacacacacgcacacgcacacgcacacgcacacgcacacgcaagcgtgtgcgcgcgagctacttccagagcatacagcaggttagagcaagctaagacctgttcagttccagagaggacagaattgctgagctttggattaggaaaaatagacatgctttctaatgatctgtgtcatgccatctggctctggaagagtggagagctataagagcagcctggtgactgaggatactgtcgggtaaaagatggatacactctggatgctgctgccaaaaccagcccaatgggaagacacctggcccaaggaggcacctacacacactcattcatgagcagcttctgggtatgggtggccacagggagtgtcaacaagagcagcaagaccagagggtccccgcccccgccccgttctgttgctgtgctgaagccttcctctgggtctccaacgggaccctctatgtctgtagaactaggacctatctgacacaacagccctgtgtagaaggcacttaggaggaagagggcgggaggtcagagccctccttttaaggcagagcgtttcagctgttctaatagctgaggtttgaccagcagttttgcagtggtcaggagcatacaggcgagacctagttgggtatacagcaggagcagcaggacctcaaggaagaagatgcaagagcacatttagaggtggtatctcccagaagtcactgggagattcacttctggctttgttgctatccactatggctgatgaggagcaacgaggagtaccagcgtcaccaaggatgttggtactggcccaggacatcctttctggagccagtaaagtcttcagactccatggagagctacccagagggtatgaggaagatgaggggcaggttggagaagagggaaacaagtttccagaggtcagagataagggggtcaactggatgtggttaggcgtcctgcaggcgagcagcaacagctcattgctgtggatggaacagaacaggcaggcagaagctagagagctctcagcgggaccaaccagaggtaaaggcacacatctcccgcaccctcttgttgcctttgacgtcttcatcactccctgtggtggactcagccgtcaggaacatctgcagaagatgtagtgtcacaaacagaaaagaatctagacaatgtagtctagacgccgttgttgtgaaagagctgctgtcccgtggagagcacattgcagccagctgcttctgtattctgctccgcatgactggagtggaggtgggggatagggtggggtgtgaggtgtggggtgaggccatatgtatgatggggtgtttctgggttcagggaagaaccagcagggacgaggaggcaatccctgctgagtaccaggacaagtagccttccccttgcaatctgtgacagaaacttgatggtgttatctatctatctatctatctatctatctatctatctatctatctatctatccgaatgaatgaaaccattgtttcagttttaagtagaggctgataagcctcttcttttagttaagttgtggttgttttattttgttgatgctggagactgaacccaagacctcttgctaaatatatgctcttcccctgaactacatcttacccttctaaccccctctttaaatctgtgtttaaataccaacatgggagctgcagagatggctcaatggttaagaacactgactgctctactagaggtcttgcattcaattcccagcaaccacatggtggctcataaccatctgtaatgggatcagatgctctcttctggtgtgtctgaagacagtgacagggtgaaataaatacatacaagtatttagacctatggactacactttatctggagcagcctatataagacctacgtttattgtacagatgctcaactttatttgctggattagtagtgagtgagctttgaaaagccattgcactgggagtgtaactcagtggtttaacacttgtctaagcctaaattaggtcctgggttccattcctgtggcgagttgaatatgcttggcctatggtaagtggcactatgaggagctgtggccttcttggaggtggtgtggccctgtgtaggtgggttttgaggtctcctagtgctcaagctccacccagtgtggagatttccctccaggctgtcttcagatgaagatatagaactctcagctccttctccagcaccatgtctgcttgcatgctgccatgctttttatcatgatgacaatggactgaacctctgaaagtataagccaggcccaattaaatgttgtcctttataagaatgttgccttggtcatggtgtctcttcagagcaatggaaaccctaagacaatttccaacatagacttgagttagaactatggctattttgattgacatctactatctgaacagctagaccacattattaatgcaaccaaagaggttgactcattgggagaggtagggagagacgtcagatttcagggacagagcctgtgctgtgtgtgtatagacccaggccctgcactcactaggggtgcaatgatgaatgctatacttcttcaattagaaaacaagcctggcatgatggatctctggggttattggaaggtttacgcttagagcattcaaagggttcccagcatccatctggtctcacaaccttctacaactccagttccaggaggatctgatgccttcttctggcctccgcggacactgtacgcatgtgagcaagcaaaacacccatacacataaagtaaaaataataaagcttaaaaatgaaaccttatccagcagactacctagcctatgacaggaattctgaggcggcacactgacagctggagggttttatttgctcaacattttaattaattactcattggcttttgctaatttctttttgacaatttcatacatgtgctgtttattctcttttatttatttttgaggccaggtctccctgcatagatctggctgatctgtagatttgctatttagtccaggctgcccttgaactcacagagactcacctttctctgtttcctatgctgggattgtaggtgcatgtcacaattccctgtgactggcttttcattcatttatttttttggggacaaggactcaagtgatccaggctggtcttgaactcattaaatagctgaggatgaccttaccatagtaggattagcacttcagctgaggatatgaaacctcagaacacctacacaaacacttcgccaactaagccatatgtccagctcccatccttacctttaaaatatagatgttgtacgaccatgctctatgcttgtggagtctagagtggcgagcaacgcgacaaacattgcatagatctgaactggtgtaaaccagagtccaagcccctgccgtggtatctacagaaaagcgggaggcctagccactacgaaggtagatacctggagaataagcagctgccagaatacttagctgtattcagtgggtgttcccctcccccaacgcttacaatggaattgctatggaaacagtattcatgtaccagaaatctgtttctcgactaaattttgttcaaattctcggtctcttgaatgctttggactatgaagtgaggcttatcagattttagagcttttgtcggaatttaggccccaagttccacagacccggtgtggtggggagttgggtggaaggcagaaaaggtcctaccctcagatcaccaatcaaaacaaatcacaggctttttaaagtagtaatttatgaagttttatgaattttctgccggtagaaaataggaagcgttcatccactagctaacacggtctatgtgctcctcacacattggcttcggcttcttacttgggacataccaccctgttacaaattccaagttggtatcccactgtttttcaggattggctccccttcctcttctcccccactactgctaattcatagagttaaatcttgtctttttatctaattagccttttcttagggaattaggcccagatgattcaccccagaaaaacatccaagtgcttgggactctggcggggttgccttccaacccatccagtttcccagatatggtctccgtcttctgtttcaactgactgtcagtcgctctaaaggctgcttgatgtcacagacgccgcagagcaaaggctcgatcccctaaagacccgctcttgcaagctaaggtagtgcttcacgtcggcgctaggacccatctgcaggaggaacgcggcacgggtctcgccccgccccaacgcgcactgggtggagccgtcctccccaagctcgccccccccgtgggagggcggggcaccatgggcgtggcacagctgcggtgggcgtggcggcgccggaggcgggcggggcggaaggacgctgcccggtcgtcggggnnnnnnnnnnnnnnnnnnnnnnnnnnnnnnnnnnnnnnnnnnnnnnnnnnnnnnnnnnnnnnnnnnnnnnnnnnnnnnnnnnnnnnnnnnnnnnnnnnnnnnnnnnnnnnnnnnnnnnnnnnnnnnnnnnnnnnnnnnnnnnnnnnnnnnnnnnnnnnnnnnnnnnnnnnnnnnnnnnnnnnnnnnnnnnnnnnnnnnnnnnnnnnnnnnnnnnnnnnnnnnnnnnnnnnnnnnnnnnnnnnnnnnnnnnnnnnnnnnnnnnnnnnnnnnnnnnnnnnnnnnnnnnnnnnnnnnnnnnnnnnnnnnnnnnnnnnnnnnnnnnnnnnnnnnnnnnnnnnnnnnnnnnnnnnnnnnnnnnnnnnnnnnnnnnnnnnnnnnnnnnnnnnnnnnnnnnnnnnnnnnnnnnnnnnnnnnnnnnnnnnnnnnnnnnnnnnnnnnnnnnnnnnnnnnnnnnnnnnnnnnnnnnnnnnnnnnnnnnnnnnnnnnnnnnnnnnnnnnnnnnnnnnnnnnnnnnnnnnnnnnnnnnnnnnnnnnnnnnnnnnnnnnnnnnnnnnnnnnnnnnnnnnnnnnnnnnnnnnnnnnnnnnnnnnnnnnnnnnnnnnnnnnnnnnnnnnnnnnnnnnnnnnnnnnnnnnnnnnnnnnnnnnnnnctctgggtctgggcaccggggaactcggggactgtggctggggactagggcctgggggctcagggacggggttgggggtaagggctgcagactggggttggggacttggggactcgaggtgtggactgaggttggaggctggagccgggactttaaactggggactggtaccgggaagcgaggggattgtgccaggggaagggacgcggcatttccttggggccctgcgcggggcagggcgggggtctgcggcaggaaggaagggtctcgatcctactggaagacggaagtcctggcggagttcctcctcgggttaggtggagccccaggccctggctcgggaagggggcgtgtgaaggtggaaacttttaagagtgctgttgaaatgttttcttattttcaactctctgaagcgataggaactcttgcggcttccaacctgtgtccgtccagatggcagccttgtctctgggaatctgtgttaatcttgaaaagctgcattcgctttcctgtcatttgtttattttaatagagcagacaccgctgtgtggggttgaagtacacagattcccccgaaaaaaacgaaacgcgcgcgggtgggttccaaacgtgtttttgtgcattgccagaagcaccacggcttcccacgtgataaagcaaatccattacctcctttatgaacttcgccgtagagattgtgatttatgaatcaatgaaaaaagttactctttgcagtgtgggtctggagttatttaccaaagacctgcacctgcttcatctccgtttttgtgttctgggttgtatctaggagattctccaaaccatcttccacctgcaagtgatctgtggttgtgtgtgagtgtgtgtgtgtgtgtgtgtaaggagtggagaatcaggtaggaaaagtggactctgtgctactttctgtggaacagtattaaaaaaaggggtggaataagtggacttaaaatccacagcatcaaaaaagtcggaagattatggaatcactgaaggctccattttcccacgtgggtaattcttctttcctggggttgagaagggggctgtgtttacagttactgggattggttgtgctaattagacatgccacatgggataatcgaatctttcatagtgataattttgccagattgctgagctccgtgtattttggggtcatggttcattgacaaagtcgaaggtttcaggagtggtgtgattcctgtagtctgttcattcactcagtttagtcaagtatccatctagcaccagctgactggaactggggctacagcagtgatccagacagttgccacagcagggctttttatggcatgcttctagcccaggactttgggtgtagaaagatcacactttccaggcaagtgtagctaagacctcctgtcaaaagaactgaccctccctaaccaaagataatgcccactttcttgtgtttactactacttgagggagacaatactcatgtatgtaataatgtagcacaatcaaataagagcaacaaagggcgtggtgggttgtggcactctcaaggcagagacaagcagatctctgagtttgaagccagcctggtctacaaagtgagttccaggacagccagagaaaccctgtttccaagccaaacaaacacccccccccacttcccccacctccccaaccccccaaaaaacctaacatccacaaaacaaccccagaaaagagcagcagaggacagagccctgccagggttctctatccagagagaggctgatgtccactcccaagctcactctccttagggcttctgcccgggtccggtaattgcacatggtgtgtgtatgctttttggcaaatgcataggcatccatgcctggccagagtgagactgttagaaaggtgctattaagattgggcgtgtctgtgttcttacttgaataaatcctactaccctcccggagtaggttctgagcatcagagtgatttgcagttttgagtgtaagggagcttgctgtccatcttctgagaatgaattgaaagtgaaaatgagaaacagcctgcttgtaggttctgttttgcttggaatgtgaactgtccaacgagtaactctcttcagcaggtcacgtgacctgaacaacaccctgccttagacagttgcacaggacttttgtgatctcgggagtactgtgctgtctatggtcccccttacctttcagtagttcatggtgggggggttgtttgtttgcttgatttccacctttgctgcagttttgaaacagggtcttctgtaggtcacgctgagtttgaatttggtatgtagtggtggctggccttgaactcatgattctcctgcctctactttccagtcactgagatatcaggcatgcaccattacaccaggtttagactgaggggtttagtgaaaaacttaccatttatttatgccatttgattggagcattaacatcttcatacagtgcagagaggccttcatttactcacaaggtgagtttgaagtagagggaaggctgagtgaagctgtggaacagtggagggaaggggactcagaaatggatgcgtcagcaggtcagaaacagagaaacacttgatgaattgaaattttattctgttaagtatggaagtttacataattttttcacttgtcaaaataaggtgcagagcaaacctgcagtagctttattgggtgaaatagattacaaataagtcttcaatattttgaatttagatcttgattcagatcaggccttgattcagatcactgttctgcctttgtgtgaaaatgagtgtgatgtgtttgtcttggtgttgtggcctggctcagagagtgcctgtcttcagactgtcgtgagcgtgcctccagaatcggttccctactggccactctagtacaccttcagcttggtgtgcggctgctccttacgggagattactgttctcacagcctggtgcagtgtggttcatgaactgctaagttctgtacttagtaatcagcgaacagcagagggtcctggttggaaatcagcagcagcccgcagctaatccaggtgtccaggatgtcttccggagaccagggctgcccactgggagtttgtagcactggctgaagctggccgctgtctctggttgtgggagtcctggttgggaaagacttattgggagggagattggatagagcagaaacaaggaggtgagcggcttctcagcttgagatggcactggcttggctgcttgcctggcaggaggtgtgcgtgtgtgtgcgcgagagtgagtgtgggtgtgagtgaagtgaaagccacaaggtaggtgctaggttgtactggactctgacgtggaaactataaagcacttattgcagccatctcaggtaaagctggttcccttgccttttcttgctgctgggctagtatgcgtgtgtgggcatgcagcttagcatcattccagaaaggagggggacagccctaaaacttaggctttatctgaaggaacatggagaaatgagcaggtcactgccttgccttcctttcctctgtgtccctcctgccctccacccccttactcctttctgtgtttggagaactcctgaatctcctgcttccacttgtcaatcgagcgatgaaattaaaggtaggctcctccattcttggagtgcttcctttctgcagtcatcaggattgatagtttgacttttatgtctctggtgagaaactgtttcccataaaacatgtagtgagaaatgccagaaggacgtttagggacatttaagaaactcttagatgttctgtcctgatccaaatcaaaattcatttatgtggaggcagaggagagaacttgggagccatagtccttaggttttttttgttttttctttctttctttctttctttctttctttttttttttttttttttgcaatgtgtcttcattagcttgctttctaatgaagcctgatgtttgattttggaattaattttgggtgattgttcattcacaaacccttgaagcttgtccagtttgtcacagctgtccctagttcagttatgggatcatggactggagacccaagaagctgagctttgggctgtgtattctataagcctgttttctgccccgctccccaagcctgactgtaggcgacagttcagtcgtcccagcagtcactatcacgattgtttcaaaagttgaccaataagcacggagagttgaatgttttaagataatttggcaagatgactgggtcacaggggtgggtaattaggtggccagcaggttacgtgtttatgggatcagagcaatggttctctcctgatgcgagacctttaatatagttcctcatgctggggtgattcccacccataaaggtattttattgctgcatcataactgtaattttgatactgttatgaatcgtaatgtaaatatctgatatgcaggcaatccattatacaacgtcagagggggttgcgacccgtactttgacaaccctgctgtattagagggtaaagtgatagatatagttactaagcatgaaattatgtctaagacacttgcaccagtaaaggtgctttgctgaacctggagtaaaacagctcactggggtccgaaagggggccttgcttcatgccatgtggcctttctggtgtcttcttccacctctcgataatcttactctaggagatcccgagttggttaatgaccacccagtcctgatccacttggttagtttctgacactgaatctgcacttcagccgctctcacgcaaggcttttcttttcttttttttttagttctatgcctttgaccaagccactgcagaggaggttgtttcctgctgcctgaccacattcccttcttcttgcctgtaaagtgatgttaattcctctaacgcagcgtaccgtagtctcaggaaagactggccatgtgtgcatttcttatccttccagaaacccttgagctttaaccacactggggggtgcggacgtctctcttttagtagtcacttgcagaaactcaataggctgttttactatgtattttattctgcatcatgctataataaaagaggtacattggagcccagattttgacatttagatgtatgtgtggggaatagttttcttataattctgaactgttttttgtcatctgtgaatacaaggattgagtcagacatttcttttaattaagaaaatgatcatctgtgtgtccatgatatgcatgtaagtgtatgtgccatggtgagcatgtcccctcatatgtaggtgggttctggggattggacttgggttgtcagactggatgacaggcacctttacatacagagggccggccatcttgctggcccaagttagacagcttttggtgagcattgcacggtttcctttagatgtgaagttgaggtctcgtcccttgagaagttgtaaccgatgtgatcatgctgtctgtgctcacattggcagctcacagtcttgtttgattttcctagcttctttttagtgttagagaatttatgcagaatgacagcccacagtgaatacacatatcctcccctcaagtcttcactgaggattagtgatcgcagtactttattaccatcaggctgatccaaagggctgtttactaaccccagcttctgcacctcgtctgtgggaggcacacactccacactaagctgcacccttgacactttgtttgttctggtttgggcctttgagatagggtctggtgtatagccccggagatgcttctagcctgatcagtgcgtttcagcccctgagagctggatgtgcagggtcccagctctgcacccccacacctggctttctcaatttggacaccgttttcgcctgtacttttggaaagaaaagcatgcacttggactggttctcttatttaagggtccacattcattccctaactgtgaactgtgtctttagacaatgacaacctgccactcgctcgcttgctcgctccctcggaggggtgccctgctcccgctgcttcccctggctcctgccgggtttaaggtgtgtgtgttgccctggtgaatctcatagcccagcaaacacttgctggagtctaaacttaccaattcatccatcattagttattagcagcagctgcctctgaggacactcacttacatttaaatcaaatgatgacattaaagctaagaatgaaattgatcatcttcttctggtttgaatagtttgggaattactttgtttcgtctgggaacagcagtgactgactgggcaccccggtctatcttagaggttcagacagcttgagagcactgtgtgaggagacagagtgatgtttgtttgtttgtttatttatttattaccaggttgagggttgaacgcagtgatcgtacatgctaagcacatgctaaccctatactctgtcaccccagcatccagcctaaatattttaaatacaatggaacaccatccttgaatcagagcaggcatgtctgtttcagccagccttagccttcctccagcatgttgttctccagctagaagctcaggctgtgtctcacactcagctgcctggttgcccatcctctctagagccctgttttgttgctttgggatacacctattagtagatactttgtctcttgggttgaagattacttaaatacctatatgttaccttgaggtgttggaaaaaaacataattaagtcctagatgtcaatgtaggccactcatttgaatactcagaatcaatgttgtgggggaattcttgaaagatctgagtgtttaacatgcaaacaattcatatagatgattgtgtaatgtgcacagagtttgaatagaaggaggcaggaatggtgtaaagattttgttttggaagaaaacaataaaaactggagtgggtgtggttttgtgggcctgtaagcacctgggaggctgaggcaggaggatcaccagctttagcagcaggccagcttgagccctgtattgagaccctgtcttaggggaaaactgaaagcccagattgctgacggtacagtgtgatgtgcgctggctggctgaggtgctaaacagtctctaaaaacatttctagtaaggtattttagcttggttactttgctgatacagggaaagagttaactttttttgtttgtttgtttgttttgagacagggtctctatttgtacccctggctgctctgcccttaaactcacagagatcctcctgcctctgcctcctgagtgctgggatcaaaggcgtcggccactatgccggggcacaggcaaatcaaatggccttggtttggagattaccctggattatccaaatgggcctccccccaacccccaagtgtcaatgactgacaggaaactagtatctgagggatgtaagagtgaccagacactgcgacctaaagacacagaagctgaggtcagggaacatgggaaacctctaaggtagaaaaggcaaaacaaaacaaaaaaacaaaaaacaaaacaaaaaaattgagctccccagaccctccaaaagaataatctctttaacacccatttcaaagttctggcgtccagagtgcacagtaagaaacgggttgcttttttttgtaggttttcctgcatccctggctggctggaatgtggcagctgaggatgacctttgcacttcttttttttaattaaaaaaagtttatatatttgtatgcatgaacacatgtcacggtgcatgtgtgtaggtcaggggacaacctttcagacttggttcttctgtgtttgggggatcgaggtaaggtggttgaggctctgcagcaagtgtcttaactcactgagccatcttgctggcatttttctgagctctgatcctattgcatcttcttcttgagtgctacagctacaggctaggagtctgtgctgggtttctgttggggattgaacccagggcgttgcgagtgcaaggcaagcactttttactaatggagcttcgtctccagcccaagagctgttaacttctgacgtctgcaaagtccaaatgctaataacttcagaccttttttaaaaaaagtctgaagttgtagaagttgggttaatatgtacagtgttggtcctctgggctctctcaagggtatctgaaaagagaacttaaataactcaagttagaagtgcctgtgtgggtcaggtaggccataaaggaagtcctggggcctggtaaagtgacgtctttttaggagtagaaagcgtttacagccgacacttggcaggacggacagtcttctgctctgtgggtgagtgtctgtgtctgagtctgtcccttaggactttgaagaaattttcttttttttcctagacttttaaattagtaaggtatttattttaagtgtgtgagtgtttatctgtgaaccacatgcttgcagtacccccgcgggctagaagagggcatcagacaccccctcctcccaaactagagttacaaatggttgtgagctgccatatgggtgccagaaatggcaccaggtcccctaaaagggcagcaagtgctttgaactgttgagccgtctctccagcccatgctttgcttctggagcctttgctgatattgcaaggatttgttgttgcttttttgctttatgaagattggcaccatccctgagcaaagatccggtataagtttgtgacgtgcttcatatctttatggtatgaaatagtttttaaaaagtcaaacacttccaacataatcaggtgtgtgaatgaacacagaggctccagtgcagattcagtgaactactagaccgtcagagtatgtccagtacatggtccttccttcctcttcctcttcctcttcctcttcctcttcctcttcctcttcctcttcctcctttctttttttctctttttctttttgagcaaggtttctccacatagtcttagctctcctagaactcactgtgtagaccaggctgtcctcatcagagagatccccctgcctctgtctctcgagtgctaggattaaaggggtgcaccaccacatccagcacgtttctgttttttaaagcaaacattttgaggttataaatttattaaacctatttgtttaaaaagtttacttcagattcttaaatatgtaattcagaaagatgagctgagtagtttttatattagagtgcatttgtttctatatgtaatgtttacaacaaaccaaaacatttgtgtatacattaatttccagtggctcctataaacagcacagttctagccacatctgtatgctcacagcaacccgtttcttactgtgcactctggacgccagaactttgaaatgggtgttaaagagattattcttttggagggtctggggagctcaattttttttttgttttgttttgttttgccttttctaccttagaggtttcccatgttccctgacctcagcttctgtgtctttaggtcgcagtgtctggtcactcttacatccctcagatactagtttcctgtcagtcattgacacttgggggttggggggaggcccatttggataatccagggtaatctccaaaccaaggccatttgattttagcaactttaagcccttatgcaaccttaatttccccttgccctgtagcatggtatttacatactctggggattagagtgtgacacgggttgggggtgggcttttctttcctgctaccgtagtgtgttctgaggactgtagcacgggctcatgtaggatgggcggagtgtttgagctcttttacaagtattacaaatgaggttccttgagtcctgataccatgcttagtctcagcagaacagtctctcctgagggaggcggcttccagaatctgtaagcaaatgcaaactctggatcttgaggggtcatgaggtggatggagtgggtcgtacgtatacagcggggtctggctgcagttttcactttgaaatctcatgaggggcggtggcagctggagacacagctgtgcctcttcagaccgttctcccccattctgtccagttgctctgctcaggtgaagctgggattcccagcacagtctctctgtgtagcttgccctggctgtcctggaactccctccctctgtagaccaggctggccccaaactcaaagatccacctgcctctgcttaccaagtgctgggattaaaggcgtgcgccaccactactgttattttctaaattaaagattttgtttttatatacgtgtgtctgttttaatgtgtgcaggtgcccacagacgccagaagagagaatttagttccctggagcccctctgggtgacgaagcaccgaggcttcgctcctccggaagctggggctgttggtttacactgattaaagaactttagaacaaatcaccgtcaagagagagctagaatgtactaaggaaacgctttgatacagactgaatccatgttaagggaggagagccacattgaaatgtcttagccacaactatacatagtttgtggcttttgatggtgcattacacaaaggatttaaaacattaaaaatgttttcataggggctggagagatggctctcgttgagagcactggctgctctttcaagaggcctgggttcggtccccagcacctccataacgtcccagagccccagttctgtggcatccagtgattttttttttccctccaagggcactaggttcacacacggtacacacacatacacgccacaaaacactcatacttataaaataaagtaaaagtaaatctaaaatagtgttttgaactgttttacttgttgctttgagacagggtttctctgtgtagcccaggctggcctggaacgcctccctagtgccaggttaaaggcatgcagcagcactgtctggtgactgggactgtaaggtggctggagggccatcttgaaggctaccgtccaagagtgcaggtgagccagtgagacagaagagggcaggccggtccagggagagcttccggacgtgctctacatggacggacggcaggcgttcgactgcaggcatgcttctaaaggttgagatattttcagccagcaggagtaaggggctcctcatgtctctctaattttacaacggactgttaggattagatttggaatctcagtaaagctactggctaggatgaggcaaaaatagggacggttagcaacttaatttttctcattttcctcataagtctagaagaaattcagcagaatatgagaggacaaggggaaaaacatactgagggggcgagaggaaaaccaccagatgtgtgtgtgtgtgtgagccggataaggccgagagtgcttcatgttcactaggtacatgtggccggccacacttcgaggcgagcctcggctctcaccacagtgttgaccggtgggtgctccccaagagtgagtttgtggggggccagcttgtgggtgatggaaagcttctcatgttggaagcaagggggctactcttgtcaaccccattttcgagtctagagttcatggaactttcagtcacttctagggtctatataactgaggagctgcaccgtgtggacacagctaagtttatattgaagagtaaaaccgtatttgagtttggacacagtaagccttacatacattggctgtagcgcctcattggacggtcggtgtattgatcctagctagcccttctgccttcctcgtactgcactctcccacagtgttacatctcctacacgcatctgggacgggcgtctttattagttctttttaaaggcagggtcttgtgtgtaacctatgctggccgagaagtctatgtgctgctgaggatggccttggactcctgattcttatgtctgccacccaacccccaaatccagccttcttcctactgttttattttgagcaaggtctgagttggcaaagctggccttgaatttaccactctcctgcctcaacctatactagtcaggattacaagccttacaagtctgtgtcaccaggcccagctcttaaaacattcagatacagttgagtggtttagcatattcacgtcagttgtcgggcatttctccatctcagaaggtattcctccccttcagcagccatctgcacctcctttcccactctcctcccttccagacagctaccatttgcatattatctgtgcctattgtgacggactctctgcccttggtatcattttcagggtccctctgtgctacaagatgtacccgtattctgtcacctttaatggatttgttttctactgtacttacgtcacatgttttatctgtgtgttcattgatggctttgagttgtttgtgcctttgtaaaggtgagaactgactctgctctgtcctttacacgtgtgtggtgtagttcacactttcccaccacacacgcatgcgcacacacgcacagcctattttccattggatggccttagcacccttgctgaaagcaaacagaaatggaggaatatgcgggtttatagctgggatcttggcttctgtgttgttccgtgtttttgaaacagtgtcaaggctgtcttcaaacttaagtagaggatgacgtcacagatgccgggtgacaggccagtgcctccactgcagctgaaacctcagctctggttccttgacttgctcacgtggctttcctctagtgttactgctttgattatgggtgctttgaaatcaggaagtgggggttctcagactttgttcttctcatgatcacagttgactcttctgggtctcgtgttaattctgcatgggttttagaagcagcttatcaatgtctaaacaattggctggagttctgataagggcttgcattgattgtggagtgttgctatcagatttctgatagagtgtgggtgcgtgtttttttttttttttttcttttcccctcaatatccttaacttttttcagtaattttaaaagagtttggagagtataaatcacccttttcccctatgatcctggtgtatttgggtggttttgacgaaattgtggtcttattaaagattgttgagtgcaaaagatgtagaaataagcagtcttatgtcttatgctcagctcctcagagcccgtttgttccagcaactcttgtattggcttaagactcgtggtatgagaccgggctgtgggtacagacaggccaattcttcctttcacagtgaagttttttttaaggatttatttatttatttattttatgtatgtgagtacactgtagctgtcttcaaacgcaccagaagaggggatcagatcccattacagatggttgtgagctaccatgtggttgctgggaattgaacccagggcctctgaaagagtagtgagtgctctttaactgctgagccatctctgcagctctgctgttgagtttttatgggtgtttcttgtgtttgtgtgtgtgtgtgtatgtttgtctaggccacagatctcttcaagtgtcgtgtgtgtgtgtgtgtgtgtgtgtgtgtgtgtgtgtgtgtgtttgtctaggccacagatctcttcaagtgtctatcaagagccagcctagcatgattggcaagccccaagtcagtgagagaccttgcctcagaaatcaaggtggatggcccaagaatctgctagttttgcctctcgggtgggtgctgcaattgcagacatgttaccattcttagccttttcatttgggttctggggatcacagtcatgtctctgtgcacatggcaaacactttggcaaacaggtgagcactctccgaattaccaggttgagaacgtcttctggattctgttctggtgggtttgtgtgttttccttggttgtgaaaaggtgtcacttgtctactgaaatgagcacgcaattttacttaaattcagttagcatgctctattataggaattagttttaggcggtcagactgcccttgcattcttgggataactctggtgggccactggtgcatggctcttctggactgctgatgggttccatttgctagtgcattgttggagattggttgtgtgaactttgaaaactgctttctccttttcttctttgtctgtgtagctgaggctggtctggaactctgagtcttagtcctgcctcagcctccccagtagctagacaacaagcctgcagttgtgcctggtgcaggatctgttttcttgtgtgtgtgaatgtggtgtgtgagtgcgtgcgtacagtgtgtgctgggtggagacctcttctgtcactccacctcactttgctgagttgcagcctcttgatgaacttggaactcactgattttctgctgggctggctggctgcccagccacaccctgtcagccttccccagggctggggttccaggtttgcttatggccttgagtggcttttatgtgggtgctagaggtccgtactctgggactcatgcttacacagcaagtccacctaaccagtgagtcatctccccagcctgggatttttatttgatttagtctgataacctccacctttagtttaatggtgtgaccaaccggttcacgtctagtgctacctgtatctctgtcctccctgcaccattgtgtattgtgagtgtggaggttgatcttgggtgtcagcgtggcaggatttatgagacaaacctctgggcttctctgagaggatttcctgaaaggcttatctaaggtgggccacctagcctgagtgtgggtgggggacccttccagacctgatgtgagcatcgacatccatctttgcttcttgagtggatctcaggtagaaagctagctctctttctgatagtttggttttggaacagtcttgctctgcagatagggtggcctcaaactcagagctttcctgccttagcctcccaagtgtttgtattgctgctgtgtagcaccacactcaactttctactcgttttcagttactgttatagatgtgttttattttctgtgtctgagtgttttgtctgtatgttagtgtaccacgtgtatgcagtgctggaggacgctagaagagggtgttgtagtagagagagagagagagagaaagagagagagagcgcgcattgtgagctgccacgtgggttcatgacccagactggattcctctgaggggtcagaggtgctcttaaccattgagctatctctctagcaccccataactcttaaaatcaagtactttttgctgttaacttttttccctcattctgtagttttgtaacgcacttttttttggacagggtttctctgtatagccctggctgtcctggaactcactctgtagagcaggctggcctcgaactcagaaatccacctgcctctgcctcccaagtgctgggattaaaggcgtgcgccaccattgcctggctgtaacacatttttttattgcttctttattatagtaaaaatttagtgttataaaaatattgttccaggacagccaaggctacacagagaaatcctgtctcgaaaacaaaaaaacaaaaaaaaaaacaaaaaaaaaggttagaaaggactttggggcagctagtcttttgtgacaaatatgtcttgctgtgaaactaagtctgagctcgtgtttcccagcgatgagtaggttctaagtgaatgcagcctagtaacgtagagtaagttctgtgggagctagtggttgactttccttctgaaaagttacccacatggaacaacaaacttcggaagaagatggccttataggaggccatcggtgaactaattcattcccacagagtctcttcttggagcttagttttctctgcagagagtgtttacattcagttccttggtcaggtattgcttcatctgtattgtagctttagtttgatggaaagagttctaacctctgttagaagcaagacagtgcatcttgagacagtgcatcttggatttgcctgctgtccaccaagggggaaaactccctgggaagtatcagagctttgacagttgcttggggagattggccattcggagggaagtgcaagatctgttaactgcaatcattgtgagtctcatcggtctgcagagaatgaggtatgaagcccgtgtagatagagcagatttttagaaaacaagacaggcgctcctgaagcagaagcggggccacagaggttgaggtgcaggcagccggggatgtcggggctacgtggctttttaagtggctgcagggcaagtgagcagcagtggggactcaagcgggagcgatctcctggtgcacaagatgatgggggcatccagagccagctccaccataagctactgcagctaaggtcatcaagtgaggggcctcgacctactgctccagcttgtccagactgcgggcattgccagacagtccagggccccagatgtctcagtacacccaccctgcttcatgatgatataactcatgagtgcgtgcgtgcgtgcgtgcgtgtgtgcatgtgcactgaacatgcagaggacatcctcagctggaatttagtcaggcactatgcacttgcttttttgggagggatcttggggcagggcctttcagtgacctggagctcaacaagtagtgggccgcctgtgtctatctcccaatgctggcattatagcacactccaccacaccgtgtttttcttctatttagcttcctcttcattttgaggcagaatttctgtagtcctggctgtcctgaagcttgctatgtagaccaggctggcctcagatacacagatctgcctgccatgtcccctgtcctcccagtgctgggttaaaggtgtgtaccactgtgccagacttttcttttcttttcacatgtggtttctgtgaattgaactcagctccaaatagattgtttggtaaccactaaactgactgagctgtctccacagcccatatctccacttcttacccaaaaagagtagtggggtttacttactaacaccgtctaatgtggagtccatgtttcagtagctcaggttttaccagcacgccttgtgtggtcttttgttctttggagtcatggtccagcagtgactcgagctgttgatttcgttgctgtgtctccattaacctagtacagcctcctctttcctccatggctgctgagcaggcaggccgttgtcacaccagtgagggcttgcagggtttgtttgaatgtttcctgtggtctttaaatgtgctcctttgccctttgatttactgtaaagtggaagtaggtgcaaaggctcggggtattctgggaagaatgctcggtgactcaccgtgggacagagttgggagaactaccactgcgtccagatggagaccgcaggcgtcttccctgtaagccaattgctttgcttccagatagccagtcatcggcttgcccctttgccagccccttccacagggcatccatgaatagaagaaacagacagtaattggttattgagtcaacagccagctacaaccctgaataagcactccagcgtgacatttaagacaaacaaatagggcagatcagtaaaggaactcagcacagcatgtgtgggtaggacgtgcccactggctacctacagtaagactggacactggggctagagcattgacttttaaagtataggagctgcccttcaacttcagtccctgagaaggcggagtgaattagggctgtgccaccccacgagacctaacgacaggtggtaactgcccaggccatgtgctgagaagcaattcaggttcttgtgcgtactagtcactttcatattggatggacaattttcccaggtttgtgaatggaggctactccattgtggagactgtattaatccgatcagaagttttaggaaaattgcaagtgtgagagttgcccagacattctctactggctatttgcattttgttaaatctgctttgcaaataggatgtttgcacgcactccatctctctggaccatctatagtttctttcatacccctgccagcggttttggtttcatttgaccttgagatgatgagagggacaagccagtcattctgcaggttgtccctcaggtgggcttggttgatgctccttcaggattagattcatgtcatgcatacttttcccaagtacaaatactggttcatcaggcttttccagtgtgaagtcactgctgtgttttactttgaaattaatttctggggagatacttttgagatgaccgtaaatatactgtttcgcatcatttttattcattaggtttagggttttctgcgtgcggttggcagttcattttaagaaggagggttccctccactcatttgttcacgtccttcaagcaacatggactttgcctgtatagactgatccgtgtctgtagtctatagcattggtagtgaaagtgcagattgccccgcgtggtcagcaggcgtcagcggctctgtgctccttgtcctgctctgtatttctctgtaactgtctatccctccccctgccccctgcaaccccctgcctgtggagaaaggtgcttagaaacaggtgtgtccccccttctcttcctccttccttcccctcacctccccatcctcttttcctctctttcccttccttcctttccctcccctcccctcccctcccctccttcctgtgaatttatcataatttcaaatgaagttagtattacagactgctttggaagcattctcgcggtagcgctgaggcccggcgtaactttgctgttctcctggctggagagctggagagtcactgatctcttagagcaggtgaacattttgaagtgtgaaaaatttaaaatgtttggattagttctatctaaagaatttttttattacagagtgaagaaagaatatgattaagaaaaatgtcttagggcttcactgagaatactgattctgttatatataaaattgggatctctaaagagtttgttttgaggattaaattccaaaaatttaaggtaatgtatatgaagttctaggtgtagatttttttctttttgaaatatttacaaattgtatctgcctgcctgctttcgtgtgggtatgttcggtgctcgtggagaacagaagagggtgtcacatgccctggaactggggttctaggtagtgagacatctgacgtgggtgctgggaactgaacctggggcctcttcgctgcagaaccagctctgcaacccccgtgctttcttaataaatggtagtttttctactatagatgaatagtatgcttataggcataacgaacatgaaatacatgtttaatatacttggtgatggcagatttaagatctcatattctaaaattacaactatactgacttgaaaatgaaaatttcacataagcatatactttactgagtttgaggctaaataaacacatgtgcttgcctggcttcagacatggacttggaggatctgatctggatgtgacctggaggccttctccttcctgaggaccagcttccatagtgctgacagctgctagttgagcttccaaggtgggaagcagccagtagtccttgtgaactgtaatgcctgtggtccacagcagagtccatccagcatggcagggtgtaatagcggcactgacatttcgggggcaaccacagctcaggaccaaccttaataggaggtaacttaatgtaacccaggacctgttgctcatgaagtcatggaccgcagtggagagccgtaccagcataattcctccctgcagtctgagtacttatccttacaccacagataaatgtaaacttatccttgcagtagttagagacgttataaaaagcctgcgactggttaaagtgaatagaaagtgatcaaggggtacctagccccatctgcaatacagttcttgcaacaaaggctcaaggagaatcactaaaaaggggatggaaagattgtaagagccagaggaccaggaaatgtgcttgttaaaccaattttaaatgtaataatttttctctagccttactacctcccaaataagagacaaagactgtaagatttatttgataagctttacaacagagaactgagcagttactaatttattccattcctctaaactgatctggctacctcccagctaaagtccccgagataattgcattttagaacggatctggctccgttctcatgatagctcttggacccttttttttcatgcttcccccccaacccccacaatcccatggataggaagttcagccctgttctctctttagcttggccattgctgatccttttttattgacaagtcagaataaatggggagcagtgtttacacagcattcaggcagacgagactcagaatcagcattgcagtgccatgctctgattgcaacaagacacggggagcaggagactcagcatctgaacaatgcaaggataatctttacacaggccgcaaaaacatcttccaggaaatggcgggggaacttctcccatgatgccctaaccatggctgcccaaacaagactacagcaagtacaccacccgtcaacagacatgttaacgtgggaagaggcatctcctagggccccacccctagacaaaaagggacagaagactaatggctaccgaccaagaggggggaaatcgtctttagggatgagcatcctaattggatatctaataccaatttatcagccgtagaactgtatacacaagtaatattatatggactgagcaagttatatttatttgtgtgtgtgtgtacattattttatcaataatagattaatattacatgcctgttgttttaattgatcatttcattaatgaactataaaaagaggcaaatatcacttgttgcttgatgctcttacatgatgtggcatgtattctaccattggatgagaacaattacatatatggactgctaggtgtacattaagatctgcagtcatttggcctttaatttagtcatagtttaaggttttctcagctgaccgatgtgagtctctcccatgtcccctgagcctttcacacctgtgtacactttaaggcaacattccgtcacctgtttgccccagcaaaacaccatccaaccgacttccaaagacccttcagtttctacttcaatgacaccacgtaagactctgggtggcagtgccgagggcgtgcatgctctacatctgctcccttccttgctggggaggaaacagaggctacctggttactccgggcgatgctgcggttcatgtgggaactaggtcaggagtgcagcttccactgccagcctgtctgtggtgtgggctggatagcaggcatttgtggcgtaaccaagtagctgtagtaaggctccctagggaaaaaccatggcctctgatgtgcgccccaaatattccagagtgtggtctacttctgttctcataggctggtcagtcagtgttggagcatgagtttttattttgttttgctgttgctgctgcctgcctgccttccttccttctcctcctcctccttctcccctctccctcctcttcttcttttctacacagggggcctcactatgtcgctatgcctgttctggaacactctatgtagatcaagttggcctagaactctctgaggaccaggatgccattgaacccataggccgcagcctcctgagttctagcattagatgtgcatgtggcttttatttcaagaatcaaattcaacaagcaaggccagaggatgacaagatacacagattgggagtttcactacttctcagccttttggcagacaccaaattagaagtcatcttgggttggcaagatggcttagcggttaagagcactgactgctcttccgaaggtcctgagttcaaatcccagcaaccacatggtggctcacaaccattcataatgagatctgatgccctcttctggtgtgtctgaagacaggtacagtgtacttacatataataatatataaatttttgggcgggagctagcagagatcctgagttcaattcccagaaaccacatggcctgtaaccttctgtacagctacaatgtactcatatatataaaataataaataaaataaaatttatttttaataaaaaagaagtcttctctgatcccaccccgtactctctttctctggtgcttcttaatacagtataaatatggttttttttcttgtatcatttgttgatctcagtgggtttttaggacaggtatgagggttaagcttcgttccatacggtgtgaggctgtggtgtctgcactggcctgtacttgagttctcagcctgctctcgggctgaggcgggctgaggtgttcgcaccctccctgctgctcacaccctcccagctgggcgcctgcttccttcccccctgaagctttcttagtctcccaaggtcacgcgggattccccacccctcagccgctttctccttcctggttggccgatctctctaatgccttgacctcagctgaccctgttcaatgttcaacctggcaatgagaagcgctagcttctaaaataaggttggagcaggaaactgagaaagatttattgaactttcccatttatttaaacagcaagaaaagcaagaaataatagtttagcataaactgtagtgtgcaaacacaatgtgtacttaaatttcctatatagcaggtctgaatgctggacattcatttatttctcacataaacatgtacattgttcataatcaacttttcaaagtaacatgtccttgtcagtaccccccccccccagccttagctatggacattggatgcaggagatttctaatttctagcgcatttctacagatacaaggtttatcctacagtaagttaattcttttcatgagaacagtacaggttatcagcttgcttccatgcgattttgtatttctgaaacagggagaaggaaggcttgttcgatgtgtttcgtgtctgagagggaagctgtcaggtggtgtccttgctttaccagcagggtttagcacattactgctttcttattatcggagtgacggccacagtctctgcagcttcaccttcatcctttggtgataatctctctgtatagaaagtcctcatctttccaaaaatttgtcctggacattcaggagaggtgcacctggcatttgcttgtggcctgcaaggtcttatatctgtgtgtcttaattatctgtatctaatacaatctaacaccataattctctgtaataacaatattgacctgtgaggctggttcctccctgtcttttgttctagtcgttggtctttggcggactgttccacattgactcacctgtccatgttttagggaggtgaaatggccgccttacctacttgtagatggaaagagggcacagtggcatgggttctgttcctcaggaaacccatgtctgggcagagacgcaccgctcaaccacttaatgctgtggcccagagcagactcgggctgcagcttcacagtcctgctctagcgtgcctgctgtctgtccttccatagtggcttcatcctctcatgcgattggtttttataaaatatttgggggtgagggtgtccacacaggatttctctgtgcaatagctctggctgtcctaaaactctctggagaccagactggcgagatccacctgcttctgtctcctgagcgctgggattaaaggtgtgcgccaccatcgcctggcaacagttttgtttttaatgaaatgagttttagttggccacctgttgacaggaaaatggattaaagcaaccttgtttgattcttagacatcacaggttttattatgagtgctgtaagtattctgtcttttctgagaacacagttgacccttggggtctcaggctcgtgcccagtggctactctgttggcagtgctgtcctttctccccaccactctgggcactgtgcccttgtagctttgtgctcctttgtgctctgtgtcctgtcgcctctgttctttatgcgttctatcccgggtgagtgattttcactcagaactcaaacttcggagcgtattgctagaacttttttttttgcacgggggttgggggggtgggggtgggggtggggatgactccgccttccacagtgtgcacagtgttgccgttcagtccttagggcgctgctgagctgctttcctgggtgggtcccacgggttaattgcactgacatttgggtttctttcggtctagcttgtggctctgagttgttggaagggatttgcttccgcttcctgctctcccagcagcaatgactcgttttcctgtggaactgggttattgcttggctaaaagtagacggaaaagagaggtgaggcagtgggaccaggtgctggagaggttgctcagcagttcagggcaagtgctgttcttgaagaggacctgaggccacttcacccatgatggacagctcacagcacctgaaactccagctccagggaaaccccatgtctggcttccagggacacctgcactcacatgcatataataaccacactgaatacacacatacatataactaaaaatagtaaaaaaaatatatttttaaaattagtaaacatgctcagataagtgccatggggcccagcagtcaggccagctgtgtgctttggaaggagagcatgaaaaagaaagtatagggatgacagcagccgtggggaggaggcgtggggaggacaggcacagagcaggagctgccacgtagatgatgtgaacgggaggaaggaggtgctctgtctgtctgtctgtttgtctcttggcttccggctctcttcctccagtgtttctgatcccagaaagtctgcttccttgttgggacttcctgtgctgtgcagggccactgatgctgcttaccctgtgggcatctggctgttacttctgggtcttcctccaggacagcaggttatagatactagtccagttgggtctcccatccttaaggagtcctgttgcacatgctggctgggccctgaactgtgtgaaccaaccaaccaacctacctaccttcctttcttccttccttccttccttccttccttccttccttccttccttccttccttttggctccaaggtggttgccagcaaagtcttgttctattacagtataaaagtcagttttccttgattgcttagagggtgggaagtatgctaggaacatgaatcctgactaacttgtgtaaactagtatttagtcatgtgattacaagctattaattttgggggctggagagatggctcagtggtcaagaacactgactgttcttcagaaggtcctgagttcaaatcccagcaactacatggtaggtcaaaaccatctgtaatgagatctgatgccctcttctggtgtgtctgaagatagctacagtgtacttacatataataaataaataaataaatctttttttttaaagctattaatttttcaatatcattctttgtgaataatgttggtttgctgtaacttgagtgtggccttagaaggctgtctcagcctgtatgactgtacattatagaaatactgtagatcctgatcattgcggttttctttttacagggcgccaatgcctcggcattagagaaagagattggtccagaacagtttccggtcaacgagcactattttggattagtcaatgtaagtacattccagccttgaagctgtgcagcactgaggcagtacgcttcctccttcagtaaaggaaacccatttgtggcattaggattgaaaatgacctgtagttgaaaggaggtaaacttgtctgaggtcttaagactttcagcctaatttcacagttatggcaacagaattctcacagcaaaagtttgatctgtaactagacaagtaattgcttgatatttaagagttctttaactagtgtatcgcacatatacagccatgtaaaagcttcctacaagagaggccgctggccccaatccgtaaagcctggcaagaacttgggaatttaactgaacgtgttttttacagaactgaaactcaacaaagaaaaaacatattattttcctagttccaagtctgtcctggatatttcagtcttggtggcagatacgacataaaaatacatttgatagtgaaactccgcagccctgtccagaatggctgctctcactagatgatcataaagttgtatcatattcaggtctggttaattttgaattatttttttagagatatcatgagtcagtgtaaatataaacagcatttatgcttctcttgaggccacaaagcagtcagctcaggatagaccggagggataaactgtggcgagaccattgaatttgtttgatagatagaaatacagcttctggttgtcatgcctcattattatataaatcttgccacttgtggggttttcaggacccaagggttcaggtgcctgagagccttggcctctactcagatagcagtctggttgcagggctgggcttcgctgtggctgatgctttcaggcggcttctgttgcttccgccctttgtgcccagcccttactctctctgcagcttttctcttgtttgcttggctgctgctttagttttagaactgtaacactacttactcagaggtgtcccttaaatatcaagattggctcaactcccttgagatgcctgctctcacacgtggggtgtacaactgtcctttcataagcaccaatttctgtattattttgtgtgattaagtctgtatcaaaactccagtgttgcgtaaaaacaacaatggtgttggacctgggagtggtggtgtggggaatgggttgggtaactcagaggtcagtttcgagtcctgttcccgtctgtgtcttctgtgcatggtgagcagcgctcatctgtggagctgttctaggaactctgaagtggggtcggacagcctgggtggtggagcactgtgcagtgtgctcagggccctggagtccatgctccccaactgcaggggggttgcaggaggggaagacactttggggtgtaagggagagctcctcccatcagcccgtaagtagctgcattcccaggctgctttgcttttccgggaagtacataaggaagaattgctgctagacctgccttacgggggtcccttttggactatgtgggtagggtcatcaacaagcactcacctgtgggagccagggcctttgtgtttgcacagcagttaagacagacagctgactagcctacaggagacaaatgggatgattctcagcattgttaatcatcgcctgcttaatctagctttagttataggttggtttggttttgtttaatctgttttaaaacttttattagctaaattctttgaaaacattgttttgaactttgatcctatagttgtgtgagtaggtccgtggtttttgctggtgaggagcttgcaggatgaacaagcttttgaatgtctgtggtatgggacacacactgagtagagctactggactgtggagtgctgtctcctcactgctgtgttggcgcctcctgggctatgcagttctcaggccactctggcacacaccctgcagctccattatgagcctcctcaccagattcctgttagcaaagttaggatcgctggggctggagagaaggctcaggggttagagcactggctgttgttgtggaggacctgggttcggttcccagctcttacgtggtagctcccgaccacctgtgactccagtgtcaggagactatataccttcctttggcctccccgggcattgcatggaagtagttgatagacacatgtactggcaaagttatctgtacacataaaataaaaataaaattccaaaacatttaaacaaattatgttgccttcctagacttttctgatggattgtttaagctgagttgtttggaacaagacctggggtggagaagagagaataatgtctttttctttgcctctgggttctgggtgtgattaggtggaaggtgtcctggatctgttttcttgcaaattgatttcattcttgtcttgtgtctgtccatctggtagacacagcctgtttggtggttgtgttccagagatgccagagagttcctagtcaaagaaagccggtccagggattctatctagattgttgaggtgccccgtctccccacagatgtgatgacatgggtgtggtcagctactggacaggataaaggtggagttggcatggaggcatgggcagtaggatagagtgggagtgagcagcacagtacacggtggtgggggcaggggtggggatggaaaaagcttctagattaattcatagcctttggaccatttgggcagatgcagaggttggggtcgccaggctgactggttgaagaaggtattttcatagtggccagggagagggctgaacaggtaaaaatgctagctcaccatacacacgcatgtccacacgtatggatatgaatttttaaaagtatcttaggatctggggaaagtttggctcttggtataccatttcagttggcccttagtcacttgtaactccaatttcaggctgtctgactccctcttcaaaggtttttttttttttttttaatgtaagtacactgtagctgtcttcagacattccagaagagtgcgtcagatctcattatggatggttttgagccaccagcaatcatttatggtggttgctggaaattgaactcaggacctctggaagagcagtcagtgctcttaaccgctgagccatctctccagccccctcttcgaagtttttaaagccaggaatggtggcacacatctttaatcccagctcttaggaggcagaggctggaggatctctgtgagttcaaggccagcctagtagtctacatagtgtgttccaggacaaccctgtattgaaaaacaaaagaagggcgtgtgtgtgtgtgtgtgtgtgtgtgtgtgtgtgtgtgtgttgtcttaatttgggttttcctgctgtgaacagactccatgaccaaggcaattcttataagtcaatatttaattggggctgagtttagttcattctcatcatgacaggaagcacagcagcacccatggtgctggaggagcttagagttcttcatcttctaccaaaggaagctaggagcactctcctcaggcacctcggaggaaggtctcaaagcccacccccacagtgacgcacttcctccaacaaggtcacaccttctccaaggccatacctcctaacagtgccactccctgggccaagcatattcaagccaccacaggggggttattaattattgtgaggttttaatatcaactgttgagaaagaattctaactctccttaatgatttccttaatagaactgattaaggaaaactatccaatggcaggactcagggctgggtagtgctgcatcagaagatggattggctgtgttgacacagtgggggcctacactggaaagttttctgtcagcttgacacaggctaaaatcatctgagagaagggagccttaattaaggaattgcctgaagatcagagtgtactaagcctgtagggcatgttcttaattaatagtccatgggggatggccagcccactgtgggtggggccatccctgggctggtggtcctgggctctataagaaagcagactgagcaagccatgaggagcaagccagttaacaacacccctccatggcctctgcatcagcccctgtctccgggatcctgccctgtttgagttcctgtcctgacttccttcggtgatttactacaatgtggaagtctaagccaagtgaacccttcctctccaagttgcttttggtcatggagtttcatcacagcaatagtaacctgacgaagacagagcccggcttgtagtcttctctatacgtgtacacactgccctctggtttctcagcctgtgccatttgcttcttgtattttttttttttacagacaatgagtccttgttgtcttaaacctttctgatgtagctatgaggtgatgtgtttttctcttatttctgtggaaggtgttaaatatctgttacatagcttctgataaggatgtccaaatgctggttattgtcccgatcatggacgtgtcgctctttgacagaaccagaatgtgttgaccgttagatttctatggttgtggtatggattctactttgaagatggaaatgatgatggctaattaataatgagtcttagtgatgtgtatactgcaggggtactttctctggagctagccaatagtaccagagagctgcagcctagacttcagtagctgtcctgggaagtcttcatttcacagtgtctttctgaatgaagccagtgcttgcttctcccaaccacgcaggcatcaagatgagaagttacatgttctcacagaccttcatgtctttttaaatcagacttcttaaaaaaagaaaaaagattgcagctgctctgagggctttgtctctggagaagaacatgcaaacagaataagctttaacttggagccatgggccgggcctggttctgccttgctgctgtgactctacacagctcctgtatttgcttttagcttggcggatgatggttccatttacctcagagaagggagttctcaccctttctgtgttggctctgtcaggtagtgtccccatgggaggggagcaattttgaagggaagaacatggctgagtaaggggcagcagcacttccctgaacctgcaggggtaaatgccaccattgccagctctgcctgcagcctctcagatcctccatgctaacggcccagccagctttctgtttgtgcttggtatgtagtgcctgtgtgaccttgatagaaaatgcttactttggtatatttcttgaaagagtttgtgttgagggatttggtttttgttgttgtttgtttgtttttgagacagggtttctctgtgtagccctgactgtcctagaactcactctgtagaccaggctggccttgaactcagaggcctgcctgcctctgcctactgagtgctgagattgaaggggaccacagctggcttgtgagtcatatttaaaatcacgtcgtaaaccacttatgatctgaccggagttaagaataatgggctgcaggacagagagcgcagtcctccactttcccggaggctcgctcctcacagctgccttcttcacatttaatggcgtcattctttcctttcgtagtttgggaatacctgctactgcaactcagttcttcaagcactttatttttgtcgtccatttcgggaaaaagttctagcatacaaaagtcagcccagaaaaaaggagaaccttctcacctgcctggcagacctcttccacagcatagccacccagaagaagaaggtcggcgtgatcccgcccaagaagttcatcacaaggttgcggaaagaaaacggtaattcttctatttcctaggtactgttgctttatgtcctaggaaggtgaacagagcatgctataacgcaggggtttttttttgtttgtttgttttttttttgtttttttgagcatcatctgtttatacctcatactgtgttgggagtgtgttttgttttgtctgggaaaacatagcagcagaaactctggtctgcccgttagaccacatttcaacccgacacaggaagcacatggagagaacaggagatgtaaaagttcacaccttcgccagtggctactactgtaggaagtttccataacctaccgcacagcgtcaatagccggacccaagtatgcacacacataagccagtgtgtgggggagcagaggcgtggggctcctgtttcagctccagaggtttgcgtgaggtgtgatcagtgttgggagtatggtactcagctgaaaccacacgtgcccgcgagggaggaacccctgctctcttctgcccactcgacatttctatctggagtggttggttgtgccttctgtgtggcacgtgcccaaaactccagcactcagcctgcaacatggagatcatcagtttgtggtcggcctggaccgagtgaagatgctctatccctgcatccaccctgtaaaaacaaagcaaaacaaaacaaaagcacagttccgtgggatgttggttgtacattgctttcctatgttaattcatttctcttaaaacaaaaatcttaagatagagagccccttattctccttgctttgcccacaaaacaaaaatcacatcagttaagccactgagaattcccgtctgttttctttcctatttgttgttattgttgttttgttttacatttttgttttgtttgtggcagggtttctctatatagccctggctgtcctggaactcattcttagaccaggctggccttgaactcacagagatctgcctaattttgcctcctgagtgccaggatccgaaagtatgcgccattgccactactgcctggtccatctctttctaatttgagatacttctcatttaatttttacaagacttaaagttagacattacttccatgagatgggcatcattttgcccaaggttgcagagtccctgggaagtggctgagttggtgcttggctcccttccttcctagccagctctgtctctatggcagtgctgctgcctcagatcagtgtagaggtggtggtaagtcgttgttgagtttgatctccctctcacgtacgatgctcatggccatgactgaggtctttactgagtatactcaggtgtaatggtacctgtaaggtggtcagttacattgctcatcgagtgggttggaatgagtctaggaagagctatcccctgacttctagactgcctggcaccgttaggggctgttgttgaagccactgggcattctgaagaggtgtaagaggtgtttggtttcctcatatacagaacatttgagtctttcttgcagaccacatttccctctcatgagaggcatttacttgtttagattccagatctgcacagttttgttttgttttggctttttttttcctttctgtttttaagaaactcaaaaaaaaaacaaaacaacaaaaacaaaaacaaacaaacaaaaaaaccaactggggcagtggtggcgcacgcctttaatcccagcactcgggaggcagaggcagaggcagaggcagaggcaggtggatttctgagttcgaggccagcctggtctacaaagtgagttccaggacagccagggctacacagagaaaccctgtctcaaaaaaaccaaaaaaaaaaaaaaaaaaaaaaaaaattgattacctgtgctttgattgatgctgggcacaggtcaagctgagtacacacttgagctagtgcacacacatacacacatacacacacacacacacagagagagagagagagagagagagagagagagagagagagagagagcgcgagcataaatgagcaatcgagcagtggcccaagccctgaagttacagtgttttgaacatcctattcaattccatgcttgaagacttttcctggtttgtagagggtttttaaagttgtggttgttgttgggtttgttttggttttgtttgtatctaggaaatgaataaagcagcagacctccttactgcctgcttcagtgagacagatgccagttaaacatttatgataagcgtgtcttctcatactttctattcttatttcttggtattgttggcatctgcaaatatgatttggaatacattaatatttacctcagggttttggatttcttcttgagaattttgtggggtgtatagatgaagtaggttactgtcttccccctcgtatgctttcctttaaatctctgggaagccctgttgggctgaccgcctgccttgacctcttccgtcccgggtcagggttagaggcgcatgcgttctcagcacagtcaccctcgttgccgcttccatttgttaattgtttgcatttggagaaggaacagactttggtttctactcattcaacaagtctgtgttctaggttttatctcccggtatgtgcacaggcacaggactccttcagctccacagcaacactcgtttgtttgtttgtttgtttgtttgtttgttttgttttctgagacagggtttctctgtatagccctggctgtcctggcactcactttgtagaccaggctggcctcgaactcagaaatccgcctgcctctgcctcccgagtgctgggattaaaggcgtgcgccaccacggccggtgctatctttgatgactaggtacttgttcacattgatccttgcatactgatttcctgttgtataccagccctgtggaggcctgaccctccacaggggagggcgagtgcccacaactctgtgtgtatgtggtgtgactttactaggaaggagaaacaagcagaggtagcatggaagtgtgagcagccatctagtgtgggtgtagggacactctttttttaatggggttatttgattttctggagtccaccttcttgagttctttatatatgttggatattagtcccctatccgatttgggataggtaaagatcctttcccaatctgttggtggtcattttgtcttattgacggtgtcttttgccttgcagaagctttgcaattttatgaggtcccatttatcgattctcgatcttacagcacaggccattgctgttctattcaggaatttttcccctgtacccatattttcgaggcttttccctactttctcctctataagtttcagtgtctctggttttatgtggagttccttaatctacttagatttgaccttagtacaaggagatagaaagggatcaattcgcatttttctacatgataactgccaattgtgccagcaccatttgttgaaaatgctgtcttttttccactggatggttttagctcccttgtcaaagatcaagtgaccataggtgtgtgggttcatctctgggtcttcaattctgttccattggtctacttgtctgtcactataccaataccatgcagtttttatcacaattgctctgtagtacagctttaggtccggcatggtgattccaccagaggttcttttatccttgagaagagtttttgctatcctaggttttttgatcaggtgagattagaggccgcctggcagcctaggtaagtgggatggaagcagagagtgctggagagtgctgtgaggtgcactggagggtggccagccggaacagaacagttacggagtctgggaagctgtcaggggctgtaggtgtcattgggacaggagccccatgcatggatgggtattggatggtgagaacagcattgaagggtaaggcagggctgctgcagtcctcagggacgctgtgagcccctctagccagtgctgcttcctgtaggcgccattttaccatggaggaaatgccacacaggtgagtgaggtgactgtcagtgctcactgtcagctgagcagttctcagaccttaaggtggccttgagccatatcagtggctttgagctctgtctgactttataaaccttagcctgtatactagatatggcatatatgtatgtatgcgtgtatgcattttttcacgttgttatgagccacatctttttgcacatttcatagctgtttgaacacctgtttttgttcagttgttcattcatttatttgttcattcattcattcattcaaaaaacattaatcacatcctgggtccctgccgccacccctgctgtgctagcaatgcagctgtgctgactaaggaagggtctggttctgacgggatctgaatgtgaagagtggagtgatgacaaagtcatgtgtcactgaaaacataaatccgtgcgtgtaagcctgggcgtgctgcaaaggagcacacgccagacgtttgtaaatgacacctgttagaaagatttgagtataattctcatgtttactttatccagttctgtttcacctaagaacagcacactgctttcttatgaaagctctagctatttctgtattaggaagaaaacgtggccattgtaagcagtacagtgcaacccttcagctcttccctctggctgtgagttgatatttgtataatcctgctgatccctttaaactgtaagtagccatcgtctgtccgggggttgcaagatgctggtatactgagcataacatttactgaagacatggggctgctgccctgcctcctgtatcagttctaaagttcaaggtagggcatttttcagggatctgaagccactggtacgtggactactcactcctttctcctccccaagaagattttcattaaaaactcgtttgcatctttgaagaataagcatagcagttgttttgaaagaacgtgcatatacgtgaaagtggcttttaagggaagattacagtgttagagatggtggcgttgatccagtgtgtgctgcccactgccatgaggtaatcatcgaagctggtaactaggttcccagctattcttagaaagacttcctgcctcccttcacttcctcaccctgccttccctctcccttgcatctcctctgaagcctacacgagccttgaactctgtaactcagcttgacatcaaactaaacaaactcaatgtgtctcagcctccagtgtcaaggtcacaggtaagaggcatcacccaggccattctgattttctaatgtctttttatcattcttctggttcttaacactagtgagcaagtgaaaagctgtctcttgttttgttttgctgtttttgtatttaaagaaaaagaggttcattcaaggaagtgaccttgacactgagatattaaggttgccgtggatattggggtggtctgtgagtcaggccaccagtgagttgggagaagctggcatttagtcagtgaaagggtggtggctctctgtatggatagatctttatgcttttcctttggcgggctctgatactcaagcaagcatgaagtaagttagaagtggcagctgcaggctggaaagtcagaggtaggtgagagacaacgcccagaagcagcggggagggtggacatggaggaggagccccagcattaggaagtagtgcctcagagagggtttgccacactgagagcaaaggttaaaggtcattgacttccgctatctcacctttagagccgcctagagcttgtagtgtgatttgcatggcttcaggtggaaccatgagagggtttgtggagtggtcagcagcatacactcagtgcaggggtgggtggcctgcagtgctcttgcttgtaggaatgggaagtgggccacagtgctttggatcaactgtccctgatgggcaaatcacagcatgcaagtatagagagctaaagatcaaattgatgttaagtctgtttggactagggcatgttgcagccttgggactcgtgggctttgggctcttatacgtctcacggggctttcggggcctggaatccagcaggcaggggtgaagggccactccagctgcattattactgcattggtttgagattgaaatgtgcagaatgggtttgagtgtgcgaaagctgggcaggaacgagttgggcagggtttgtgggaatttaccctgcagtacaggaggtagaaagactcagatctacaagacaaacttgttattctcagtatagaatccagggagaccttgtgggccaagtcaggggagccacctaacactgggtaagttgtggtggaaatggggcaggctgaggcacaggagtggtggctcccacctagagtcgcagcactggtgactgaagcatggggattgctatgagatacagaccagcctgagtcatggagtgagaccctgtgagaaaggaaggaaaacactgaaagggcttaagaagcagccggatgggaagggtatgcagcacgcaggtggagagcggggtggggaggcttgcacaacacgctgcacttcattgttgagtggataatcaatatgctgtgtggtctgagaatccacagagaaactagacgctcccgaggaccagctggatcttagcagcgctttctatatgcacttaatcatgtccacagagaaagtgcaggtcgggtttgatggagccgtacatgctccgcttccttcctactgagtgttttggaaatgtagccatgccccgtgttcacggagagctgttccctcacgaccatagcagagccatagcatggcttaaacttgacccattgttttcagaagcatctaggatatctccagacttctgtttccttgtgcgaccacattcacctggctgcactcttgagcgctagacggcattttgttagaacccccatgcagactgcccttcagcgcatgcctgccattccactattgccctagcgccagtgttgacgagtgaccctttccactcatgccaagtaaggcatgttctcacactggcaaagtgatggccaaaatcgtgcttgccctgttttagttttcgtctcccagttagttaagtattgctaagtatctgaatttttagtctgtgtcacctgttcatttcctttgccagttttctagttggttttcttctacctttgcaaaggcttaggagttggtcttatgttagttgtagcacacatgggtgactgatacgtagtgtgtactcttcttttactctgtcttctattcatgctgtctgtgaagccagtgttccctagcatcatcatcaacagtagccgtgggagccagtgcagccgtgggggccagtgtagccgtgggggcctctgagcttacagttctgtgttctcagtgctcagaatctgttgcagctgcacgtgccgggtgcctggtggtgactgagaactgcgtctcaggtgaatgacactgcctgcagcttcagacagtcttgatccaacagccacactcgccaagggaatgttgtaaaggccctggctttggaaatgacctaatgcatggagctgactgttcatctgtagctctttaaaaacagcatttcgtagtttctgttttagacattccctcctttttttctaaagatgtatgttgttgttgttgtgtgttggcgtgcgcgtgcgtgcgtgcgtgcgtgcgtgcgtgcgtgtgtgtgtgtgtgtgtgtgtgtgtgtgtgtgtgtgtagtgaggcgctaggagttgacctagggtctcaggatgcaagtgctctaccactgagctacattcccaccctgtgtttgctttaaaagagacagttgtgggtttcctcacagtgattgaggatgtaaaagcaaagtttactactgcagctcttttcagttagtgggctcgaagttggggttgggggaggcgtattttattttatttgcttcgtttttcctggcaggaagactttactttttcagcccttgtaaaataaagtccccaggtactatacaaagtagggcctgagcctactgaccgaagagaactcacgtgcacctaggggattcaaggagtagccagtgtttgtgccatatctgtccatggctgctgggaaggacgttcttggagttcagaatcggagtggactgtagtgatcatgtgacctgagtggaaaattcttgatggcagatccacacctgactgcatgactgtcagctgggggagtcttgaaaagcctcagtcctctcctgctaaatcagactctggagctcgtggcctgcccggtcttttcctttcgtaagcgggctctcagagtttgctcagcctcgttagtaagccgttagtaagccgtgtcggctccttctgacaggcttgcctctactgaagcggttgtggaaggacccaggtggtgaagatcagctgctgcctgcctcccccagccggcatggagccatcattccccttaccttctttccctctgcatcagtcagaagttcagatgccgtagttgtctgttctcctgtacgttgtctagaattagtatgtgcttctagttctgataaaataccagattttatactacacactcattttcctgttttatttttagagctgtttgacaactacatgcaacaagatgcccatgaattcttaaattacctactcaatacaattgctgatattctacaagaagaaagaaaacaggagaagcaaaatggccgattacggaacggagacgtggacaacgaggataacaacagcacaccagacccaacctgggtccacgagatctttcagggaacattaactaatgaaaccaggtgtcttacttgtgaaactgtaagtccatccgcatagctgtccgtctgaagtcctgcccgtgcttttgtgtagccctgtcgggtgctgcgtgcttttcatggggatgccaggatgctcgctacagtctgcgtcacgctgctgttgttatagtttcagaggctttagaaccacgtaggttagacgacacagggtcatggaagcacagctctgagtcttcacctcagggataggtaccgagccaatgcggtccctccatgctgagtttgaatatcgtcaaaggacatgctcagcacagggctgtgtgctgccaccatattacacagtactcgtctcttctgagtctttgctaagataaagggatgcgaaatggagtcggaagcagaaacccattgtggagaagtgtgtaactgacgttagttaaccgtaattgctcacctcgggtgacaagcagcagcacagtaggctggttgatagcacatccagtgcctgcgctatgcactgtgcgcaatgacgtggccacagtgttgctaggtggtgaggacttcttagtcccgtaataatcctacaaggtcaccgtcctctatatgcgctgttaatgacagcagtgtggcaaatgactgctgtgaacagatacatgaccaacatatatttgtgctggcttacaggtcagtggttcagtccattatcatcaaggctggagcatggcagcatctaggcagacatggtgcaggcagagctgagagttctacatctacatctgaaggccgctaggagaagactggcttccaggcagctagggtgagggtcttaaagcccacgtccacagtgacacacccactccaacagggccaccccttctaatagtgccactcactgggccaaacattttcaaaccttcacaactgggagtttatttccccctttctacagttgtacatgtggttgttgttggaatagaacagtaccgcgtgccctcaaggacgggagcgcccttcgggtggacgcttggccaagacaaagctctagattggttgccaagaatcagatagccttgcactaggaaataaatacagttgcccttcctgtgtgattcttcgtggtgggtctcatccaggtcaaggaagatgctgtctgtgaagatgcttttggctagagaaaggctggctgtggtgtgggcctttttcattgcctgaaccagcagtcagtggtgcagggcaatgtttgattgctagttgttacagcaatgtttccattggaatattggatacaatcagggaattggatgttttatgtttattataatgaactttgatctgttacaagacatcaatatatgtgtacatatatgtattggtacatacatacacacactttagccttcaataaaacaaagtagttacttaacatgttgagaaatgtagtaataggtgagaagtcaggtttgtattggatggggaagacagacaagaaagctttttgaaggagaaagcaatattagccattctgttcgaaagtctgactattcattaatgtaacttgtatggggtaggtactgttttgctaccaataagttctgtggccatcattatgccgattcacagtgagtactcatgtggctgcctttatcgaaataagctagggagtgaaagctgggtgttctccggagtgtgtaaatacacatcgtttctttgtttgatgacacacaaatctaagaaccaactctgccagagcgacggtgagtggagagtagagagtaggagattattaagctggaagtcttgccttcaagatgcccagcagggagcaaagatggccagtgatgtccagacagtgttaaaggccaggccgggctccatcctgagttaggtgtgccgtggatacagtgaatacagtggaggttcagaagggagccagccccgctgctgtacctctctgtgctttcctctgttcttccaaggctgatttcagtcacacaccttgccttgcctttttccatttttcccccttaaatgtggatgttgccaagtttcattgtatgtgactctcgttctgcatcagggacatcagtctatatccattatcacaggccaagtcagtcccacccagttctccaacctcggtggctcgtcctacaagtcctggccttgaggatctcgtccagagcacctgggcggtgtccacatggagcctgtgcttctgaggaccagggcgacactgtgtactccctgtgtcgtcactggggagccagggagctggtcaggtgctgggtgtcttcccatccaggagatgtacgaggtggacagttgctcggtgcttttctggtatttcagaccaagtgggtgtcttttgagtataggacattgaacctggcagctggaaactggtttcctggtcattgaaataactcctgttttacagataagcagcaaagatgaagattttttagacctttctgttgacgtggaacaaaacacatcaattactcactgcttaaggtttgtgtaggattattttctctgcagtttcatatttactttcgtttagaagatttttaagcgaattagtaattctcaggtatccctaacaagcccaatttgtgtttttcacagagggttcagtaacacagaaactctgtgcagtgaatataagtactactgtgaagagtgccggagcaagcaggaagcacacaagcggtacgtgggatgcctcccnnnnnnnnnnnnnnnnnnnnacctccctccctccctccctccctccctccctcccgagttcggacatcagaatgtggtggtgtgagtgtgtggggatgctgactcgtgttcaggggactattttcaggactccacccttctaccagctaagggtctcacctcagatcttcaggctcgggcagaactattttgccagcctgtttcaaaattattttaatgattctgtggccagggatgttgggtaggcttttctatctgaaaatgatgtgcagaattgcacattgagtgctgcttcttgacacacacactctctctctctctctgtctctgtctctgtctctgtctctctctctctctctctctctctctctctctctctctctctctctgtgtgtgtgtgtgtgtgtgtgtgggcgtctgtagattgtgcatatgcacaggcagaggaggacatggacactggattttcctctcagttgctctttgccctgttttccctctgacagggactagcactggacctgtgctcgcccactcactgttttgtggataggtgtagctagtgagccccagtgatcctcttgcctctgctcaggtccctcctgccatttggtgtgtgtgcctcacatcatgcagccctgtctgccctcgaactctggaaaccgggcgggtcttagactctgagagcttcctgcctctatctcctaagcactgggatagacgggtgccctgccgtacctgcctcagggttttgttttctttttttaacctcgtgggtactgggatccaaatgccattctcgtgcttacatagcatgcattcgtatccgctgagctgtctctccagttctacgtttagtttgtgcgtttagcctttaatagttgtgccgtctctccagctccagtcccacattcttactgtcagccttagcagttacggctccgtgagaatcgctcgatgaatggtgccaggccggaaccatacgctacatctgtggttcatgtcttcaggtgttgggcttagatgtcttagaggagtcttgcggagatgcatcttgttaactcagtgcttggtatgcagtcatgctcacagctaatgtcatcactgaaaaagatacagagcaaaggacaaagccaggcagatttccaagaggccctgttccagtgaagtgacacaagacactgaatttcccctgtctaatgacatcatgggaagctctttgagggctccatgcccgggtttgccattccaggcttattgtgcaggcttactcggttccttggctccgaattccaggccctcagagggaagcaggtgctggtcagacagctcgggcccgagggagagctgatgagtgtggtttgaggcgctccttagacctcagttcccaagtgccagggagtctgctggccatgctgggtctctgcacacgacactgctgctgccactgtcacccaactcttggttaaggtatttcctggaattattcttgtaagctacggtttctcctgctgcaatttttaagtatttagtgtagatttaaagattgcaaatacttcattcttcattaaactgccattttaaaaacttgaggcacacccagacagtccattactcttcctgtttttgtgttccggttatccacagcccagctggtggcgaggggaggtccctgtggctcctctgggctgttgctccctcatacgttctgagctcacgttggaactagctgatcctgtgctgctgtgtggtcctgctgtggggaaatgtgtgccttgctgttcaggttcctgagctcctgaactgagcaaaggatgtgtggccattcatagctctgctctgtgcctgtctgtactgaaagccatgacttgtgaactcactgtggctcccattgcagctgacagcatgggcttcccggccgtgcttcctttttacctttgtaattccctcctctgggagtgaagattggctcctgctatctttacttgtaaaagtatcttttattcgcttgatataattgtcatctccgaggcttgctgcctctatctgctaaccttggcctcgtcctggaagcttctggcctcagtacaatcttatctagacctagagtgttttcagcctctgagtcttactgctgaataagctccccctttcttgtttttttttttttttttttttttttgttgttgttgtttgtttttttctgagctctgcctggctggtcaactcagctgctctggctcaggctcctctccaggctgacggactcagtctggcttctttcagtttctgactgaattgctctgtttggcctcagactaactttggcagtctgttctaatctggctccttctcattctcttgctgttttttgtcttcacctgtgtctagcttgttctctttgcaacctgtctataactgtcctggtaaaactgccccccccccttgcctgctcttaagtagactctctttactctctgttctcatgagagttgggcatatcctattctgtcaaacctttctctggttcgtcactttgctcctctaaactagacatcactttaaaacatggttgcttacttctacaaactaactttaccttcattgtttgggattaaaggtgtatactaagagcttgtctgtattccagccagagggattaaaggtgtgtgctaaggctgagccacaccacaaccaaagacaagtctttccaataaacaacacagtcttggggttcactaataacctgtaacatatactctcttttttgttagcaacctgtaagtaagcagtctgtcttctagcctgaccctctcccaccctcctgcagataccctcagccccctcccttgctgatatagactgcgcttttctggtcctaatagtccaaatggattgctcataaaaagaaggaaaaaaaagatgagattggggtgtggagcggtacaggggtcaaggccagcgtgtaaagtgtcagtggagggttagagagtcctgggagctgagctttgctctgaagagaactgactgtgagggcaggcgacagtgggcgagatagcaatgaagaagaaaacaaatatagcattaggatgtttcacagtttaaagccaaattctttgattcccagattattttatcccttcatagaagacatctcattgttcaaccttgtgattcttaacagtggcaaacactctgaactcgtctttaatattgttgtgagaggaaccattctccttgtggaccaaggaaatgccaccgtctagcttgatatagcattgagtttgttgtggtgactccctggagcaatgactgtggaaagctacctccctgggtccccctgctcagagtgcaggtagcttccatgaagagtcttctcgttcccactggaattccagttctttagggagaggagccaataggattaatgttgagaggtttattttgatccgatttaagggccactgcttgcgatgaacccatatctgacactgtcagtgaggctcagaacctgagactaggtcagaggctccaggtgtattagtcagggttctctagagtcacagaacttatggatagtctctaaatagtaaaggaatttattgatgacttacagtcggcagcccaattcccaacaattgttcagtcgcagctgtgaatggaagtccaaggatctagcagttactcagtctcacgcagcaagcaggctaaggagcaagagctagactcccttcttccaatgtccttatattgtttccagcagaaggtgtagcccagattaaaggtgtgttccaccacacctttaatcccagatgaaaggcgtagcccagattaagggtgtgttccttaaactcggagattcaatcttctggaatccatagccactatggctcaagatcttcaaaccaagatccagataaggatctccaagcctccagataagggtcactggtgagccttccaattccggattgtagttcatttcaaatattgtcaagttgacaaccaggaatagccactacaccagggaaaactacttttatcaccctgctacttggacagagcaattaagtcattataatcaggtttaagcatgtgtttatcaatcaaagtaggaaccaaagcagtcaagacatctttgccagtgagaaatagaaactctgtgcctcgggattcatcaagctcctagaaagcaccttctgtaccctgctgcttgtggaagtgtctgccctgaaaactgttgtcaggatgcttggcttaggtgtcatggtgggcgggcgagaccaagcgccatagccttcctgttggtgcacgcattggctgagctgtgtgaggtgccgctttgtcgtggaagagagcagacttatctgatgagagagagtgctggctgcagccgtatactttgctgtgagcattgcccggatgcacaggctaggctgggatccagaaaggtgtagtggctcacggagcagcagactgtcagtaactggctctggggtgagctctgtttggtgttgctgcagctgctgcttagccagtcattgtcactggccacactccacttgtcccccaggtcacagtcagatcaagagtgggtcacttttgggaggagaggacaaatgaccacttctgcagctgtaagaggactggctctgctggccgctctcaattggtcattgtcagcttctgatgctgccacagtgctctgcatcttcagggactcctctcctctatgaagcgtcttcacccagcatgcactgcgccttccttagcgttcctgggtcagacgagttgctgatgtcgccagctgtctctgctgctttttttgatgcattttcaactcaaaaaacaaaaaacaaaaaaaccccaaaaccaaaaaaccccccaaaccaaaacttctcacatctgctttttgtttaatatcagttccatagtataaaataataaaaagcatgaagtgagatgtgtccactaaatgatgtctaacagaagcatatttattaagaatgtagtggtggcgcccgcctgcctttaatcccagcactcaggaggcagaagcagggggatctttgtgagattgaggccaatctacaaagtgaattccaggacagccaggactacgtagaagggggcgggggagattgttccagtattaaagtcagagttcaacagggtcaaaaacataattcttttgcaccaacttgataattctttcaagctcacagtggatgttttctggattctgtcttcatctgtatgtttcaggatgaaggttaagaaactgcccctgatcctggctctgcacctgaagaggtttaagtatatggaccagcttcaccggtacacgaagctttcttatcgcgtggtctttcctttagagctccgtctgttcaacacgtcaggagatgcgaccaaccctgacagaatgtatgacctggtcgccgttgtggttcactgtggaaggtaactgcggctctggagagcttgtgactgcgcttttcctgcatttgtgcctggtgccctcagagccctgaagagggcatcagatccactgggactggaattacagatagttgtgagccaccatttgggtgctgggacctgaacctagatcctctgcaggagtagccagtgttcttaactttgggtcatctctccagcaccccacatctttttttttaaagacagaatctctgttgtgaagcccagggtggcctcagcctcctccgtgctggaaacccaggtctgtggtgctcccacacttggctggactccagtgttcttcatctttctcaagatcggtttgttttgaaattagcttttgaaatacatacgttatcaccccttcatttaaacctttaatactttagctttatgccttcattttcattcttgtctgactctgagtctaagggcccgatatcgcagcttatagaacttggctgtcatctgttggcttcctttccttttttggttttggtgttgaaatgatgctgcctgaatagattttgcaggacagactggtcccgagtgtgagagtgtattctcatcagtgactatgagaagcgtttgagtgctggtggatgtgacacgcaacagtccagtgctctgactgtcccgctgtgcgcgttcgccatccccagccagccagattcatggacagccccactcgaatccacagggcatgtgttctctgtgtggatgcatatgcctgtagcccttccttgcaggggtgtgtgatttgggggctaaacccagagccttgcacatgccaagtaaatgctgtggcacctagctgcacgccagatctctcagcgaatagcatccctctagggcaggaaagttgactcccagcacccatctcaggaggccgaaacctgcctctaacaccagccccaagggcacagaagccctccttgggcctatggagggcacctgcagtgtgtgtgtgtgtgtgtgnnnnnnnnnnnnnnnnnnnnnacacacaccttaaattttttttttaattttgaaatttaggacaagaaggtaatataatgtttttttaattaacttttcttttttctcttgttttagtggtcccaaccgaggccattatattgcaatagttaagagtcatgatttctggctgttgtttgatgatgacattgtagaagtaagtagcttcttaagtgccttggagtcgggcatgtctctttacttttcccttcatagcttctcattcctgtaggactggtggtattaactaaatagttggtcagggcattattttgtagtcagagttcaagtacagatgtctaaaccaatatactgaggctttgttgctgtgatagaacactatgaccaaggcaccttataaaatagagcatttagttgaactaatggtttcagatgcttagagtccacaatagaggcaggaagagctcacaccttgatctgcatgcaggaggctgagaaaccatcctgggagaggcgagggtgggaataaacccacaaagcccactggcagtgacacgcctcctagtccttctccagatgccccagctggagaccaagcatccaaacatctgagtccataggggcccttctcagtcagtcaggcctccacaccagtgtgggcctccttctcagtcagtcaggcctccacacccagtgtgggcctccttctcagtcagtcaggcctccacacccagtgtgggcctccttctcagtcagtcaggcctccacaacagtgtgggcttcctttgcagagtggagcatgctcagatggatattcagggaggcctcacccccggcaggcaggcaggcagggcaggcacctttgttgctgtttggagttttacggtggtgattagtgttttcctgtgctttgtgagcacatttgcgcagtgcctctgagcctggctctcgtccttccgttgctgtaagcttcatccccacagtgcccactgcacgccactgcctcctgctcactgtgcacttggctgcgggtggcttggatggatagagcagttgagacactggcgcgccgtcagtgtggaccgtactgatcagtccttgtgttggtcctttactgacagcgtctctcaccttccttggcgctaggccagtctgttgggttgaccatttttacacatccaaaatagctgacagctaatgggcttcatgtggttcggctgacacttgcaaggagaggtaccggctcaagggtagctgttgtgttcagctttggacctgttgttcaaggtgtttcctaccagacttctcctcggccgtggggaacactgaacactgtgtgctccgttctgagtgacatgggatagacactgctgttcatcggagtttaaaacaagcttgtcagagctggaagtgctaacctgtctgttctgtgtcacagaaaatcgatgcccaagctattgaagaattctacggattgacatctgatatctccaagaactcggagtctggctacatccttttctatcagtctcgggactgagaggagccacggtggggagaagcttctacaagcttctctggttgtttcagaaaggatcgagcggatgttcaagaagagaaagcgagacagacagacagacagccacaggacgctcagggcagtagctcactttgcatacgataaagcaaagactgtggattaacatgcccttccggttacagtagttgaattttttgctcaggaatcatgctgtctgtgcagttcacacaaggaagtaaaatcagagataccagctctcgtgtaaagcagctgccagctgccaacacattttctgtagtaattgcaccaatgatgatttgagttcctcgggagggcagtggaagaattagatgtgctagtctgattgagcacactgcactgtgtgccagcgtgcgggatgcgtacactgtgcatgggagcagtggcggtcttgtcaagcatcccggaaagtacctttgggcccaacccttgcagttgccttcctgacgcacagagcacagacacagagcccagtgtcaggaggtcaaagataaccctgcttctctggagaagcgtgtgatcatatacagtgtatgtacatggagggaacagctggtcaaaactggcttcttgattccccaaggggaaagactggctttgtaatgatctttttttccttatttattttacttaaactggttgagtctaagcattgtgtgaagtgccagtgactctaccagcaagtcttagcatattttattagtttgtcagctgaagtagtcctgttgttcgtttctgttttcaaggtgaactgaaaattctagctaaaatcactaagataatcatgagatgattgcaagattgcagtgagcggggtcagtgctgtcaggagggactgtctctctctggctgagcatttcctctttggttatagtttgtcactttttttaaagctttaatttcagtaaagtaggaattccctgttgctagaatgataaaggaagccgcagcgtgaagccggcattcttgccagccagaaccccaggaccgtgcacagctgcggcggtggcatggcgtgttcttccggtctctttttagccttgggaagggctagtagagcagccagaaccccggcagcagggcagcgcacgccctttggaagattacgttttggtgaagtagtaatctcgaaaagaagcccctccctcccctcccgacctgatcgtcctattggagcagtgtgttcagacgcttacaactaggtctgttgggagtttaaggaacagtacggggagtctccatgtcccgccaggcatcaagtggtatgacagtggctgaatgtaacttgcagaaagtggatgaggattctagtcgaagctgtcagactctgggtagcctcacactgccctccgcatgccgtggtggtggtggcctgttgataaagcccctggttttctattttactaaaactgttgactgagaagcaaacagcaaaaagaaatgtttttgtgctgctatgattaacatttattttctacctttagctcaggaaatgacttcatctattcatcccataggcagatttgtggcggggtcacttagctaatcgggcttcgtggacagatgtgctgggagaaaaagatggcctttgacaaactctttctgatagtttctgaagccttaccctggctgggtttgtgatctgccagcatcgcacagagaaccacaaccaagagcatgggaggtagagccaggagcacaggcctgcgagggcctacgccagattgtgttggaattaagacatgccacggctgcagccttgggttcagagacaaggcatacagtgcggctgggtcctccaggcggccttgtgcagcactgaatactgtgtttgcttgcacacacatttttgaagttaaaacatagcaggaaaaacctagttaagttctccatgaggtgaggtgtagcatgggagccaacctccgggcgagcaggcctgcttggctcaggtctgcgctggacggtttgcaggggaagggctcctgggtgttggctcctaatttactttttatttatagtgcagatggatctgaggaagacattttgaattttatcagagactcagtaaacttaaaaagcatacagggtttgggttggggactggggaaggcaggtatggggagtgagaaagaaaggtgacaaaggtgacccgcccagcacacacttcaggggattgtcgtttgtttgcctgcgattatgatgagggcagatgcaagtttcagacaaggctagctgctgtgttattatgtacatgtttgcttgggcagctgtcccagattttgtatattagaacaaaagtttctatgaattagcataactaaaagtaaatattgtaagtgaagcccacttctgagccatgcggcttctgtcatggggatttcgcctttagaaggttactcaagacaggagccgagtggcttaggccgggccaggaaatgtgctatggcgtcagccatcagcatcgggtttttctttccatgatggccgtaggaagacctcactttcataacacgctcctcctgatactttgtgtaaagatacttttcattaaagattctctcaggagggatgtggctgggagctgggaggcaaggtgctggagtcctcattctccagtgagcttagctgtgtgaccttgggcaagtcacctaacctctctgtgcttcagtctccctcttgtcaatgggagtaatacctacctcacagggttgttgtggggattaattagagaggaagtctgtaaagcatttaaaaggttcttgaagaaggcgctatataaatacaaaataatatctattaaagttggcttatttgtgcttgttggtttttaactatacttttttttccttttgcccaaaatgtatttgaaattagaagcatacattttaggaatatgtattagtccttctgcaagttacaacttttgttctccagagcccctagaaaaccacacacgtagaaaacagtgctttgtggggtctcctcctccagccctgtgacagacttcccaaggtgaataagttctaacaaggaaaggtctgtttgggcttgtgcttctaggagcctcagttcctcggcaattggggcctgtggcatggtggcaatgtaggctgagagcctgtggaagtcacagtcaagtccctattgtttgccctagcaagccacctccatgccctcagggagcgccaggtccaggctggctgttacgcaatggcatgcatgccctttgagacaggtccctagtttctaagagctaagttcccagaggccactgtctgtctgtctgtctgtctatcccacttcctctgctcctgttctgttttgagcattcacaggtctgagtagcctgagctgtaattggtgaggtctctggacctccctctgttttcccagagtccctctgttctgagaactgaccctccgagagccacctagtggaagtctgctctgttggggctctggaaagacagttgtcagcagtaagtgagccccactgtcagaaggatgtgccataccgtgagtgacttctgtctcccacgtctgtcgcacatttcccacacgtctcactgggagcagatgaagtcatgcctcccaggtttgctcaaagcccttcttcttgggcggcacccacccagagtccctcccagccctctgcctccacgtctgcctgtctcagcttctgaaggaagaacgtttggatgttgttctctgtggcccgagacagagtattttacttcttccaatgtcagtcagtcatgacgtcctcatctcagaaagagttcctgtctctctagaaaccgagaactctaccagacacacgcagccgagagtataccaccaggctatgacttgggtgcctgcgctcataatcgtagctgtttcttcattgcggtgaggtaaaatgaaggccattctgacccttcccgagggtccagttaacgagctgtccatctggacgggactctgtcctcacggtccagtctgagggtcctgatcggcttcattttctctgctagttacaggattacaaggcaggaaaagaaatctctggcaagacaggtggtagtggagacctctcaaacacagaagacagcagcagatgaggaaaggcagttggagggtgggggtgggggtggaaacaggcagcagtcacagaccctctgcaagaggggtggggctgagggattcaagaaacaaagttttagtctcttgctgaagactatggtttggtttggttttcagtatctgaagttttctttcctgtaattagggtcagtcagattggagataaaggtttgattggctcacaactggtttataacctgtcctgttctggcatcagacttgttgagccagttcatgggggggatgggggggggagttgctgctggtgggaggtaagagcccacaaagcttttgtttaagctgccagtttcagatctgggtggtaatgaatccagccaccttgggagttctccatctttatctcgtagccatggcccctctccctccctgtctggccgccagggggttgcttgctgagcctctggtcatcacaggtgtgtctgtgtggctgttttacatccctcataagtggaattaggaaggatttgttttgtgtctattattaaatggttcccaaggctcagtagagtgcgccaacatttccttttttttttttttttttttaaatcagttttgctaaatatcacaggctggtctcgtttgccatccttctgcctctgagagaatgtcctttcttatgaagcttaaataacacagagaaactgtcttacaaaaccaaagaagtaaaacagcgcttaaagaacatttccttgtccccggcccatcgtttgctgacagattgagactcatgtgcactagtgtgcacattcgagcccttgagcctgtctcttcctgggtgtgcatgtatgtgggaaatgctggatcatatggaatcctctggtaccaagtttaaaaacaaccaaccatggtgtttcccatccccatgccggcttcccctgtcagcacctcaccagtctgctttctcagcctcccggcacacacctctgttgtggtttttggttgagtaattgccgtcgatataggcgtgctctatctcctcatggtttggtttgtgttgccctgtgtctgctctcaggcccattgaccataaacatgtagcagtgacaagcaaggcgcttgtagactcactgccaggcctttttgtttccaactcagatgcttcgaatttccttttgttgtccggttgctctggctagaacctccaataccactccgaatggaagctgtaaaaggggcgggacatcttcatgatccccaagggaagctccacctttcacactgaggatgatgtcatctatagtttttcccacgtggccttttatcatttcgagggcagattggaaacatcacatttcctcacatgtctgagctactgaggtaatcaggtgttgttcacccttattgaatcactgtggcataggacaggtctggccctttaagaaactatccatgcactctggaagtaaacaccacaaggtttcggtatgtggtctttctacgtggctcctgagttccgtttggtagaatttggttggccagttttccatggacattgattgatactggcggtggcagcagcagcttcgtgcattcctcactacctgccccagtgttctgaattctcaaatgaatgtaagatacacaggcagccttatatttagtattcctgagtcagctcaatggctgggccactcacaaacttccgtgattctaatgcctcctctccaatactcctgaattattccttactaaaatctatattccatctttgctactctagatcaaattatggggggacaggggctggggccgctcttcctctattcttatgtgattggtctcctgcagctctcaggcttggaccttatttctttgctggcatggcaatcctttttcttggtccccttgccctcaaatcctaaagtcccgcctctgtctccctgcccagacactggccgtcgggtaactttatttaccaatcagaaccaactgggggcagggaccctcagcatcttacataaggattctcttacaatattggaaacccaaataaaaagttgtactggctggttttgtgtgtcaacttgacacaggctgtagttatcacagagacaggagcttcaggtgaggaaatgcctccatgagatccagctgtaaggcattttctcaattagtgatcaagaggggagggcccattgtgggtggtgccatccctggactggtggtcttgagttctataagaaagcaagctgagcaagccaggggaagcaagccagtaagtaacatccctccatggcctctgcatcagctcctgcttcctgacctgcttgagttccagtcctgacttcctttggtgatgaacagcagtatggaagtgtaagctgaataaaccctttcctccccaacttgcttcttggtcatgatgtttgtgcaggactagaaaccctgactaagacacaagtgttagaccaactccacagcacactggtctgtagttctcatggttttcctttccctttatatttgtctcttgtgatgctgagagtcaaatctgagcccttggaccctcttatcaatgagctgtatcccagccttcatttcttttctttccttttttgtactgtctttaatctttatatcagagtgatagtggcctcgaagaatgaattaggaagttgtcacccattagaccttttgggtgaatataagaacatccaacacgtttcccccttgtttttaagtcataactgacatatatatatatggtttgatgggagaggaacatgcacacagctttagagaacagggggagatgactgtggaacccatggggtgcaggtccagaacagggatctagaaatcacgactgaaagagctggggatggaaggatgctaattaatgctatggctggggatagacttgagccgcccatgccatgtgggtatttcacttttgcaaagtcgtcctcatccaggctgactcctgagaaaagttatacaatattttacaccatgctcatgtattgtagctcatggtgattcctagtgttttctcagtttctatctggtttcaaactagggggagaaaaaagaaaaagaaaaaaagctcacactgtggttactttaagaactgtcttaacatcacacagagtagtggtagtacatgcctttagtcccagcatatggagacaggagcaggtgttaaaggttagcgtgatctacagagtgagttccaggatggccaggactacaaagagaaaccctgtgtctaaaaactaaaaatagcctggcagtggtggcgcacgcctttaatcccaccactcgggaggcagaggcaggcgggtttctgagttcgaggccagcctgatctacagagtgagttccaggacagccagggctatacagagaaaccctgtctcaaaaaacaaaacaaaacaaaacaaaaaccccaaaactaaaaattaacaaacaaaaaacactcccccctcaacacacgcaccatcaccaaaaaacaaaaataaacaaacaaacaaaaaactggcttaatatcaagaaaaatagctgtttccatggtcagactaaccattcttaaatctggttcctgaggtaaatcccagaattttccttctctgaccagaggtgaagaatcccgccaccacctcaacccagggggtgctaattggattctgggcttaccagctcaacacgttcataccacatttggggctctgcatccttttactgtgaactcactgtcagtctagcatnnnnnnnnnnnnnnnnnnnnnnnnnnnnnnnnnnnnnnnnnnnnnnnnnnnnnnnnnnnnnnnnnnnnnnnnnnnnnnnnnnnnnnnnnnnnnnnnnnnnnnnnnnnntctctctctctctctctgttttaagacagggtttctctctgtagtcctggctgccctggtactccctctgtagaccaggctggccttgaactcagagatccgcctgtctctgcctcccccactggaagcttcctaaatcagattcttcgaacctgctcaaagttgccttgggagcctcacccctcttttcagatgtggaagcccactaaccggttgcaggcagatggtcccacgttttcttttcccacgtctgggtttgctgctttgggctgctcttggcggtgcatactagatggctgtggattgctgcagtttaccattgggaagttgcctctggtcctcttcctaagagaagaagaggatgagtcaaatatgcctatatccagatttcaaagagaaagagtcgatctgatatgtcaaagttaagttggtggcacccgccatgtccactcagcatacacaaaaccagaaggatgcttagatctgggaggttgaagagactattctatagcctctgtaatgaaaggcttacattcttaaaaatacccaaggaagccaggcatggtggtgtgtgcctacagatccagcatgcagaaggattgggggttcaaagctgacctcagctacacgggagacttgaggccatcctagggcacatgagacccttgtctccaaaatgaagtgttagcagcatgacctactatgtaacagtgttaatttgtaatagctccctagtaaattcctgaaagcatacactgggtcacttgtagacagtattgaagaaaaagaaaacaatgttactatttttttaaatgctactcttggtatgttggccacttctctattactgttataaaatatcacaaccagtgtaacttaaaaaaagaaagtgtttaactgggcttatggtttccagaaggttagtgtccatgatgtctgagtaaaggtgtgggagctgagacagctcactgaacatcaaggaacttctgaaaccccagagtctgccagccatcgacacacctgatgcttcccaaacagttccaccaactgggagccaaggattcaacagccccgggaaagaccaaagcacacacacaaatcccggcactcagaaggcaagggcaggtggatctctgagttcaaggccagcctggtctacagagtgagttccaaggtatccaggactacacagagaaaccctggtgggggtggtgggggaagatgtggatggtggaaaaaaattcaactgagcctacaggagccattcccattcaaaccatcacacttagatgataaagccttcgtccagtgcaagcatttgggaaaaactaatattctgtgtgcacattaggactatttagccacaattttttgccagcagagctttttggctagcgaccattttccaagtggtggttattttaggccacaggaatggcctatattagttagacttttactggtgactacttgtgtagtggtgatcacatgacataggaagtagacacacaaaattgctgtctgtgggacagatgattagctgtagtcatggaaacttcagaaaacatagctccaggtaagtaactgacctttcccagtactgcctgtgtacatcattcttagttacttttctattgctgtgataaaataccaccatcaaggcaatctatgggggaaaaaaatgtcaattgctgttagacattgagagggttcaagttcatggtggagcaaaggcgatgctgcaggaataactgagagctcacatctcctccccctccctccagacagggtttccctgtgtaaccccagctgtcctggagctcactctgtagaccaggctggcctcgaactcatggaagtctactccatgtactcagctctgccttcccagtgtgtcacatcttgatctacaagaggcactaggagtgctaggtggcttttggaactacaacgtttgtccatagtgacacatctcctccaacaaggccactcctaatcttcccaagttcctccaccaactggggaccaagtattcaaacatgagcctatggggcccgttctccttcaaaccaacacacctactgaaaagaaaggcccatttttaaatgcagtgtgaacattgcgatgtcaagcggtaggtattaatgacattctgttcttcatgctaaacttttagagctaattgcaaagtacattaacttgatgttactcagagcaatatagtttttgatgctgagccaaagtgggcggtggaaagctttgccctgtgcagggtgcccctgggctacagcatggcacatggcatgtcgtggctatgatgaaacgcaggtgggactcggctataagtagaggaagagtggggtgtgtgtgtggggtgttgggaagggggaagcagaggactgtgggcatttcatctaggctccaccccatggttacctagcaacagcaggggtggctagagttctggtactagtatttgtttctagtaaattgactttgcctctaattcccagaggcctgggatgctaatgagaggatggctggccattaattagactcctagtgcttggaccacacccaatcagtctctgcctgatacatcacaagggcaaagccatttcactgggacttggggttaggtcgagttgaaacgggctggcatttcaagtgtataagactggatttcagtatcttcccttgcggtgtcacaaagatggccgattctagtgtgcatcaagtcgatagaaccagtacactatggctttcccatacccttgataagcagtacagttcaacaatacaaaacagaaaggtcaggctcgcagttagaactggtttgaaaactggctctgcacttacatgtgaagggatgagggactctacaggtcagtctgtctgtgtggacactaagatgagattaaatgtctaaaaatatctgccaacatgttggatatgcatcgaactttctcccagctccctcatcttctccctaaatatttatgagcctccttgaaggctaaagcacagggttgaccatcacgcatgcgctcagtgttagtttcaatccagaataccagcaaaacaacagactgtcacaaacctggaaagccagtgtcagcgtgggttgtcacctctgtttctatgaggcctcttagttggcccgtcctgcacatgcctatgtcccctacacaatgatcatcagccttggccgctgaagattcattctttctttggtttgcagaaggatattgtcttagggttctctagaggacagaacttacagaatgtattttttttttgaacctggttcctctgcaagaacagcaggtcctcttaactgctgacccctacttatttttttttaattatgtgtttgtggaggtgagggaaagaatgtgcatttgactgcagtacccacagtgtatgtgtgtgtgcacatgtgcatgcaccagtgtgtatgtatatgtgtatgtatgtagtgtatacatgtgtgtatgtacatgtgtacatatgcatttgtgtatgtatgcatgtgtgtatgtatatgtgtatgtatgtagtgtgtacatgtgtacatatgtatttgtgtatgtatgcatgtgtgtatgtatatgtgtatgtatgcatgtgtgtatgtatgtatatgtgtatatatgcatgcgtgtatgtgtgtatatgtctatgtatgtatatgtgtatgtgtgtatatatatatatgtatgtgtatatatatgcatgtatggatatgtgtgtgcatacatgcatgcatgtgtgtgtatgaatgtatgtatatgaaaaaattttagaatggcttataggctacagtctagctagtccaacaatggctgctaaccaacagaaggtctaagcatccggtagctgttcagtccacgaggctggttgtctgtactggtcttcaggatgtgctggaaccccaaagaagtaggcttaatgccagtgaaggaacggatgtgctggtgagagcaagaacaagcaggcaaagagggagacacgtcccgcttccatcccctctctccagactgcagagaaagcagtggaccagattaagggtagatcttcccacctcaaaagatccagatgagaaatgagtcttcccacttcaaatgattcaattaaggaaaaaaaaaaatcctcacagattagcccagccattgggttttagttaactccagatgctgtcaagctgacaaccaagaatggctgtcacaggtaagcaatgtgtgacttgatcaggatactgggtgatgctgtatttggctaacgcagccaagctctttggtttcccagcagcagctaggaaatcaaaacagagtgtggctgtcagtgacaaggctgtcactgtggaaacaagacggggaagtctctccatagcccttttaggatggtgtctggattcctgtaagaagccaattaaatggactctctccagtttgattttttacattcacctcatttctgtgtttgttgtgtgagtcttgtcagcttcgggcattgcagtgagccttcaaaatcaaggtcaggaagagtttaatgggggggggggtgttggttacattttcctgaggattaaacataaccagagaatgcaattattacatgattacattggcttacttgattaaaaacacaaatgtgatttagccctgaattttcctctggtttgctgttctccaaaatgagattacggtgagcctcttgcactcgggcagctgtcctgacaccaggactctctggagaactggacttctgacgcgggttttctactcatgaactaccagggggaacggactgctcatcagtgtatccccacactgagtcacagctcctgcaccctc

SEQ ID NO: 453 - DNA, 3950 bp, Mus musculus
aaggacgctgcccggtcgtcggggtacagggcgccaatgcctcggcattagagaaagagattggtccagaacagtttccggtcaacgagcactattttggattagtcaattttgggaatacctgctactgcaactcagttcttcaagcactttatttttgtcgtccatttcgggaaaaagttctagcatacaaaagtcagcccagaaaaaaggagaaccttctcacctgcctggcagacctcttccacagcatagccacccagaagaagaaggtcggcgtgatcccgcccaagaagttcatcacaaggttgcggaaagaaaacgagctgtttgacaactacatgcaacaagatgcccatgaattcttaaattacctactcaatacaattgctgatattctacaagaagaaagaaaacaggagaagcaaaatggccgattacggaacggagacgtggacaacgaggataacaacagcacaccagacccaacctgggtccacgagatctttcagggaacattaactaatgaaaccaggtgtcttacttgtgaaactataagcagcaaagatgaagattttttagacctttctgttgacgtggaacaaaacacatcaattactcactgcttaagagggttcagtaacacagaaactctgtgcagtgaatataagtactactgtgaagagtgccggagcaagcaggaagcacacaagcggatgaaggttaagaaactgcccctgatcctggctctgcacctgaagaggtttaagtatatggaccagcttcaccggtacacgaagctttcttatcgcgtggtctttcctttagagctccgtctgttcaacacgtcaggagatgcgaccaaccctgacagaatgtatgacctggtcgccgttgtggttcactgtggaagtggtcccaaccgaggccattatattgcaatagttaagagtcatgatttctggctgttgtttgatgatgacattgtagaaaaaatcgatgcccaagctattgaagaattctacggattgacatctgatatctccaagaactcggagtctggctacatccttttctatcagtctcgggactgagaggagccacggtggggagaagcttctacaagcttctctggttgtttcagaaaggatcgagcggatgttcaagaagagaaagcgagacagacagacagacagccacaggacgctcagggcagtagctcactttgcatacgataaagcaaagactgtggattaacatgcccttccggttacagtagttgaattttttgctcaggaatcatgctgtctgtgcagttcacacaaggaagtaaaatcagagataccagctctcgtgtaaagcagctgccagctgccaacacattttctgtagtaattgcaccaatgatgatttgagttcctcgggagggcagtggaagaattagatgtgctagtctgattgagcacactgcactgtgtgccagcgtgcgggatgcgtacactgtgcatgggagcagtggcggtcttgtcaagcatcccggaaagtacctttgggcccaacccttgcagttgccttcctgacgcacagagcacagacacagagcccagtgtcaggaggtcaaagataaccctgcttctctggagaagcgtgtgatcatatacagtgtatgtacatggagggaacagctggtcaaaactggcttcttgattccccaaggggaaagactggctttgtaatgatctttttttccttatttattttacttaaactggttgagtctaagcattgtgtgaagtgccagtgactctaccagcaagtcttagcatattttattagtttgtcagctgaagtagtcctgttgttcgtttctgttttcaaggtgaactgaaaattctagctaaaatcactaagataatcatgagatgattgcaagattgcagtgagcggggtcagtgctgtcaggagggactgtctctctctggctgagcatttcctctttggttatagtttgtcactttttttaaagctttaatttcagtaaagtaggaattccctgttgctagaatgataaaggaagccgcagcgtgaagccggcattcttgccagccagaaccccaggaccgtgcacagctgcggcggtggcatggcgtgttcttccggtctctttttagccttgggaagggctagtagagcagccagaaccccggcagcagggcagcgcacgccctttggaagattacgttttggtgaagtagtaatctcgaaaagaagcccctccctcccctcccgacctgatcgtcctattggagcagtgtgttcagacgcttacaactaggtctgttgggagtttaaggaacagtacggggagtctccatgtcccgccaggcatcaagtggtatgacagtggctgaatgtaacttgcagaaagtggatgaggattctagtcgaagctgtcagactctgggtagcctcacactgccctccgcatgccgtggtggtggtggcctgttgataaagcccctggttttctattttactaaaactgttgactgagaagcaaacagcaaaaagaaatgtttttgtgctgctatgattaacatttattttctacctttagctcaggaaatgacttcatctattcatcccataggcagatttgtggcggggtcacttagctaatcgggcttcgtggacagatgtgctgggagaaaaagatggcctttgacaaactctttctgatagtttctgaagccttaccctggctgggtttgtgatctgccagcatcgcacagagaaccacaaccaagagcatgggaggtagagccaggagcacaggcctgcgagggcctacgccagattgtgttggaattaagacatgccacggctgcagccttgggttcagagacaaggcatacagtgcggctgggtcctccaggcggccttgtgcagcactgaatactgtgtttgcttgcacacacatttttgaagttaaaacatagcaggaaaaacctagttaagttctccatgaggtgaggtgtagcatgggagccaacctccgggcgagcaggcctgcttggctcaggtctgcgctggacggtttgcaggggaagggctcctgggtgttggctcctaatttactttttatttatagtgcagatggatctgaggaagacattttgaattttatcagagactcagtaaacttaaaaagcatacagggtttgggttggggactggggaaggcaggtatggggagtgagaaagaaaggtgacaaaggtgacccgcccagcacacacttcaggggattgtcgtttgtttgcctgcgattatgatgagggcagatgcaagtttcagacaaggctagctgctgtgttattatgtacatgtttgcttgggcagctgtcccagattttgtatattagaacaaaagtttctatgaattagcataactaaaagtaaatattgtaagtgaagcccacttctgagccatgcggcttctgtcatggggatttcgcctttagaaggttactcaagacaggagccgagtggcttaggccgggccaggaaatgtgctatggcgtcagccatcagcatcgggtttttctttccatgatggccgtaggaagacctcactttcataacacgctcctcctgatactttgtgtaaagatacttttcattaaagattctctcaggagggatgtggctgggagctgggaggcaaggtgctggagtcctcattctccagtgagcttagctgtgtgaccttgggcaagtcacctaacctctctgtgcttcagtctccctcttgtcaatgggagtaatacctacctcacagggttgttgtggggattaattagagaggaagtctgtaaagcatttaaaaggttcttgaagaaggcgctatataaatacaaaataatatctattaaagttggcttatttgtgc

SEQ ID NO: 454 - protein, 363 aa, Mus musculus
GRCPVVGVQGANASALEKEIGPEQFPVNEHYFGLVNFGNTCYCNSVLQALYFCRPFREKVLAYKSQPRKKENLLTCLADLFHSIATQKKKVGVIPPKKFITRLRKENELFDNYMQQDAHEFLNYLLNTIADILQEERKQEKQNGRLRNGDVDNEDNNSTPDPTWVHEIFQGTLTNETRCLTCETISSKDEDFLDLSVDVEQNTSITHCLRGFSNTETLCSEYKYYCEECRSKQEAHKRMKVKKLPLILALHLKRFKYMDQLHRYTKLSYRVVFPLELRLFNTSGDATNPDRMYDLVAVVVHCGSGPNRGHYIAIVKSHDFWLLFDDDIVEKIDAQAIEEFYGLTSDISKNSESGYILFYQSRD

SEQ ID NO: 455 - DNA, 125726 bp, Homo sapiens
ctaatgcttgttagtttcatatatatatatatatatagacatcctaataggtccttgtgaggtttttgttgttgttgttttgtttgtttttgtttgagtaagtctgtctcccttgcaccaaatgtgttccttgatagaaaaattgagcttcaggtctgatgactgaggacttgtctctggacccactctgtgctgtcctatctcagctgtcctttctctaaggctttgggtacatacaccagcaaagaaatttatgtgggagttttcactaatttatgtaacagtcttataacactctttacacactatatcttggaaaatttttaagtagggcactagtgatggtaagtgagagaaccaagactagattcctccaaagagacacttcatttagaccatacttcatcattttgcgagggggctcatggcaatgttatgaatggacctcagggaggtgccaacatgatttccaaaggcctggttatgcctgtaacacagtggatggcttaaagagcaaagacagaacctcacaatgcttccatgtcatccagttcccatcagatcaatggcaactctatcaatgtgaaaagagagcaagaagctaccaggcttataaccttgaaacactctttttattttatttttattatgaaagtaatacattttcaatatgaaatgttaaacaaaaatgaagtacacaaagaagaaagggaaagcctctataactctacttcccagaattaatcacaagttaaatttataatcttctaaatattaggtataaaattatacctgttctcttacatcttatcttgaaatttgctctttctttttaacttaataatagattgtggatatgtttttgggcaaggacacatacacccttgtcttaattttttttttttttttttttttttgagatagagacttgccagtcaccccacctagagtgcagtggtgtgatcactgttcacttgaccttctgggctcaagtgaacctccttcctcagcttcccaagtagctgggactacaggcgtgtgccaccacgactgggtaatttttatttttcttagagatgggtttctcactatgttacccagctggtctggaactcctgggctcaagtgatcctcctgcctaggcctcccaaagtgttaggattataggtgtgagccaccgagcctggccctgtcttaatcttttgaaggcttgaataatattcagttgtgtggatgcatcgacatttatttaaccattcactatgacaatcagtgcttccagggagcatgcttggacatattaacttcatgcttttgtgtgataggcttagattttaaaagaataacaacacttagcaatgtgatttaggaaacactctgcaaaaaatctattaaagatgcctactgcaggttgagtgtccctaatcagaaaatctgaaaattaaaatgctccaaaatccaaaactttttgagtgttgacatgacattgaaaggaaatgatcacagagcatgtcaggtttgggattttcaggtttaggatgctcaaccggtgagtataatgcaaatattcccaaatccggaaaaaatcgtaaacccaggacactcctggtcccaagcatttcggataagggatagtcagcctgaattttgactgtgctttggtgtttatgcaacactgttacaagacactgacctctgatttaagaagtaactgacaaactgaaagggtcagggtctttcccaagtttaactttctaacccctgtaccaaactgcctcttatcttcctctgaagactcatataataggctttattattatgtaaccattttaagtgcacagttaagtagcgttaaggaattttttttttttttttgagacggagtttcgctcttgttgcccaggctggagtgcagtggcgtgatctcggatcactgcaacctccacctcttgggttcaagtgagtctcctgcctcagcctcccgagtagctgggattacaggcatgtgccaccacacccagctaattttgtgtttttagtagagatggggtttcttcatgttggtcaggctggtcttgaactcccgacctcaggtgatccgcctgccttgtcctcccaaagtgctgggattacaagagtgagccatcatgcccagccgcattaaggacagttacactgttgtgcaaccatccatccatctccagaattcttttcatcttggaaaactgaaactgtgcccattaaaccataactctccctgaccttcttcccaagtccctggcaactgccattgtcctttctggctctatgaatttgactactctaggtacctcatacacatggaatactgtatggaatcatataatatttgtcattttgtgactggtttatttcacttagcgtaacatcctcaaggtttattcgtgttgtagcatgtgttgaaataccatttattgttaaggctgaataataatccattgtacgtttatattacattttgtttatctattcttctgtcaatggacatgcgggttgtttccaccttttggctgttggaaattcattacctcttgagtcaaggaatcacaagctattttgactgaagtgtcctgttaagaacaggtgaagattccaggtgaacaaccgtgcattccttttatctccttgtgggcttggtctggtgctgagaacttatgtacaatatcatatttaatcctttcaacaacatgatgaagtaggggtcttcaccattgtataatgaggaaactggagttgagaaagttaagagcttgttcagaatcacaaactggctgggcatggtggctcatgcctgtaatcccagtactttgggaggccgaggcgggcagatcacctgaggtctggagttcgagaccagcctggccaacatggtgaaaccccatctctactaaaaacacaaaaattagctggctgtggtggtacactcctgtaatcccagctacttgggaggctaaggcaggagaattgcttgaacccgggaggtgaaggttgcagttagccaagatcgcaccagtgcactccagcctgtgtgacagagtgagactaagtctcaaaaaaaaaaaaaaaaaaaaagaaagaaagaaaagaagaaaaaagaatcacaaactgaacatcttgcatgtgtgtttgtgtgtgtgtacagggggagtcaatcaagccttcggacaccctaagtcttaacttgaaaccctgtagtatttcagggtcaactatccctactacagagctttataaactttgactttcccatattcattattttattgtctatttcctgtttcccaggaacaattaacaatagaatccttaagatgcaaaactccttgctgtttaccagcaacagaagagaggaagaagtggctctgggggaattgcgtgccagtctgcggcaggttggctggagaagcagccctggttggagctttggagagacacatgtgcatttacttgttacctggaagaccttttaaaaaaaattctcgtaaatctgtcatttgtgtatcctcaaggtttgtggcagaaagcagatatatctgctcctgtgtgtaattgttgttaaaaaacacaaaaaggaaataaaagtgcacaacatacctagcagacttgaccagagggaattgggaaaggccaaagtaaattattctaaaaaataagcaagcaaaccagaaaaggttaagatggagaggagcttagaggagcaagtgctcttcccatgctgggaaaaaggcagcgacagaaccgcctagtgggcaggtgagggcactgatcacgtgatagactggggcccactgcatctcttttctctttgggtcttgaggatggagaggcaggaacatgaaaacagtgagaaattttgaggttcacttcccttcttccacctctcacttcccccataacctcttccttttgatagtgctggaagaacaacccaaggccagccctcttgaagcaggcaaatagatgcttgtcctttacttcatgtataaagagattgttttctttctttactaagacagtcagagccaatgaaagtggaagataagtacctcgagagagccctaaggagggagcatgggggttcaagtgtatggtctacttaggcagagaggaatcagagttaaactaggctcaaaatacatttttattttgagacagccttgctctgttgctcaggctggagtgcaatggtgtgatcttggctcactgcaacctctgccttccgggttcaagtgattctcctgcctcagccttctgagtagctgggattacaggcgcgtgccaccatgcccggctaatttttgtattttttagtagagatggggtttcaccatattggtcatgctggtctcgaactcctgacctcgtgatctgccagcctcggcctcccaaagtgctgggattacaggtgtgaaccagtgggcctggccaatacattacttttaaaaagaaaaaaaaatgttaactgtgccctagtaatttaaaaataatgtcacataaatatgtcttttaagtcttaaaaatactccatttactgaaattttgaaatagttgtatattcgcatgtgtaactaaaaaagtatacagtaaaaattccctcctccaccttctcccctagttcctacttcctcattccaggaaatcaccgttaacagtttcttgtgtatatgacaggagtttcttcatgctaaatatattttggaattttttatttggtttaacattgctgtgcttagctattttaatagagttttttttttttttttaaagaagaagtagaaactgtgtgtatttcatcagctgaggattcagcttgaacatttcaggaaaccccaacgtggcacattacctctccctaggtaccctaggtaggctgatgaaggtcaagtggcaaggaggccccgtgggtgctaaaatgcaaatctgaatgtgaaagtgacagcaaaatgacaaggtagagccaaaggtttcccatacaaactccaacaaatggttaaaccctggtaaaacatatagaaaaactactctgaaaaatttgagaagtaggtagtagagagaaggcaagatgaaggaagatgtatccaaaggaaaaactctaagggcacaaatcaagaaaatcagagttgggaatggggaagttagacctagatgccggaggcttctcggagtccagaggatgtttccttttcttgtgctattttttttcccctgataaactttctcattagagctgagcaaatgctgaaaagaaaatgggaaactccaacccaaagaagagattcagagaagcaggcagaatatctgttagtgcttgaggagccttgaaatgtatcgtgttgcttggaggtcagcactgttcgagaccagcctggccaacatggtgaaaccctgtctctactaaaaatacaaaattagccgggtgtggtggctcatgcctgtaatcccaaaattaatccgtctcaaaaaaaaaaaagaaagaaaagaaaaaaagaaaaagaaaagaaaagaaaggcctgaaaagtcgctgatttgttgattcaagccaataaaaaatttactgttttgattgacatctactgcttgatgactgggtgatattaatgaatgccactaagacgactgattccttcaactattaagaggttgggtaaagaagcggagagaccacaggttttagagtcagagcctttgtgtggatcctggccctgtatgtgctggttagtgcaatgatgaatgtcatattcccctgtgtgtaaaataagtatgaaatgatggatctgtaaggtcatcgtaagggttacattggaatatgtatctgaagtactaagcaggtggctggcacatagcagaggctcattaaatctggaggagcaagctggcagcccgagggctgtatttgcccaccccaacttttttttttttttaatttttttttttttgagacggagtctcgctcggttgcccaggctggagtgcagtggcgcgaccttggctcactgcaagctctgccatccaggttcacgccattctcctgcctcagcctcccgagtagctgggactacaggcgcccgccaccatgcccggctaattttttgtattttttagtagagaaggggtttcaccgggttagccaggatggtcttgatgtcctgacctcgtgatctgcctgcctcggcctcccaaagtgctgggattacaggcatgagccactgcgcacggccccccaacttttaaaatgttgactttgaatgtccattctaaactttccattttgtgttgagcgccaggcactatttgaaacatgttttatcgttgtaacataattattacccttattttccagatgaggaaagtgaaacaaagaaatatcgatttgagtattttttttttgtagcttaaaccttcatgcaagtccgaaaggagtcgtgcctctcaacctcatcctgtcagaatcaaaataaaatacttttacaaagctagtgtagtggagtggacacaggtgtggctcctggagctaggttcaaaccttggttccattgcttactagttagttgtgcaaccctggaaaagttatctctgtgccttggtttccttatctaaacgtggggataatcgtaacacctgcttcattaggttgttgcgaggattagataaaatgtttacaccccttcttggaccactccccaccactttctttcccaacccatcacaagcaaagcttcacgaatcatttatgtgagctggtataaacccacatgccttcagggagaaaagaggtagcagaactatataataaagtgacttgtgttaaactgttgaacagaatgagtaaaggaaaatttgaggcagactgtaaggaactggagagtgtaggattgtgtaacagtatgcaaatgaaaacattataaaatgctgtgctgactaaatggattaaggttggacatagttcatttacttgcctggtccctgaggcatctgggcatattttgtagtttgcatattcaagaaggccgaaaaggagtcagttgtacacaaactcatcttttgctaggcacagggaagctctttgtaaagctgattacacagctgtgtaaagctgtgttctaaagccagattaccctttccaagctcagggtgcaaaagtgtggagtttcagccaaacttattctccaactgcattacatatggtaaagaacactcagtacaacacctagcacatagattcaagaatgtctcttttatgtttgtgtctctccaatcgaccataggctgtggagacaaggcattgtgaggctctgtgattaggtttcatgactttacctgtgaatttagatggctccaacatcaactagacatgactccagataattctatcagaaatccattttactttttaaaatttaatttaatttaatttttgagacggaatcttactctgtcgcccaagctggagtgcagtagcatgatctcggctcactggtttttcccaggttcatgcgactctcctgcctcagcctccctagtagcttggattacaggtgctcgccaccatgcccaactaatttttgtagttttagtagagatgggctttctccatgttggccaggctggtctcaaactcctgacctcaagtgatccgcccgccttggcctcccaaagtgctgggattacaacaggcgagagccactgtgctgtatttttgagatactgtttcagtctgtcgctcaggctacagtgcagtggttcaatcatggctcactgcaacctggatatctcgggcttaagtgatcctcttacttcgcctcacaagtagctgggactataggtatgcgccaccatgcaccacgtatttatttttatttttagtagagacaaggtctcactatgttgcccaggctggtcttgaactccctggtctcaaggaagttggaagccatcctcctgcctcagcctcccaaagtgctgggattacaggcctgatccactgtgcccagcctagaaatttatttatttatttatttttgagagagtctcactctgtcacccaggctggggtgcagtggcacaatcccagttcactgcaatctccacctccaggatccaatctattcttatgcctcagcctcctgagtagctgggattacaggcgtacactgctacgcctggctaatttttgtattttagtagagacgggatttcacgacgttggccaggctggtctccaactcctgacctcaagtgatccacctgcctcggcctcccaaagtgctggaattacaggtgtgagccaccatactcagcctagaaattcattttagaaaggccttgttcttatataaacttatatgtaaagccagtggcttttgttcctgtgacatgttcggattaatggacaaggaggcatatgggtggttagcgggatggaggcaggtctaaaattctggcacatcagacctgtttgctggaatagaacagcaagtgggaaggacaggatgaccacagctatttatcaggacgggcacacagatgggcatggtgacactcggacaaggcccaggtaggccctagaggtctaagatgtagaaacccttgtccaaacagggggtagaaaagagcaagaaagaattcaggtgggtgatgcttgcaagtatagagaggaaagcccctggctggggtatcggggctcttggcttccatggaggcaggcgcttggagatccagtccggctaccatggggcttggctatattcaatctgcattccccccccaagcaagcttataatggaatcactatggaaacagtattcatgtaccagaagtctatttttcacttaaattttgtttgaatgctttttgtttttgagtgctttgaacccttgaggtgaggcatttctgattttacagctctgcctgaattcagatcctcaaccccactgaattaggggaacccagaaaagtaccccatcacgagttcaatcagaaaatatcacaagctttctaacataataatttatgaagttattctactcacttgaactactttctcaaataggaaaaaataaagctgagctgccaggcatgaagaacagggtgcaaatatgaattttataaaaggagaaagaggaactacccatgccagtagccagcactgcctaaggatttctcacagggcatttttcttgcttgcgggcttcctgtctctggtaatatcatcatcactgctggcttgagatcctccctattttgcagctcaatgtgcagatatttagaagcctattataaatttatcgccaacaggccaacaggtttcgctcctctccttcccccattacttatctttcttcttaattcaaagagttaaacatgtgtaatttgttctttgcctcttcatttttgtttaattattttgtctttttctaagttgtgtttgactccggtgattcatccaatatacgtaaaaagaaacaaaccaagtgcttgggacgcatacccgggttatcttaactgtgcagagcaggtttcctcccactccgcccgtagttacccagatcatcgcctccgttttctgtttaggcagcgggggctcgccgtcccctcgcccgcggtgggtgtcgcagctggtcccctccagggttctcccagatcgccgccgccacccccgcgcctccccgccgcaccccttcctacgcgggggtctctgggtccccggctctaggaccgcagggacgcgggcaggaggtggcgcccgccttcggtcctgccctctgccgcgcgcggggtggggacggaccggagttccccggctcgcgcacaagggccgcggaggggttgccgaggggtgggcggggctgcgccgcctggccgcgccgctgcctggcaggccgggcattagggcctcggcggagcccgctcccctgtgcgctgggcggggtgggcggagggcggcttcgcgtgcaggcgcgggcccggaggcagcggctgcgccctgcgccggggcggagccgggggcgggccggcggccggcaggcgggggctggggcccgaggccgggagtgcctgagcgccggcggcgacgacggcagcggcggcccagcgggctcggtggttgggtccgcggcggctcggggtccgcccgcgggctgcggtgcgagcgggcggcccggctcccctcctcccccgcccgccgccgccgctgtgattgggtggaagatggcgctggccggatggaaatcctaatgacagtctccaaattcgcctccatctgtaccatggtaggtggcggcgagcgggcggccggggctgccgggacctctcgggcgggcgggcggcgctggacccgcctctcccagtggccgctcgcggggcctagcgccggggcgggcgggcgggctgggcggcccgggcggcccgggcgggggcggttggacggcgcgcaggcggggagcgcgggggtgagcggcccaggcggctggggagggggcgccgcctggtgggccagggcggcgcgagggtagcggtgagtgggcgaccgtgccagacgcggcgtcgggcgggcaccggcctccgggagtccccggctgaactgctggggtccgctcgggacgcggggacgagggccgaggcgcgcccggcctgtgccggggtgaggggtgggcgcgcgcgagccagagcgcggccccgggccggggtcgtcggggagggggcgcggagccgcgcgggctccatttccttctggtcgcgcgccgagcgggaggggtccccgggaggggtgggggtcggcgggcaggaaggaagggtctcggccggggcgggcagcgctcattcccgcctgggagaggacggaagtcaagtgcagatttcctcgcgccgctggctgggccgagtccccgaccccgcgctgggggaaaggggcgtgtgtgaaggtggaaactttaaataagtactgttgaaattctctccattttctcctctgagaggcacgagctctcccgtttccagccgtgtgtccaggtggcagtcttgtctctgggaatgcacgttaatcttgaaaagcagcattagctttcctgtcatttgtttacttcagcccaccagacacatctgtatgtggctggagctaggtctgtctgtgcggggaccgcctgccaaggcgatggtatttgttttcctagggcgtttaaatagactgtaagggaaaagtgctaatgcccgctggaagtcccgaattaagcaaaacgtgggcgcgtttaaaacttggtgttttgtgcgtggccagaaggaccacagttttccacatgatgagacaaattcgtttcattagttcctcatgagcttatatgtagggatcataatttatgagtcatcaccgaaaaaagttgttctttgcaacgtgggcctagtggttgttattagagacttctgaaatcttgtgtttcatgcctcactggccctatttatgcaactgatttcatataggagatccccaagaaattttccatctaagggtggtacattgtatatatttttctttaaggagtggtgaatcagatctgaaagatgccttaaaaagcagattctctactacacgctgaggaacagtacaaaaaatgactgaaatcaggtggacataaaatcgacagtattaaagaaatcatattgaaggatgaatcattgaagactccatttcccaactggatgattgttctttctcacagtttacattttaggaaagcatttgtattaaatggactatattaaaatgattttggagaattgtttgggctaattatttttagatacgccaattattatcttagtcaatttcaaaaggaatgcgataattaggtcttttacagtgacaattttgccacatggctgagctacacacattgtatgggtcatagttcattgtcaaagactagatttcaggagtggtgtgatactctttaccgactgttcattcactcaagtactgtatatcaagtatacacttagcagccactaagtgctagaggcgacgctgagtactggggatgcagtattggtcagggcagcccctgttttcttggtgtttacattcttgctcatggacacaaacagtattcaggtaaacaataaatgtatgctgtaatcagattaggacagtgagacacagggatttgccagggtcacacacttagtaagtgggattctgatcccaaggatgtcaaatcagaagctctttctagggcttccatccagatacattaattacatgtggggcgtgtgtattgttggcaaatacagaaaatgcctggccaaatgagatcgttccaaaggtactattaaaattgggtgtgtctgtattcatatttgaatacattcgaatgtacccccaaatagtgctgaatatctcaaagtaatttgcagtcttattctttaaagaaaattgccatttgtcctctgagaatcacaaaattgaaaagcaaagatacctctttggctttgtaggtgctgttttgctaggcttggaacgctcctccctgccacaccccgtatccttcttgtctggcgagtgtgtgtgcctgtctcttaagcagggagccttacttgaataatcctacccctgtccaacccgaccctccatccccttcatacagtttcatggcatttttgtaatctcagtagcacttatcatacttactgtgcagtaaatttttctttgaactcttactcaattgtgagggccttgaaggggaaggattatcatttacttctgcagtttgatctggagtaccaagttctgcattcagtataaaagttttccaaagtccttcctgcctcctcctggtatgccgggtgaagcagggatgatgtggctgtgtgtgtgtggaatggtggagagaagatgggctggacttaaacagaacacttctcagaatcagcagctgtgaaaacatttaggatgagttgaaattttattctataagtactgaagtgtacataattttttcatttgtcaaaataacgtacctgggcaaatctgcaataccttaattgggttaagtaactgttaaaaacaattctcttcagctgtgtcttattttagatcactagtgttgtgcttacatgtgaaaattagtaaaacttgtttttcataagttagtattatagcctgaaccaaatgagtgattatgtttagattgcagtgagtacattttcaagggtacctcttgaaatacctgtttttaatttgtctatgaaataatacattttcagtatcacatagtgtttattttgcctttgaagtagtttcagacttcagggcctggcacggagtacctgcctacctgatatttaatattatacttaataagtgtgaaataacgggaaaagtgacagaatacatgtagagaggctgtgttttgcagttgaggtggctaatccgggtggtccgtcatgggcatgcagtagtggtcaggacagcccctgctttggagctggcactacttactgttagctccataaatgttagctctgcctctgatcattattgtctcttcctgtttgggttgtaggagtcatggttaggaaggcgttgttgggagggggaccagacaacggagaagttgttggtgcaggaggtgggtagagttagatcatggggtggcactggcctggctgcttgcccaccctcggttacaagggcatgagattagatccattagaacatggtggtaatgaggccaaagctggtaaaggtaggtgctaggagagtcccacgggcttttcttctgagaaagcctgtgcctagcacagcaccctgagcatggtaaactttacttgctgaagaaaggcacaggtgaaactggctgtcttttcttttttgtttgctctgttttaataacacgatttttaaaaacataaattagaaaggacatacatggaaaatgtttgccttttcttactgctcagtctcactgggatccaggtaagggtatgtgtggtcagtgcaatttatccttactactgaaaaaaaggaaagctggggcaaacctcagagcccatgcgttgttgggaatgtgtgtgtgtgaaagtctcctcttcatataacaagaatattatattaaataatgaaatttctttttccttctcaagaaatagggtggatgtagttcttttattaataaaatatttatttgtaaattaatattttattagtaaaatagtacttctatgataggagcattcaaatgtgagttgccattgttttacttatctaattttgctgtgttaatttaagaagggaacaaaacttaagcttcttaagcctttaaaaaaaataagaaaacctcaaaaataaggaatcttctattacataaatgtttggtcaaaggaatgtttgagcttggtggagagagaacatttagaagaagtattaatagaagttttatttaagcccactcatcttttgaatttgtctaaaatacattttggacattaaaaatgatacattctcatagaaaatctggaaaatataaaaactccaagaaagcaaaaggaaggtcaatttttacctcccagaggatatgttatttatttatttattttattttttttttgagacggagtttcactcttgttgcccaggctggagtgcaatgctgcaatcttggctcaccgcaacctccacctcccaggttcaagtgattcccctgcctcagcctcccgagtagctgggattacaggcatgtgccaccacgcccagctaatttttgtatttttagtagagatggggtttctccatgttggtcaggctggccagagcatattttatttaactttttaaaaaacttgagttgtattccctagatatagttttacactgttttcccacgaatgattatcatgttatcattatcatcattcatgcccatcctaaaatttgcccaattttaggatgaacatgagtttaatgttataaaatgatgaggtggtgagatgagcccaataaagcatagtggtagggtactagggcgttgacaggttatatgtttaatgattattagagggtaaagtgatatagttagcagaaatggaattttataagaggtggtttattctaatcttaggcacttagttatcacaaagataagacttgttatgatctgaaatttttaatatgcttgaaaactctagttttaaataccatattcaattatgtggcatgtgtataaatattatggtcttattttatatcatatggctttgcttaccttctggtgactttctctttccaccttttgctaataagtggctaataggtctcaaagtaggttaattatctgccctaccatgatccatgttggccagttgcagcgagatgatgtcacatttcttgttgccttatttgattctagacttttgaccaagtccccccaaattgagtctgcctcctttttgtcatttaccaaattcctttcttcctgcctttaaactcatatttattctagctcttctgaaacttttattgtctcaggaagtatcttttaagcatttgtatactttgtataattcctttccagaaacctttttagatttaaataatctaattttgttttggtttctcttttagcagccctattccagaaacttaatatggtattttgttatgtatttgacagcatggtataatgaaaagagcagttggaccagaaggtaaattctagtccagattttgacatttagatgtgtatatatgggaaagtttcttaaaacttcgagttaatttttctcatctgtgaaataaagggattggactagatactctttaatagatattccttatatgcttgtctccttctaggtctaaaattctgatcctttagtagtttataaatgattattggtatcattttcatcattttaggagctcttttttaaaaaattattattattttttttgctctgtagcccatttctagaacatcttgggagttctaattatgttttagataacataaaaagcatagaatcagacatagttaagcaagaatttcacttagttccctagtttttacagtctaaatacatttttctttctttaaaactggaggttactgataccaccattttcgtcaccaacagcctaataattcacaaagctatttgctaatttttgacacttttttctttgccagtaccattaagggatttgaatttttttgaggttccatgtttatttctttagttatgagtatgaccttggacaagttacttctctgtacctgtaaagtgagagtaaaataacatctagttcatagggttgttgactagtacctggcccatggtaatcactgtgtcatgttggctgttactaccctttaacatgatttgctcccctccctgtggtaaaaagtattcattggcactactaattaatctgttagctcaacatatactaaccaaaatggaaatttgttttgtgaaatacaattgtcagttccttttcattataagaaacgttagtttattagtagtatatacccctgagaaagcactaatttattttgaaattgagtggattaattcataatatgaaagctgagaatgtagattgtcttctttctctattttgaatagttcatagaataatttatttcttttatctgggaacaaaaataactggtctaatttgtgacattctcaaacatattttacaagtttagataagttgagaatggcaaaaaccacaattacttttgcaacaatctaatacttttagaagaaaaatctatcttaccttattttatactaaaaaaaaaaaaagcacaccagctttttgtcattactagaacaaggtgtgtgcattcaagttagcttcaggacttattttctttcagatttttctgtttactgaggccatattattatatttaatttccttatgctctatcctttagggagcataacaagggaataacatctcttgttggcttacattgaacttacccaccttgctcttagatatcttgtctaaaacctacagtcccaatctcctagtctagaagagggatatttacatatctacaccatactttaaaggtgttgggagaaagtagtaagtgaagagttgtattatgaagagttacacttgctgaactgaaaactctctattggagtcccagtattgttgaaaaacttacatataacatttgaccatttgctatcttatgtgcagaatttgctttaggaggttagagtggcagtttatatacatttatttaggaagaaaaactagtaagtctttgctttctcacagcaaaactcgaagacttttgtgatagtgtaaactataagaaatttaatgtagagcgccactgtgtgaggtggtatagccctctctgttccttggcttatgctttgctgctgcttctctttcagaaggaccattagcttcttctaaacagtatgttatgtctaaagaagagatgtgtaagcttgctttatttatctgtagtgagccacatgtccaaagctacgtaccaataaaaatttatttccaactgaaaacaagaagtagatgtttatttcagtgataatggacagatgttcttaactgaaatgcttcatgggtagaggaagcatccacacattctctacttgtaaagggtggtttaaatcataatatctttcagtagagttagagtactgttgcctttgattttattttagtgctttttattttagtgacctactaagcctctacctgatgctagtgattttttttttttcctttttgtagggataaagagtgctttttctaaagtattttgaggaaggattcatggagacctacattatatcgtgctgcatgtaggttctgagaacatgaagacgactgtgataaactctggtcttatggaacttcccattcagtgtgtcttgagtgggttatagttgtgctgaggaagtagtcctcttgacccctgggaagcctggaggtatctgggttgataggagacccttagccagtccctttctggtgagagcagacatacctgtcttacctgtagcttcttttcttttttttttttcttttttttctttttttttaagacaggtcttgctctattgctcaggctgtctcctacatttaaaccatcctcctgccttggcctcccaaggtgctgggatgacaggtgtgagccactgcacctggctatgtctgtattcttgtgggctttacatatactattttctctgtgtgtcctgatgagaagattgaaaaccagctctacttacagtattgtagaagaggatggacgtataaaacaaatgcatgcaatgagatgtttttcttattggtataagtaatggtaattatatgtgaaagagaaggtggttttgggagagagaagagggcttcaggaaaaagcttcttagaagagagttgaactttgcaaaatgaatggcctttattatgtggacatggagggatgggataccagatgtaaatagataatgtgttactcttaggctctgtaggtggtttggcgtgaaagcgggtcttgtgaacagtaaggctggagagtaggaagggggcatatttaaagaagtaccaggagtttaccaagtattgattcacattaaaatgattattaaagtgtgtgtttagcctgaggaaatgtaagtccagaggacagtcatgaggatataagaaacaatggagttggtaaaaatatgctggtaaattgaattacattgatttttcaaaatttgcttgtattttttttaagaagagaaaatgacaacaaaacaagatggatggggtacaaggacagttcagtgggttgttaaaacttgttaagggcctccttgtttaagagccaactaaacaaccactattggaaaattttggattgtatatacatgttaaaaaattaaggataaatacacacccacacagggagtgaattttcttgcttccatagcagcagacatttaaacgttaccattcaaactctgagggaaggaaaataggaaaaacaaaatgaaaaagaatgacagaaaacacaggtggaagaaataagctcttctagttcattaatcataataatccaaatggttcaaacttactttcattgtattaaaggaactatcagaatggataaaaaacaaaatattgctcaataagaaacctacctaaaatgaaagggcaatctctttaacagtaacacgatagtattgtcacaactaagaaaattaacaatagattttttttgaggtatttcaaaagcattaattttattttgttgttgttattagtctttctctatctgtcatcttgaagatccattcagaattaggaaaggttaggtagtattagccccattttcacaaaatggaaaaggaagcttaaagtcagccctgcagcagctagggatggggtccaaatttctagacatgcaaactcgttatgacatctacagggcaatgtgttgcaggtttgatggttgagacaaaattactccttttcaaacaagagattggggaatttttattcctgacttttcggctgcatatctgtgtgtgtgtgactttgagtcctcactaattattttcacttgggtaggccgtttaactggtttcagttatgaaatggaataataatttccccattagatcagatgagatgacacatgtgaacgtcctttgtactataaatacatatcaacatcacccttacatggtcattgttggtaagactccatgccctcttaaggaaaggatggaaagcacattaagatactgtggactgtaggagttgtaacggagctcacaagttacctttgacaaagcgtagtcatttcaaagtttgaaaatgagtattttaatgatccatgaagcaaagttttagattacccttaaaatctttactatgttaaaaatgtacagttaatgagtggcttttttatttttttttattttttgagacagagccttgctctgttgcccaggctggagtgcagtggtgcagtctcgcctcattgaaacctctgccccccgggctcaagctatcctcctgcctgagcctcccaagtatctgggactacaggcacacactaccatgcccagctattttttctttttaattaattttttttgtagagacagggtttcaccatgttgcccaggctggtctcaaactcaagtgatgtagctggcctcccaaaatgctgcaattacacgtgtgaaccactgcacctggcctgtagttaacttctgatggcagtaaacactgcaattccctattagtaacatttttttttaaaggtataaaattatagtgagtaaattgcctttatttctacagtattggtctacctgggtttttcagggatccctgaaaagagactttcaaaattagagcccatctgggcacaagtaaaataagtcataaagtacttaagttgtaggggtaaggagacaataaaatacaaggcttttgttctttggaatggaaaatgcatttataatttgagattctgtagatgaacatttattctgctttgtatgtgattatcttagtccaaaaatctagccgttataactttgaagaaattatttctgctgtttctctggcatattgtttcacaatttttctttgctgatgttgcaaaggttccctgtttgtttaatttgcttaatgaagagactcatatgcaggatggttaaggtggtaccttgggggtagtagctgggactttgaagtttgcgttaggaggtatatcttaatagagcagggggattctcttttccacaaaacgggatataatgtttagaaggtttcagacttaacggccttgaaagatgacgctttgtggaggggaacgctacacactggggcctgtggggaggatggcgggagggagagcatcaggaagaagagctgatggatgctgggcttaacccggggagatgggttgagctgtgcagcaaaccaccatgatacgtttacctgtgtcacaaacctgcacatcctgcacatgtaccctgtaacttaaggttgaagggggaaaaaaaaaaaaaagaaacatgatgctttggttcttttaagaacaggtgaggaataggaatcaagtggtttcactgtttgttgtttgatggacctagaggtttaaagctgataatttcttcagactgatgtgctcagggtttttatgtaaaggtggacaaaatttggaacaaatttgaaacatcaaaggctcaaaaactagatacaacggaccaaaaacaaaaccaaaaatattgtgcttttggttctgctaggcaaattagaatcttttcattgtctggtgttgcatttttttttttttaaagacagttcacttttttaaagtttactggttagtttcatttgtttttattgcattttttttttcaatttgaggaggcttatatctcctccacgggggaccctgctgaacaaggacctgccattgtcatgtgactggttaaagcagaggccttcacttaacttggcaaatgaaaaactaaaaggaagcaacttttacttctggttgttttctcactatacacatcaagccttagccagataaaaatgcttggatatttgtatcattgtcttagttggagacattatgttgccctttttaactaaaaagatacaagtgaaatctgtcacctttttttgttctctgtttagtttctttctttattgagtttttccagctttactgaggtataattgacacatggtatgtatttaaggtggtattttcgttctttaaagactgcacagttgcctttgctcaggttactcctcctgccaagtgttcgcaattccgctctttcaggtttttacttccttgtgtccttaaagcttctcttctgttacacattttcatcccagatgttagttgctttaatagtctactttctttccttttcatctctgaaactgggttgtagttattataccatttcagtgctaatagcctaccgtgatgttcttgccattttatgttaatgatgacttaggtcatcttccctgacttgtaaagttgaatgtgacatctgtaattttagctttcccaaggaacttatataggagtctgacatttattgagtggctacttggtgatgctattgctaggcatttcacagattcagatctcacaatgataaaaaataaaggtgtaggaaagtttgagtttagataaatgtatagatgataaatctagaacagactgttaaagagagttaggatatttgggtacatttttggttgacatccaagttaacaaggccctctgcaaatgttactggatattgatagagaaggctggattgaataggtgtggcctagttgagaaatgaaatttaatgatagaacacttgtaaaacaccagaattatatgcctgatgcaaatggaatggtgtttgaaaaatcttattttcttcctgacatttttaggaacagcctgtgtttaatatggactttgaaatataatgtcatggtaacttttagaaatggggtggtagatacgcccttgtaatttagtaattgatacattgttttttgaactaccagagtgaggattttaaaagaattaaattattcaggtttaactgtatatactcttaaagaaaaatgtgatatctgattaccttagaaatggtagtttcttttaattttgcaattttagaagtttaagaaaaaccaaaccacttactatttttaaaactgcaaaattgtgtgagtttaaaaaattcatttcttacaaggaagaggggccgccctttcccaagaagtaattgctagaaagagttgggatatgtgtgtgtttattgccagacattacctgtgcatatacaaacatgaggtattgtgtgtgtgtcacccccactccccccaaaatttaaaactgcaggtttatttgctttttcacctaacagtgtatatttttggttgtcatcatgtttcattccatgtcaaaactcttgtgtgcattttaatttcccatgatcttcaatgtctatcatattgaaaggtttggttatataatactgtttgcacattttcattttattaaacaataattttattagtttcctagggctgccataacaaagtgccagaaactgtgtgtggattataatactgtattgttactgtaccttttctacgtttagatgtgtttagagacatgaatacttaccattgtgttacagttacctacaggatccagtacagtcatatgctgtacaggtttgtggcctaggagcaagaggctagaccacatagcctaagtgtgtagtgggctgtaccatctaggtttgcgtgagtacactctatgacatacgcaccatgatgaaattgcttaacagtcaatttctcagaatgtatccctgtcattaagtggtgcatgcctgtaacagaaatttatcgtcctaacaattctgtaggctagaagtccagaatcagggtgtcgacagggttggttccctctgagggctatgaggagactctcttccattttctaccctagctactggtggttttctggcagtggatgcatcattccaatcttttcacatggcattctccctgtgtctctgtctccattttgtcttccttctatgcctgtgtccgaattttccctttctacacagacaccagtcacactggattagggtccaccctaatgacttcattgtaacttgattacttctgtaaagaccctatttcaaaataaggtcatattctgagatattggggcttaagacttaaacgtacctttattagggaacacagttcacccagtaaaactaatggcgcaatcaggtccattgcaattaatgtcaaggaatattcattaagttgggttatgtgctagaccctagagattcaaagctgtttaagttccaaagggcttgcagtctagttggggagaccagctttgtgtataataatgtaaactgatacaaacttgataagctgtattttgatgtgtacagggaagacagactggtatttggagtgaggcctgcatcagttggagaaggaaggcttttgggagtggtggggagggaagcttggtggaatttgaaaggtaacttggagaaaaatgaagaggacaaaggtcctggcgaggaagtgagaagtgaattaaaataacaagagagaaatacggttaagtgattaaaattacttacatgatttaatgtttcagtaattttgtcctcaaacttgttaaattgattgggttcatattggtttagggaaaaatcttctataaacttatattttttttaaaaaaaggcatgtatatgttgttaaaaatcacatttgtagcttacagaactcatttttgctaaaaatgagctaatgaaaagtacttctgatacagcgggtaaaggaaagtgggagagatcatacctagaacatccactttttcccaaagtaatgacggggaattatgtacacctctatataatgacgggattatatacacctctttgtgatcttaggtccatttcaactacagcattctgttttttagcttaatgtatgtaaaacttatcaagcaaaaagggatcagaagtggttttctagaaaatttattgaaaataaaaaaccaacaaaacatgattaccacattagtgaaaataactattacgcagaatatatttttgtaacatacctgctgtgaagaaacttcaccaatgtcagtatttacatttcagattactttgttattattagttcattttttccaaacaaaaactgtgaaatctatgagatggacccatagagaggagtagtctgttttacaggtaaggaaattaacaaatagattatttcagactccagtgatttgattttaggattctgcctgagacctctccgtatttagtctagtgcttttgccgccggatcatgctgttactaatgtaggtgtagatgcttcttccccctaaagacaaccataaaatcattttttctctctctctcttttgtttttttgagacggaatcttgctctgtcgcccaggctggagtgcagtggtgtgatttcggctcactgcaacctccacctcccaggttcaagcaattcttcctgccttagcctcctgagtacctgggattacaggtgcctgccaccatgcccagctaatttttgtattttgtttagtagagatggggtttcaccatgttggccaggctggtctcaaacttctgacctcaggtgatccgcctgtcttggcttcccaaagtgctgggattacaggcgtgagccactgcccccccagcctctttctttcttaatactcataaatatccaatcattgttgaaattacctgattgtctcaaatgattatagttggatccataatgatcatcgttgcgtttcgtcactatatctcttaaatgtggatccctgtttcttttttattatagtttatcttttgaggaaatcagattgtcacatagcttttttcattttctgtactttgctgattgcatcccctttgtgatgtttaacatgttcttccatcctttgtgttttctgtaatctggtagattaagaggcctgaaccagattccttgattttttttttttttttccttgcaggagttgaggtacaagtggtggtggaaaaacttaggtgatgtgtacttctggtttgcagtggaatgtcgtgtctctttataatgatgaggctggcattgtcagaatgactcttctgttacggagctgctggcagctttttacctcatggtttttagcaactgttgataatcattgcctagatccagtgtttcattagggcttcagaatacagttttaactgcttctataggttttttttaagaaatatttttaaaaacattgaaagagaatgtacatctatgttatatttgaagctacatagaaataaactttttacattttcagaatattttcatagttgtattccgaaagtcatacatttaggcaggctaaagtttacaaattaagttgaaccttttccgcatctagacttaattttgtgatattacaagtgaatgagcacatgaagttctaacagatttttgcatctgaactataattaataagatttaactgattatacactaaaacttgacaaagtagtttttcttttattttccattttttaatatgttccgcctcagggttatatatttactactcctgtgcttttacaaaagcaacttcaaattcttaggcacaggattctgaaaattagatgaactaaccaggtacagttactttaattttcagattttagggatattagagtgcatttatttgtatttctatttgtaatatttaaaatggaccaatttgtgtgtgcattagtttccaatggggctgtaacatattaccacaagtttagtggcttaaaatcacacaagtttattattctaaagttatggaggtcgctgggtgcagtggctcacacctgtgatcccagcaccttgggaggccgaggcgggcagatcacgaggtcaggagatcaagaccatcttggccaacatggtgaaaccccgtctctactaaaaatacaaaaaattagccgggcatggtggcacgcgcctgtagtcccagctacttgggaggctgaggcaggagaattgcttgaaccttggaggcggaggttgcaatgagccgagatcgcgccactgcactccagtctgggtgacagagcgaggttccgtctcaaaaaaaaaaaaaaaaaaaaaaaaaaaaaagttgtggacatcagaaaaaaaaaaaagttgtggaggtcagaggtttatgtgggtctggctgggctgtgttctttcctggagctgcaggagggactgtttctttgcctttgccacctggatgctgcccttgccttttggctcctggcccctgcagcatcttcaaagccagccatgactggccagtctttctttcattacctccctcggacggcgactgtcctgcttccctctttcacttaccagacccttgtgattacatagggctcacctgggtaatctgggatactctctcaaggtcgtttgattttagcaaccttaattccttctgcaacttgaattcacaggttctggggattaggatgtggacattttgagggaggcagttatttttctactaccacaatgcgtccacgtttttttttaactttaaaaaatgtattagaggtgaaaatcaattcctgatatgtctttaatgaattttgggttatggtgaaatattggaaagaagttgagtggatttgtaaacatacaccttttgtactaagtgaacattaagacgtggttatctgttctagttttggaagtaacggaaggagaatttttacttcaggtactgttagcacactaccagtctcagcaggagaaaagtaaagatgcagtggaacattcaggaaaattagctaccaatacttttacaacttttgataagtaagtaaatataggcttggtagcatgaggttacaaaaatggatgaaatgaataaaacctatgctatatgcccttgctcaacagagtatatgtaaaatatattttaggatgttaagattacatcagaaccttttatatttacagcatagtaatttaaatgatggttcggcttcattaaaagataatcttggaggtttagagagaaggcctcaggctgtgtgcttcctaaggaagaaagggcagaaaagggcaactctcacattttcttaggcaaagtggaaagatgtggatatttctgtgggatgtgaaatagatttttaatggttaaagatagtatcagaagaagctctaatttgaggattgccagatctctaaatatttttgttttgcagttattaaacgactgccataattagatttgatacctcagtaaacttacgagaaataggatgaaacatagagcctggacttctagagacttcgtttttctcattttgcttgtaagtctgaagaaaaccaacagagcaagagaggctaagaaaagagatgataaggaagacaggaaagaatacccagtaaatattggtgtatgggctatgctaggtgaactgttaggtatgagtggttcttacttttaaggaagatacgtctttttggggaaatgagacttaaattcacatccagcagaacagtatcagaaaagtgggtgtgtgagctccatgagggtgacttgtggaaggggaaaggttgaacatttcattctcaagtactaaaaggatctgtaactctaatgtaccgattaatggatgatagcacagctttttattgttatggaagtgacgtttccactcttgtcattcccatttttggagtttattgttactagatttcatagaacctatttgaaactagaaaatatttctatttcattactttatatgtttttgtatgcatatgtatatatgttttatctaaaaaacaaaattgaagactttaaaagtgaatttgagttttggacactaagctttatttatttacttatttttttttgagacggagtctcactctgttgcccaggctggagtgcagtggcacgatcttggctcactgcaacctctgcctcagcctcccaagtagctggtattacaggtgcctgccaccacacctggctaatttttgtattttttagtagagacagggtttcgccatgttggccaggctagtcttgaactcctgaccttaggtgatcagcctgcctcagcctctcagagtactgggattacaggtgtgagccaccatgcccggccaggacactaagctttaaatgttgaatgtaaacaattaatcaaaaaagactccaagttgacatacatattctattttcttttctttctttccttttttttttttttttgagacggagtctcgctctgtcacccaggctggagtgcagtggtgcgatatccactcactgcaagctccgcctcccaggttcacgccattgtcctgcctcagcctcctgagtagctgggactacaggcgcccgccaccacgcctggctaattttttgtatttttagtagagacggggtttcaccgtgttaaccaggatggtctctatctcctgacctcgtgatccacccgcctcggcctcccaaagtgctgggattacaagcgggagccaccacgcccggcacatattcttttttcttaaaacagctttattgagatataattcacataccatgcaattcactcatttaaagtgtacaatttagtggcttttagagttttgcatttatcaccacagtcagttttaatcatcttgaacgatactttataccctttagctattctttttctcctccttctttcctttccctcccccttccagccctaggcaaccactgatttactttatgtgtttatataattatctgctttggactttggtatgtggaatcatagagtatatggtctttgggactggctgcttttactttgcatgttttcaaggttcatttatgttgtaacatgtatcagtactgcattgcttttaatggacaaatattgttccattgtgtggatatactacattttgtttatttgttcgttgatggacatttgggccatttctaccttatgggtattatgaataatactattgtaaacattgggggtgcaagctttttatggacatatgttttgttttctcatgtgtctgtactttggagtggaattgtggtttaatcttttgaggatctaccagactgttttccagagatggaccattttatgttcctgccaacagtgtatggctgttcccatttctctgcatccccattggtacttgttatctgactttctgactgtagccattccattttgggtgtgaggtggtatctcatttcattgtggttttgatttgcatttctctgatgagtaatgatgttgagcacctctttaggtacttattggccatttgtgtatcttctgtggaaaaatatctattcgcattctttggctgttctttgagttgtcttttaattgttgtgagttttttgttgttttgtttttgttttttcaagacaggatcttgctgtgttactcaggctggagtgtagtgacatgatcatcccttgcaactcctggtctcaagtcatcctcccacctcagcctctggagtagctaggagtacaggtgcatgcctctatgcctggctaattttttactttttgtagagatgggttcttgctgtgttttgcccaggctggtcttgaactcctggccctcgggatcctcttgcctagtcctccgaaagcactgggattacaggcattagccaccctgcctggccctggtgtaagagttctttgtatattctggatacaagtttcttgttagttaccttatttgctaatatttcctcccattctatgggttgtctattcattttcttgatggtgccatttgaagcacaaaatttaattttgattttgatgaagtctaatttatctaattttttttctcttttccttttttttgggagacagaatcttgctttgtcgctgaatcttggctcacggcaacctccacctcccgtgttcaaatgattcttgtgcctcagactcccaagtagctgggattacaattgcgcgctaccatgcccagctaatttttttgtatttttagtagagatggggttttgccatgttgaccaggctggtcttgaactcttggcctcaagtgatctgcccacctcggcctcccaaagtgctgggattacagatgtgagccacagcgtctggcctgatttttttcttttgtcgttcatgcttttggtgtcatattttataatcctttgccaaatcccgtgtcaatcctttgccaaatccagtgtttaagagttttctgggtgttgctcttttatgtacttctttgatctgtttggagttagttttttgtacatggtttgaggtaaaggtaacttcattcttttgcacgtgactatccatttgtcccagcgccagttgttaaaaagactattctttctctgtcttttggagttggcactcttgttgaaaaccagttgatcagagatgtatgagtttctggatcctcaattttaattcattgatttgtatgtttgcctgtctgccagtaccactgtcatgactgcagttatagctcattgcagtctcgttctcctggactcaagtgatcattacacaggtgagccactgggtccgacctccatatgaatttagaatcagcttgtcagtttccataaaattagctgggattctgatggagatctcatggagcctgtagatcagtttgtggagtattgccattttaagtgttaaagtcttccagtctgtgaacatggtatgtttttctctgtgtttagatttcctttaatttcttttagtaatattttgtagttttcagagttttgaaactctgaaatgtttttttcttttatatgtcattctctttttttgttaaattgattcctacttatttaaatcattttgaatgctactgtgaatggagttgtcttattttcattttcagattgttcaggacaagcatatataaatacaattttttgctttattatttttaattgacataattgtatgtatttgtggggtacagtgtgatattttgatacaggtatacaatgtgtaatgatcaaattggggaattagcatatccatcacttcaaacatttatcatttctttgtgttgggaatattcaaaatctgctcctctatctatttgaaagtatacaataaattgttgttaattatagtcaccctgcagtgctgtagaacagggatctccaacccctgatctgtggcctgttaggaaccgggctgtacagcagaaggtgagtgtccagcgagcagcattactgcctgagcttcacctcttgtcagatcagtagaaggcattagattctcaggagtgtgaaccctgttatgaaccgcgcatgcgagggatctaggttcacattccttatgagaatctaatgcctggtgatctgagaacagtttcatcctgaaaccatcccccactagtccatggaaaaattgtcttccacaaaactggttcctgatgccgaaaaggttggggactgttgctgtagaacactagaacttattcctcctatcgagctgtaattttgtattcattaaccaccccttggctactcctcccaccccccacatctgcagcctctactctagtaaccactattctactccatagttttatgagatcaatacaattgatggctatgtattaattttagaacccgcaaccttgctgaactcgtttattctagtagtaattttttagtggattctttagggttttctttatataaaatcatgttacatacaaataaagataggtttacttcttcctttcaaatttggatgcctgtttttctaactgctggctagaacctatggtacagtattgagtagaagttaacaagagggaattttcttgtctttttcctaatcttagaggaaaagcatccagtgttttcgctattaagtaagatattagctgtgagttttttatagatgcgttttgtcagattgaggagctcttttcctcttttattttattaattccgtaaatcaatcttttcttttgttaagacagggtattgctctgttgcccaggctgaagtgcagtgctgtgatcttgtcttaccacacccctgccttctgggtgaaagtgattcttccatttcagtcccctgagtaggtgggactacaggcgtgtgccaccacgcctggctaatgttttgtatttttggtggagatgggttctcaccatgttgcccaggctggtcttgaactcctgagctcaaatgatccgcccctcagtgtcccaaagcattgggattacagacatgagccattgtatctggcccataaatacaatttttattgtattcagagaggaattcttttctatgtttttatcatgacaaggtgttggatttttgtcacctgatttttgtgtgtgtgtgtgtgtgtgtgtgtattaagatgattctgtgattctggttttttaattcaattgatatgctattttatgttagcccatttcaacctacctcttttgtgctgttattattatttatattatatatatatatatatataattttttttttttgagtctctgtcaccctggctggagtgcagtggtgtgatctgggctcactgcaacctccgcctcccgggttcaagcaattctcctgcctcagcctcctgagtagctgggattacaggcgcctgccaccacacctggctagtttttgtatctttagtagagacggggtttcgctatgttggtcaggctggtctcgaactcctgacctcgtgatctgcccgcctcggcctcccaaagtgctggcattacaggcgtgagtcaccatgcctggcctataatatatatatagttttatacagttgctttttaaatcaattaagagaagaaagaaaaaatacacatttatagtgtcctttataattaacaattgctgttacaggtactcttgtatgttttttcatgtggactttacttgctgtttgagaacacttgcttctagcctgaacaactttctttagtatttcttgtaaggtatgtctgttagcataggaacaacttctgttaggttttcgttttagaaaagtctttttttttttttgagataggtctcgctctgttgcccagtctggagtgcagtagtgcggtcacagctcactgcagcctcaacctcttgggcccaagtggttctcccacctcagtctcctgagcagcttgggactacaggtgcacaccaccacgcctggctaatttttaaattttttgtagagatggtgtccccctgtgttgcctaagttggtcttgaactactgggctccagtgatcctccgtcctcagcctcccaaagtgctgggattacagttgtgaaccaccatgcccttatgggaaagtctttatttcacatttagatggaagcattggcagatttagcattgttggttgacggttttttaaaattttttttttcctttctttgagcgctttgaatatattaccccactgactcatagctaccaggtttctgcttagaagtcagcctttcgtctcaactggagtttcccttataagtgatgcatcctcttttcttgctgtgtctttttgtctttgactttcagcatttttattatcaagtgtcttatttgttgatgtttttgtgtttatgacatacactttgtttttcttttttacatgacatatattcttaaattctagtttatgctaaatgcctatatgtttcagttaagtatttttttaaaaattggacacctcagttataatgtatcaactttgttagctagaatttttagattatccagaattgttatgtctcagctgataatatattactatacttaaatattacaagcattctcatagaagacattcgtaactaaattggaaacaaactaaaataaaatggcgatatgcattcctttcctgagttgtgttttgcttagattaggtatcattctacatgtaaaattgtgcagtgctagctctttaaaaaggcagtggctctgagggtgtaggctgcgtggagtttataccatggtgtattcgtttcctagggtctttcctaacagataccgtaaattgaatggcttaaacagcagacattggtcatcttacaattctggattccagaagtccaaaatcagcatctcaccaggaccatgccctctctgaaggtgctggagaaggatctgccccaggcttctctacttgcttccggcagcctcaggcattccttggcttgtagatggccctcttttccctgtgtctcttcacatcttccctgtgtctgtgtccaaatttcccttttttataatagcaggatgccagtcatactggattaggaattaccttcatgacctcattttaacttgattagctttgtaaagactatctctaaataaggttacattatgaagtactgaagattaggagttcaatttatctttatttagaggagggggtgcatagttcaatgcataacggatgaattaaaggaatattgccatcttaagtgccttctgaaacaaggtaggaaattagggaatcatactttttcaaggggagtagcaattggttcattttaggtatctttttaactgactctgaacctacttataagccaacatcggagctctgcagtggtggaacttacaagttaattttgcattaatcttataatggctgacatttcctagaagtgggtgtagttaactaattgcttgattctatcctctccataactgctcactcctctccctaccttatacccctagcctttagccgtgtgcattattacataggtgcttttttttgagacagagtctggctttattgcccagactgtagtgcagtggcatgatcttggctcactgcaacctctgcctcacgggttcaagtaattctcctgcctcagtctcccgagtagctgggactatagatgcccaccaccacacctggctaatttttgtatttttagtagacacagggtttcaccatgttggctgggctggtctcgaactcctgaccttaagtgatccacctaccttatcctcccaaagtgctgggattacaggagtgagccatggcctagttacataggtacttttaaagaaattttactgtttgattgattataaaagaagtatagtcagtgtgtaatgtgatgtgtaaaaaggtgtaaagaagaaactgaaagtcacctataacccattaataattacctgtaactggtattgttgtgagtgtgccctcagtttgtttatggcaaacatgatttttaaaacaaaatctggatcattaaatattttcttaacattattctgtagacaatttcattaattataagggctagtactctcaagattttttttgcttttcttccattttgtaacctcttggggaccaagacacatttcttttcattgtttctcattttctctattgataacaaaattttgtggtatagagttacagacttttgttgataaagaagggactttaggacaactagataaacaactttatgaaacaactagataaacaactttataaaagtgacaaatgagtattgcaggggaactaagtctgagatcatgatatttcacagtgatgagcagattctaaatgaactccttcagcatagtaatttagattgaagttaatgtgggagctagtttgagtttaggttattattaaatatctttataactgaaaagctactaacctggaataacaggcattggaagaaaatggttatgcaggaagcctaactgattgatttctaaagatgattttttaaagtcagttgttgggagcttgttattcatgttccatggaaacaatgtttaatttcttggccaaatgggtaaggtgtgttttagcactattgttactatagttcaacattatggagaaaagttgattcttaggagctaccattgccatatggagaaaaacgtggtccagaatttcatgtttttggccacctgtcattcttcaagaaggaaactcactgggaaataccttacacttctatagttgaggagacctgcgatttggaaggaaaggaggaggttcagtgaagagtgggatggctacatttgatacagagcccaagacttgtgttcaagtcccctctgctgcagggtctcactctgctgcagggtccagcccaggctggaatgcagtggtgcgatcgtggctcactgcagcctcgacatcctgggcttaggtgattctcccacctctgccttctgagtagctgggattacaggcatatgccgccatgcctggctgattttttctttttctttttttggtagagacaggatctggccctattacccgggctggtctcgaactcctgggcttaaaggatctgcctgtttcgacctcccaaagtgctgggattacaggcaggaaccactgtgtccagctcctcccgatttctgggggaaaaaaaaaaaacaacaaaaaacaaaacttccaaaaaaagttttctgtggtctttctgttttgtttttttgaaccacagtcattccatctaggtttatgcttttgattgttacatctctttagtctcttttattactttttaaattttaatttatctactttgctaaatgtatttacatttctcatacttaatctttagtctcttttaatatatagcagtctcaagttgacctaccacctttttttttttttttttttaaagagagtcttgccctgttgcctaggttagagtgcagtggtatgataatattaatagctcactgcagtcttgacctcctgggctcaagcgaacatcctgcctcagcctcttgagtagctaatattacaggtatgcaccaccatgcctggctaatactttatttttctgtagaggtaggggtctcactgtgttgcccaggtggtctcaaactgggctgaagtgatgcttccaccttggtctcccaaagcactggggttacaggtgtgagccacacacttggctgacactttttttttttgggagtcagagtcttactctgtcacccaggctggagtgcagtggtgcagtctcggctccaacttcagctcccaggctgaagtgatcctcccacctcagcctcccgagaggctgggactataggcatgtgccaccacacctggctaagtttcatagtcttagtagagacagggtttccccatgttgcccaggctggtctcgaactcctgacctcaagtgatccttccaacttggcctcccaaagtgctgggattataggcatgagctactgcacctggactgcctctgactttttgaacagataagactgattgtctcacagaatgacactatctggatttgtctgaacatttccttatggtgtcttttaatttgctcttctatccgttatattttctataaagtgggaattaggtctaaaggcttgattagactgcgagtaaacatttttggggaagaataatttgtaagtgatactgtgttcttcatattgcaggttatcatgtggaacatgatggcagttgtatcactctgtgatgctgaatttgatgatttgattcaagtggagaccaccaatgtcttcatcataagggaaatatttcactttgcagattaccatgtaatctgagggatttggcagttgaccaatagctttttctccagcacacccattgatgattagggcacttacagttattttattgggccctgcaaaatggtatttttctaattctgttgtttttttcatgtttattagtaggcattcctctgtaaagaagaactttttctcattaactagtgttgaactgttgtttcttcagaaaagacaaagtagataatgaagtctttagttgccagttttcagaataaggaatcaatgtgatactccctacccatgctgcaaatgagtttttcccctttattgttctcctacttcttttttgtgtcatgatagatttttatttattcagtgtttagttgtttgataataatcaattacaatcattctttttgatgatgttaaaattattctcgattttgccactggaaaccctccaagctgactactactttattgttctttcactcttttttttttttttctttttttgagacggagtctcactctgttgccaggctagagtgcagtggcgtgatcttggctcactgcaacctccgcctccccagttcaagcgattctcctgcctcagcctcccaagtagctgggactacaggcgtgtggcaccacgcccagttaatttttgtgtttttagtagagatggggtttcaccatgtcggccaggatggtctcgatctcctgacctcgtgatcagcctgcctcggcctcccaaagtgcttggattacaggcaagagccactgcacctggcctcttccacttcttttttgtgtcacgatagatttttatttattcagtgttacagttttttgataataaattacagtcattctttttggtgatgttcaaattagtctcgattttgccagtggaagcccctccaaactgactactgtaatttttttgataaatcttgaatttacagaaaaattgcaagaataatgcaagaagttcccaaataccttttacccaaatccagtgattgcttatgttttgctaaagttgcttgacaaatgtatatttgtgtgtacattcgtaaaaacttaagtgcacatttcccagtaacagggacattctctttcataaagatggtataatttaaaacatcaatgctgtcatctaatgcacagcatatttttaaaatttaatcagttatctcagtaatgcccagtatcaaagatgatcatgcattatatttgtcatacatttttagtgtcttttcatcattattcttccgccttttttcgtctttatcgacttggacatttttgagaagtacaagtcaattgtttggtataccgttcctcagtttgggtttggctgctgtttcttcatgattagattcaggttatacattttttagcagaccatttctactggcctgccaggcttttcactgtcttcactgtcattgcgtgtgtgtgtgtctgtgtgtgtgtttttgagacagagtctcgctctgtcacccaggctggagtgtagtggcacgatctcagctcagtgcaccctctgcctcctgagttcaagcaattctcctgcttcagccttgcaagtggctgggactgcaggcacacgccatcatgtaccacgcccaactaatttttgtatttttttttggcctcccaaagtgcatgattacaggcatgagctaccacgcccagcctctttcagtgtgttttgacttcaactcatcagttgagatcaggtgtggaattttccagttgtggtgttatgttagcactcaaaaagtcagattttggaacattttggagttcagattttcaaattagggatgctcaacctctactagtagtaggactgtcattccttctctgtgttttagttggcattctactgcaagaaaaatacttcctttctgtctattcatgtattttttagagtagcatggacttttgttttgttcatgtgactcattattattattgattttgatacccaaattgttcctgatgggaccaatagcttcaagctggctcctgtgtttgtttgtcatgtttttatcattctttgagcactttctaacttcttggtataaaatagaatcatcttgtatcttcctttctccagccttacattctaaagtgtcttgatttcttttagtggagaatggtatttagaaaccaagatgccgattctatgtgtgctcattactacagaggtgtcatggtttttaatcatacgttccttttagtggacatagcaaggaaatgttttaaaaagtgacttcacagccggacatggtggctcacgcctgtaatcccaacactttgggaggctgaggtgggcagatcacctgaggtcaggagtttgagaccaacctggccaatatggtgaaacctgtctccactaaaaatacaaaaattagccaggcatgatggtgcgcacctgtagtcccagctactcgggaggctggggcagaagaattgcttgaacctgggaggaggttgttgcaatgagctgaggttgtgccactgcgctccagcctggtgacagagcaagactccatctcaaaaaaaaaaaaaaaaaaaaaagtgacttcacactgaaaatttcaaatcacattaacctcagtgttttttttttcttcgaatcttctatctttttaattggaatagctacaaaaggcgttagagagattcttgtgtgacgtttctgaagttcagtaatactctaattttagtgtgtcattttggttggagaatcattgtcagctgacttggacataattgtcaactctaatctcttgttagagcaaatgaatattttgcaatttgaaaaactggaattttaagttaaaatctttgaatttattatatctaaaattgctttatatatgaagaaagaatagcattaatcaaatttctgctctgtttaggatttgaagtgctgacttacagagaagacttcagttttgttacttataaaattaggatagtatcttctaaggttattttgagggtacatgatgtatataaagttcctagtagagtccttggcctaacctaggcacttaataaatggtacctagactattacactattgttattgtgccctatagtgtctgtaggcatagaagcatgaaaaaatacttctttgcttaatattccttattgatgtagatttaagatttcatattctaaaagttttgactgtgtgttttcataactgtgctgaattgaaaatgaaaatttcacataaatgtaaacttcaatgagttttcagacaaactacacgtgtactatgcaactagctccaatattaagaaatagaacgtcatcagtacttctgaaaccactgtttcgctccctccagtcactacacaacatctttgctttcaggggacattgcatgagttttatgtctttttgtttattctgccctactcaaaacacgtagggaaaaaaaactattttggggattagaattgcattagatgagaaacttgaaatgagctttgtcaatagctttttatgttgcatagtgtaatttttaatgtaagtacaatagaaatgtattttgcaggtagggagtgcagttttaatttttattttactctgttagagggtaattagtagaacctttttgagaaacaagtatgttagaacatcttttttactatcacttgtttattgtctgtgaacaacaaaggcagaaactctgtttccctttctgtaaggataagtcataactttgtatcacctgtccttagcatagttcctggcacacataagccatataagaaaatgtttttaaaataaatatgtgaatcagtctaggtgagtacatgttagcacttgtatgtgacttcacctgcatttatttgtacatgaaagaatttagggtgggacttgcatgtatgaaattgctataggagagctctattttcattatcagtttatacaagagtgaccatatttttatttctgggggatggagtcttgctctttctcccaggctggagtgcagtggcgcgatctcggctcactgcagcctccgcctcccaggttcaagcgattctcctgccttagcctcctgagtagccgggaccacaggtgcacagccccatgcccagctgatttttgtatttttagtagagatggggtttcaccatgttgcccaggctggtctcaaactcctgacctcaggtgatcctcccgcctccgccttccaaagtgctggcattacaggcgtaagccaccacacccagccaagagtgactattttaaaaaacaatttgatgctagtatgtagcgtaagctgtaggaaaattacagttgtaggaatatagggtatatcagcattatagaaattaattactcagatgaagggtaaggtatgaatcgatacatagaaagctctgttaagtgtgtctgcatgttaggtatggtatcttgatctgtatgttgaactggtttcccaaagaaatcataaatctgggaaaagtccagcaaaatgttactgatattagaaatggatgcaagtgtaacaaagtaaaaagaataagaatcttccttgggaagatactggttaatatataggatgcgattgtaaggctgaatgatcatacaccttaccgttgaaactgtgacaccttgggaatggaaaggcatgctattaattatgccatgacaactggtgcaaactttctggcaaagtgggacatatggtcactctgttacagggtgaatatgggtttctctgttgtatcctggaattctagaattaacatttctttaaactcaaagggagtaatagtagaataactgaaaaggcaaacactacctgaaacatagcaaatgtggcactttcaaactgaaaatacgaaaaaaattgtaggtaaacagcctgtcacatggcaagagtgacaccatcttgaagtgaaaccagtcataatgaccagtgtttgactcctgcataccaaggctttcccgcagcaaagtcaaaaacaatgcctgtagcattgataatgcctcatggaggtgcttatctaacctctccagtggtcacaggtttcctaagaaagtctgaggcatgtcaagctgctcatgtgtttgccctaaaagcttgctctataaaaggtgttttctggagggcgatacaggggatacaccatctctcagctgcccaagacattgcttctgttcataaatttaccatctgagcctttcctggaattttcaggcctttaatagacttgttcatacatctttgttaaatttttctttctgagaaactggatttgttagcctctttcttcggcctctcagctccctgagcctttcggagtatgtttgccatataggagcaaaagtttatagttaaatggatggtagcagtattcttctgtgctgtgtaacaaattatcacaaattgagcagctgaagtgaactcatgttatataacagtttctgttgtaggtaagccgtgccctctgcaaggctgtactcagtgtgctggccagggctcaggtcacatctgcagttgcagttggtaatggatctgctttcaagctcacttagggtgctggctgaatgttttcttgcagctgttaagactaagtgaaggctctaggctttttctggttccaagttggcagctgccctcagtgctgagaggccgcctacggttcctcgccatgtggccctctccataagtcctctcagcgcggcagcttgctccttccaagccaatgagggagtcagggagcaagtctgctagcagtatggagtcttacattatgtcacatagtcacagaagtgacatcccatctcttccgtcattttctactggttagaagcaattcacaggtcctgcccatattccaggggaggcaattatacaaaggcatggatactagcaggctgagatcgggggaacactttaatttctgcccaccacagcactgcattcacaatagcttatcagtgagaagtctctgactgaggtttaatcagtgtggtatattacttatgattatttttgtgaaatctagtatagtttgttagaacatgtctactttcatttaagtatacatctatctatttacagcactttaaaattcatttttgatggtgagcacagtgagtactgtggcttgggatagcatatccatttctataatattgacaattgattttttttgtttactaatatccccacttaatagatcattgataactgagtctttttataaagcggattgaagatggctgatttattatgacatctatcatgtataatcatgacctatctctaaacataattaaagtgttcaggttcttctttaatgacacctagaattattgtttacttgaggttgttttaggctcatgaggcttccttggacaaccctttgttcaaaatgaaggaattgagggaatatattttgtaatatggaagactactggcacacatcacctaatgtgaaggggtgtctctttctgaacaaatgcagtttgttcactatctttgttcaatatctttgtcacttatttggcagttaatcatgtattttgctttaaccatatctagtgtttttttattatgggaaaacttaaatgtatattgaagtagacaaaatagtattatgtacccccaagcacctatcatgctttagttaacgcaaaaaacatctcttgaccaatgttgtgtcttttttactccctctaacttaaaccttcccagattctttaggggcaaatcccaaatatcattttattacttaaatattgtatttttacctttttaatatgtttgatctaggttttcctttttttatactgaatgctccctgagcatatggaccatataatgcatatatcaagttttagcctagtggtgccttgtgggtagtcagtacatatttggaaagctaaacataggtatacacttagaagtcagaaaagtctgtcttctctaatttaacgtgagttgactctacaaactaacctaggataattacctatctattctctccattgaagaagaatttcacttttttgaattacctaaagggtatgtatgtatgtatgtatttgtttatttgaggcgggctttcattcttgttgcccagactggagtgcagtggcatgatcttggttccctgcaacctccgcctccccggttcaagcgattctcctgcttcagcctcctgagtagctgggattacaggcatgcgccaccatgcccggctgatttttgtatttttagtagagatggggtttcgccatgttggccaggctggtctcgaattcctgacctcaggtgatccacctgcctcccaaagtgctgggtaattacaggcgtgagcaccgcgccccgccaagggtctttattaaggtctgttttcttcttgttgtagacttggacttaggagccttgaagttttggtgcttctctaacggtcacagtttgttttgaaaggaaggcagtgggttaaacagaacatggaaagcggtttactttattgtaatcacctaactctcccactctcagcagtgtgacagaaaattggggtctgtttaaaataatattttgatctcagggcaggaatcatttgagaatcctacagcagaacccatggtgctgcctgaattttatgtaaaatgagccctgttaaaacaaagttcatgtgttttgggatgggatattttaaacttcaacttggaaagtaaagaaaagcatgttttccttctttgctgccttctcccctccctagctagcttctggcagtaagtgtttacatgtggttatatacccatatgtataatagcagcagatttgtaatttatatattctttagactaatatttatttaatttatttttttgagacagagtctcactctgtcacccaggctggagtgcagtggcgcaatctcggcatactgcaacctttgccaccctggttcaaacaattttcatgtctcagcctccctagtagctgggattacaggcgtgtgctgccatgcccggctaagttttttggattttttgcagagatggagtttcaccatgttggccaggctggtctcgaactcctggcctcaagtaatccatctgcctcggcctccgaaagtgctgggattataggcgtgagccagcatgcccggcctccatagacccaatacttaaacgtttgagtatataaatgtttagggattgagatataattaaaagtttacttaaaaaatttataaatgttgttacgatagagatttgagatcaaacaaaataaattctaaatgttttcattttatgattatttatttatctgagacaggcttgctttattgcccaggttttgtggtctcggctcactgcaacctctgccttcagctattgatttttccacctcagcttcctgagtagctgggactacagacgcactccaccatgccagctaatttttgtatttttcttagtagaaatgggctttcaccatgttacccaggctggtctcaaacttctgggctcaagggatttgcccacctcgtcctcccaaagtgctgggattgcagtcatgagccacagcacctggccttgttttaggatatatttttatttgaactgttcatagatatcttcagcatctgtgaaacatttagttagaacatgtctactttcatttaagtgtacgtctgtttacggcactttaaaattcatttttgatggtgtcagtgagtatggcttgggatagcatttccatttctataatattgacaattttttttgttagctaatatccccacttaatagatcattaattactgacctagtctttttataaaactgattgaagatggcttatctattatgacgtctatcttgtacaatcatgacatcaaatctctaggcataattaataaactgttcaagttcttctttaatggcactcataattgtttatttgaggtttttttaggctcatgagagttccttggacaaccctttgttgttcaaaatgaagtaattgagagagtatattttgtaatatggaagactttaggggacctgattagaaagtaactcttctcttttctgacagatttgggagacagcttaccttttatgtgggcatggcaaagtatgttttcttaccttgaaactcattgaaattttatttttccaccctctcagttgctgacttattctcctctttttttctgtgtctcttttcagaatataatagagaatgagcttatatggcaagccaaatgtgatagagaaattttagaaattgaactgcttttgatcaaaacgctttcttttatgctacctttctccaaattctgtcctataagttgttagtaaccctatagagagagcttctttagtctttttcatttatagggcagtcacacatttcagtcataatgtgtgactaattaaacatttatttttcacagggtctggctctgtgacccaggctggagtgcagtggcctgatcatagctcactgcagccttgaactcctgggctgaagccatcctcctgcctcaggctctcaagtagctaggactacaggcatgtaccacctaatgggcatgcccagctgatgtttttattttatttatttagagatgggatttcactgtgttgcccaggctggtctcaagttcctgggctcacgtgatcctattgccttgacctcccaaagggttgggattacaggcacaagccaccactcccagccccaaatattgctttataaattagaataaaattaggacatttttctgaatataatttttttttacatttctatatgtagtatttaagaaaactgttggtgattattagtgaaatagtggtctgaatgaaacctgctttggtatgggctgagagtttccgatcagattgatttagctccaggtatttctcccattattgtagaattttttttttttttttttttgagacagagtcttgctctgtcgcaggctggagcgcagtggcgcgatattggctcactgcaagctccgccctcccaggttcatgccattctcctacctcagccccaccggtagctgggactgcaggtgcccgccaccacacccggctaatttttgtattttttagtggagacggggtttcaccatgttagccaggatggtattgtagatgtttactagcaaagctttttacgtaatttagatgataatttatattctgggaagagtagactactttgaagtaatactattcttgttaaactatgttataaaggatcctgagatcagtctaagcatgtgcacacccattctaaaatttttatagaaataacagaaagatgtcatgtgagtgtggtgagtgtggtgtttgcgttaagtttattgaactggaatagagctagaggatagactgtgttattaatggatcagatatttttgaggattcctagaggattgcaagatagtaaataggattagagagacaacagctagtagaaaaagttacagcaggagagagaataattaataagtgttagttaacagctgaccctgggcttcttgagagagccctggtggaagcttgagtttggaatcaacagttcatagtaggtgcatggctgtgttgccatcaccatggtaattaaagaagttcattcagaatagctggctcaatggagcctcctttctgtccccttcagagtggctggtttgccaggctttcacctttaggataaggctagagtcatggtcttgccagaaagtgggtgatcttttgtctgaggagtgcgtgagagtggagagagcagagaagagctcatacatagcactttggtttttacagcagacacaggacaaggacattcctattctgagtactgctcttcttgttaacgtgcccaccagctcctcacacacatagaacttgaaaccaacgatcttttaggacagccagacctacgcaaatgcagaggaaaccctcttgagatacttacactaaccatctttcattcacaaagccgtacagccaaccagggatttccagacacttgaggacaaccaagagattggaacatggaagagtctccttcgaggggcagtaatttaatgagtgagggctatatttctgttcctttgctttttctttttcttttctttttttttgccttcctgtactgctttttattggaatgatattttatgttttgctagtaacctatacattttttaacatgtgtaactaaaattttcttgtttgaagttactaacatttctactggcccctctctacttcataagccaatctcctttgcacacattagctacccttcaagtatctactctttctagttaattgctttttgaatacaccaaagataaagcatggaagatataattatagaagctaatgtaaatgttataatccctgaatatatgagtaagtggctgggaggtggaggaaatgagggatagcaggaaaggtgaatgtgcttatttccttttgtttcatagcccggatttcttacgtgctatatgagaattggtaaatctagctaaagatttagatgtagaaccagtagaagcactagaacaatactctacccagtgacacgtaataaaaattaggaggtggcctgtggaaggagagttgggaggtagtgtgtgtgtcaatttctcttcttgcaaaagcacagaattaagagctgttgactgaggcatgcaatatattatttaaagttatgataatcattattaagaactaaaaccgttaatgggtattgtctccagggaaatgaaccttaagagagggagtggtgaataatactttgagttttacaccctctttacagtttgaattatttttagattgtgaacttagagtacttataaaataaaaggttttatacaaagcatatgaaagggatttggtgcttgttctgatattttaactgtccataggaagctaacctcagacttttacataggttaaagagtggtctcttttccatttacatagtggctttcaaaaccaagtgtacttgaacaaggtacttcactctactggggcaagtttccatcacgttgctcactttggtaaaatgattacttagaaaaatccaaatgactcatgtttctagtcatacctttacataatgctttacgttttacagcactttcacattcactatttgatttctgtaaccccgaggtaggcagagtaggtattttcctgtatgatatggtgaggaaactaagactgagaaagtgactcacccagagtcacgtggtttgagaagtggtggtggagctcactgctcaccctctcaccaggagggtttcacacctgtgcagccttctggcctgctatggctaaagtgtctcttaccagttcttacctttcttctttgtaatgtacccacactcaagttcccatattgactgcttcctgcattctgaatttgtattcaaattgtgtttaacatatgtaaatctgtgcttattttaaaaaatgaattttactgcattttgaaaatgccacacataaactttgagtgtcattcagctcttgttatttctatagctgcacaacactattccttccttactttcatgaactgatcttttcatccagaatttttctgacacccttgtttttaagcgtcacggcttgctgaagcaaagtggtggaatttaaatgttgttgccttcaagaattagctaatcttttggacttgtgatacttgtgtaatctttttggacttgtgatttgacctcatttgatccctgcagaaatggttctcatccaggaaatttgagatttcaacaagtgactcactgaaaaaaccacgttagtcgtggggaagtaagcgtgctcagctcttgttttgggaccccagtgtgataccgttgatacgattgatttaataatacctttgactagtcattccagtgtctggaattcctcagggatggtttctgtcaaattcttttttcctgcaaatacaccatattttccttttttttttttttggcatgttttgtgattttttttgtgtgtgtgtgagaactgaacagtttgaatgttgtaatgtggtgactctgaaaatcagattctccacctcctcagtgattgcttttttgaggcttgcagtcatccatttgtataatgacttttctaaaccagttttgcaaagtctgtattccttgttgtgtgtggtcactgaagtttctgtcttactatctctggacagctatgacttgatagagatttagtataatgtctggatccccatccccctcaataaagggaaaaaaacaagaaaggttgcagcctaaggggacagaaacaaaagcaagaatctgtgctgtttccccaggctactgccagaactgagcaaaatgcacaatcctaaattgttgagggcaaggttcccgctgccagccctgttactaggcagctgctctaggaggtggtcctgtgcccgcctctggggatgctgaggagtagggaatagtagctggtttgcatgctgtgctctcttctcccttcatcaactactgccctgggtgtttaatgtctgattaggttctaaggttcagaatagttgattctgatgtatttttcagcttaatggttttggtggaaggactaaccctgggagctttctactctgccatttttcatgttggtcactccactcgtatgttttggatgtgaccgtgcttcatgccagttggcagccagttcttttctacttccccaccatttatcaaagagtggtgctttcttgttgttgaaaagaccgaaactacattaatggaataaagttctttgcagcatttctctaacatccttcacaaaaattatgcatacatttatttttatttgctattattattattaagagatagggtctcactctgtcgcccaggtcatagttcactgcagcctcgaactcctgggcttaatgatcctcctgcctcagcctcccgaacagctgggactacaggcgtgctccacaacatcctctgtagagacagagtcttgctatgttgcccagccttctctagaactccgggccttaagcagtcctcctgctctgacttcccaaagtgctggtattatgggcatgaaccactgcacctggcctacgcatagctttagagtgacactgtcattttatgagctgttgatggtgtggttactaagaatggtttttatttttgcagaacttaaaagttgttttcagttcttccacagttttatagctggaaaatggtaagagagaaccacattttataggtcaggggaatcgaggtctagaaaacaggactggcagagatgctttgttctttccacttaactgtggtttaatataatattcctgttgtctcagtgacacggaaagagctacaggtcactcttattgtggtaagaatgaagaactctttctagatagttcacaatatgagtacttttttttatttgaagtgtatggaatattccgagtatttgataaaactatgtaagtttgatgataatttgctttttattagggtgagtcagagtctgcatatggaatctggagtatgaactccgttactattaaactaagtcagtccataatgtaatttgttgattttggtttcacttgaacttaataataccttgtatttatatagtgattttcttctcaggagtggtaggtactttacagatactttattatactgtaacataggtgctgggaaaaatagaagcgttcatgtttttataagtggaaaagcatcaacacaggttttctcactgagcataatcacagaaatctgttatccaagtcaggtgtctgaagggtacgcagggtggcaatccagggatccttgctttttatagagctgaaacattatttggtggaatagatatagaaattatcaagaatatggtagaaagagcttgatgaaacattcttgtaatttgttcaccaaagtgggtgaatccctgcattgaagacaatgtgaagatgctgaaaaaacacatcttgcccaccctttttgccttaggtaaggtgccagttacggagttcagatatagttatgttttaaatgttagctatccatgagagtattttattaattttttgaaagttttttgtattgttaggaaagtaggatctgtaaagtttcatcgtgcactcaagtatgttcttatgctgagtttggtcatatttgagaattttccttttgatgttattgttaagccaaatgtgaaggcttgacagagtggttcttggaaaagccagtattattactactgttacttctaacagagatgaagtaatgagatttctttcattagctcattgtctcattgtgaacatttacagatcaaaagcttgtttttcgttcgtttatttttttggcatccagtgatcttatatttccatatcttgactgagttaaaagacttaaggtaaatccgaatcttcttttgttgtctctaaatattctctataacacatttagccatgaattatgtggtgaaacttttcattgaaaatactgaataaaataatcggaatactgtgctttttgacatgtctaataggaacattgagtttctagtggacgtttgaacttttgaaagttaaaattacatgcctgttggttttggcttagttatttagcagtgaattataatattgattcagatatgtaacttgttttttattacataagtggagtcctctgagtaaatttaaatttgcagttacttgcgcagtgattaatcatagaattggattttttctgaagagatgagaaatttagatgtttaatatgttacatatgtgcttctgtggtggcagttgaaggagaaagtaaactacttttaatttcttctgggaagaaattcagtttttgagaacttgccagaaatcttccctatcaggttgaagatttttaggagggatatggagggtaggtgggagaatgggatgtatacacaaacataaacactactggacggcaaaattatattgtttctctttcttcctgcaatggaacaaatggttttcagaagacctgtgataggaatagaggcaaaggccctttgatcatgtgattattagagcttgataactggttgtacaatatttcatttctctcagacttagcaacatgttctgacttctccattagtgttggcagctgaacctctctgttcccttttatgtcattggtaccatatatcttactgagggtcactttgctttgtgccgatttctgattttaagccttttgcaagcttctgccatgtgtaccacaatggtgcaatgccagttttaggtctagacccttctactttttatggtgcacattttaactttgatgggatagttaaaaactatgagatttctttcagtagctcattgtctcattgtgaacatttacagatcaaaagcttgttttttgttttaacatagaggaggccactagaggaggaagtatagaccaagactcttaggatgactgcagatcagtgcagaacccccagatactttccctcccagccacagaaattgtgtcaggactgtgttttttgaaagactcatctgaaggaaggagtaatagatggcattgtagttgggatggaggaagatgggcaaaggaagtttgctttgtgcctgttgtgccaggcattgttctgaacatcttctatacatttttcacagaaacaagccatgttgcaagtcttgtttgcccttttttgcagattagtaatttggagctcaaatgtttagaacaaatatttgttctaaatttaaactttggtaactctacagtagtgctgctattttagaattgtagcattttgggtttgcaataggtgctacaaatctggtctcctgtcttgctgatgagaaaactgaggcagtgttttattgcagtggctcagtagtttagtttatattagaatggggacacgaatgcagcctcctggtttgaaggctgtcacccagtcccctgcccagcctgcggttggaacgtttaaatgcctactctttgtagttcagggttttcattgtaccaacatgaaaagctataatgaaaatacccctaaagaaagagtcaaagcctggcttgtttagttccatctgtttgtgctattcctttctgtttgtttgttttccttctcacaggcccctcagctgcaggtctgttggagtttgctggaggtccactccagaccctgtttgcctgggtatcaccagcagaggctgcagaacagcaaatattgctgcctgatccttcctctggaagctttgtcccagggggcaccagcctgtatgaggtgtctgtcggcccctactgggaggtgtctcccagtcaggctgcactcccagtcagggacccacttgaggaggcagtctgtctgttatcagagctcgaaacaccatgctgggagaaccactggtctcttagacctgtcaggcagggacgtttacgtctgcagaagctgtctgctgccttttgttcagatatgccctgcccccagaggtggaatctagagaggcagtaggccttgctgagctgtggtgggctccgcccagttcaagcttccctgctgctttatgctgtaagcacagaaccacctactcaagcctcagcaatggcggacgcccctccccctgccaagctccagcgtcccaggtcaatctcaaactgctgtgctagcagcgagcaaggctccctgggcgtgggacccataagccaggcacgggagggagtctcctggtctgccggttgcaaagaccgtcagaaaagcacagtatttgggcagtagtgtacccttcctccaggtacagtcactcacagcttcacttggctaggaaagggaaatcccttgaccccttgcgcttcccgggtgaggggacgccccaccctgcttccgctcaccctccgtggactgtacccactgtccagccagtcccaatgagatgaaccaggtacctcagatggaaatgcagaaatcacccgccttctgcatcgatctcgcagggagctgtagaccggagctgttcctattcggccatcttggaagcaactctcagttccatctgtttgtgaagcctttccaagttctccagcactcagtgttgttcctgtccagacttgctatagtacatcctgtgttgtgacatagttttgacacttattctcttatctctacatctttaaatttatttttaaatggatttttatttatatgtaatcatgaaaagctaatttttattcactctctactccccagttgaattatgattttgaaatttttcttatgcttttgtatataaaatttaaaaaatttcaacttagagtgataaataatatgaaacccaatacatacatacatacttacatattgaaacaaaagtttcagaagactttgtttactcctaataaagatgtgtgtctgatctgttttactgaaaaagaagatggtagtggtccactgcaaagacctcaccactcactaatgggtgtcacactttaaaagtcatgttctccagttactagcacagggctagagagaacacaggtagtcagatactgaatttcacataacccaaggcctactactttgatactctttttatgattcctcaaactcattgtataatgtgttttgtcataaatattttcattgcctttgattcagtttctgggcacatggtgttttctagaacaggtatgagggttaagccttctctttgactcttcgccctttctcatttatgagatgaacttgtttcacctttatactttggattcatctttttacagctcacattcacttctttgttgtgtttataccttcacaccgtcacatgggctgcttcctgtgcctccagaacttttcttattttaccaggtcacgtgcttttcccacctctgggaagcttttcctgcctgatttggcggttctcctttgtgtactgacctgatctaacttaaaatgatacatgctgcattctaaaatatgacttgaaacatgaaactggaacagtgtattgaattttctctttatttatattaaagttgtgtggaaactaatagtttggctatttaaatacattttccaaatgatagatgcacattcttttatgttttcatcatttttaatttcttggtaaggtgtattgttctctactttataaaatagtatatactgaatataacttttcaaaatgacatatcctcatagacaccattttttagccataatctggttttagatgtagatattgtgggccaggagatttttaagttaaggaattacattaattccagattgaattgttttcttgaaaacattcctggttgttagtttacttttgtgtgatttttatctttttcataatggcagagtgaaaggagtgaaaggtagttagttgtatgttttccatgattgactatgtaaaaattatttaattgcaggatagccatctcccagattatttttttcctatttgcagatatttttgggttgctcacacatttaatatatagttacttttatattatcaaaataataggtcaaaggtatctttgtaatttcaacctattattatttcacttggatggtgatttctgggtgtgaaaaggacaagccctcatcttttcaagaattcatactaggtaagttaaaggagatacttgccccattgcctatgtattagtccattttcatactgttgtgaagaaatacctgagactgggtaatttataaagaaaaagaggtttaatggactctcatttccacatggctggggaggcctcaaaatcatagtggaatgcagaagatcagcaaaggcatgtcttacatggcggcaggcaagagagcgtgtgcaggggaactgccctttgtaaaatcatcagatctcatgagacttattcactatcacaagaagagcatgggaagacccatgcctttgattcagttacctcctactgggtctctgccacgacacgtgggaattatgagagctacaattcaagatgagatttgggtggggacacagccaaactatatcagcctacaaattcttagtattggatggctattgttgaggatatgatgctatttcctaactcattcaggactttgttaatgtttgacttttaatagactatccaacattgtatatttaatgttttaatgaaattggaagagctgataaattcatatgttgctaaaaatgtggggatggaaggtactatagacagaagttttacatctgaggaaactgaggtctggagagaatgatttgttacaggtcatttataatttaatgtcatggccaagaccagactcaagtctgtagctttgctagttcaatgatacttgtagtataccatggtctctctacagcagttctgtaatgaatccattctcccatgaaatcttctctgtaaaatattttttttttttttgagatggactctcactctgtcatccaggctggagtgcagtggtgcgatctcggctcactgcaagctccgcctcccaggttcacgccattctcctgcctcagcctcccaagtagctgggactaggcgcctgccaccaggcctggctaatttttttgtatttttagtagagacggggtttcaccatgttagccaggatggtctcaatctcctgacctcttgatctgcctgcctcggcctcccaaagtgctgggattacagacatgagccaccgcgcctggccacgtttcctgtttttaacgaaacttgagttttcattaataaccttacattgacaggaatattggctaaaaagtactatctgatattaaccttgtttagttcttaagcacacccattaaaatttttttacttaaatatttatttatttatttatttattttgagatggggtctcactctgtcatccaggctggggtgtagtggcacactcccggctcactgcagcttccacttcccaggctcatgtgaaccttgcatctcagtctcccaagtagttgggactacaggtgcatgccaccatgcctggctagttttttgtattttcggtaaagatggggtgtattagtccgtttccacactgccaataaagatgtacccaagaccgtgaagaaaaagagttttagttggacttacagttccacatggctggggagggctcagaatcatgggaggaggtgaaaggcacttcttacagggcggtggcaagagaaagatgcaaaaacagaaaccccagttaaaaccagttctcatgaaacgtattcactaccacgagaacagtatgggggaaccaccctgatgattcaaattatttcttaccaggttcctatggaagtacagttcaaggtgagatttgtgtggggacacagagccaaaccatatcacggggtttcgccatgttgcccaggttggtcttgaactcctgagtccacctgccttagcctccccaaagtgctgggattacaggcacgagccaccatgcctggccacaccattgagtttttacttcagcttttccaacttttatattttgaagttgtatttagttctttttaaaagtctgcttagagtctcatctttgttcttataatcaattcattgccatttcttgacacatatgagacatttgttttacatcctgtgtctgttaattctggtatttaatttttttttttgagacagagtctcgctctgtctcccaggctggagtgcagtggcatgatctcggctcactgcaagctctgcctcccaggttcgcgccattctcctgcttcagcctcctgagtagctgggactacaggtgcctgccaccatgcccacctaattttttgtatttttagtagagacggggtttcaccgtgttagccaggatggtctcgatttcctgacctcgtgatccacctgcctcggcctcccaaagtgctgggattacaagcatgagccaccacgcctgccttaatatcttcttgagtttcattctgctgtctgcatttcttcatggggctcttattcatggggctttcttttcctgtgtgtttttgtaatttttgacttatgaactcaaatctcttggcttgtatttgtaggaattcttcgtgggtggattgaatttgtctcattccagagcgaatttgtaattctgccttttgtggagtggaagaggtggaaggagggcactctcaatttaggatttctttgaattctctactgaggttttttttttttttttaagatcacatagtcagtggaaatttgggtcacagacttttacgagggcctagttatggttatgaattttgggaagatgtttctcctttctccctgtctctactcctaagtgccaaggacaagtcaagcaagttatcttgctgtttcttgtggtatgggattattactggttcccttatgcattgaagagaaaccctttagagatctcggcttcatgctcatctctcctgttgtcctccctgtcttgagtggaccctaagttttagcatctgtttcctgcataccgttccattcagctgttagaagagaatttaaaggtcactagggtcaggaaataccagcagtgggaagtctttggtgtttgcttatctctcgtagttcccccatcacttttgttttttgatttctgcagattattttatcactagctcagttaattattattttttaaatttcacccatcttttggttgttttcatcagaagggcctgagtatctcattacttcttcatgatgaattctatagtaagggtactaagtctaatcttttgcctaagttacaaaaatggggacagaagtcagaaaaaaatgtcttcttccatttgtgtatgtcatgtgctcagacaaaaataaattaattctgatacctatgaaggctccagagcagaactttttttttttttttagatggagttttgctcttgttgcctaggctggagtgcagtggcgcaatcttgactcactgcagcctcagcctcctgaatagctggaattacaggcgcccacgaccacccctgactaattttttgtatttttaatagagatggggtttcaccatgttggccaggctggtctcgaactcctgatcttaggagatccacctgcctcatcgtctcaaagtgttgggattacaggcgtgagctactgtgcctggcctggagcagaacttaactcaccatcacgccttctctttatcccagtaaagaatcactgatttcataaaagctattgttagttttgatagggtcgtacttctcaaatgtgggaatggagctattattattgaatgtttactttttctaggctcactttaaatttttgggtgattatgtgaccattatgtgatgtaatagaatttgtcagccttcaacaaaatccttcaggaatgtcttaaagatggtaacaatcatacagtaaaattttgactttccagttggtttttcaccagttatatctaactttggtgttgaaaacactgttaaatttaaaaacaacttagcagaaaccagttgcttagtataatcttttgcctttttagttagcgttaggctagagagaggagtgtaccctgatcatttctgttgaggaaaaccttgaatgcatgcaataagcatgcttctcctgcatctgcagaatctgctgcgcagtgtcattaccacaggaaggcatagtttatggtgctatgccttactttagaactgtaataaggtgagtgctcttctttctttgtacttctcatttcgatctgctaccgtcagtctgtcctagccatcattcttcaagctgttgaattgtgggcttggcatatattggttgtcttagacttccctggagttctgtgttaaaacagtaatgtcttcagaagcattcatgaaagtgatcggaaacgatagaatgttgagtgagaagggattttagaaatcacataatcttttaattttctgaatagttttagccatgaaaatcttagttcatgtaaagccttacttgaaaacccaacagataaatttggaactgggagttttgaaaatcactgaggattctgaccccttttattttgcaagtgaagattcttaaatccagaagggttaaacgatgatgatctacagctctttccaccttactcctcttggcctgctgtcctcagacttctgaattggattatggttctgctttgttgttaggccgtgtgggggagtacagtgatgatacctctgggggccgcttcatggaattggctcttgtctgccaaactaaggagagtatctatttttttgtattatagctgtcttgttttgtcttctgatttttctcttgtcatttcttagcttttgcacggagcagaaaagatgtattactgtgactagtttattttctttttgtttgaagggaagggtaagaagaggaccaacatttattggacacctgcttgtgtgccaggcgccaccagctgccttagaaaagttaaaattctgttatagtcaccctataaagtagttgctaacatttttctttaacagttgggaaactgaggcagagagagacaatacctgacccatagttgaaactactgtgaggacaagggagtgggagaagagcttactaagcaggcatgaaagtatgtggtacatatggtgacaggtggacatgtggggtggttagaatacaaggcgagtggcatgtgattcggctaacagtagagagataaccttcacctgttaccttgttcttagtgtgtcttaaaggccagaaatgccttcctaaggtgtatggactggtattttattgttctagatgggtaagtatttgaggttgtattttggttgatggcaccttttcttctgttttggtcgggggaaaggattatactcatttgaataagccagtatcagtttgaatttttacaacaggtggtaaaaacctgggtttgttggttattttcaacatatgtcagggacttctgtgacaaagtacttgagctggcagggtgaggggtagtagggcttgcaatattcccatcaatttttagtggattgtgaagttgctgtaataattgaatttggtattgttatgacatattgctatccaaatttagaaataaatgatatctattaactagtgatggtattaaggttttatataaaacttaaaattgattcccaagtcaaaaaaataaagacagtatcatgtatatagaagtgctggttggctggaagataatagaagaaacgtcttgttttggtggaacttgactgccaactcaccatgtgcctttatcagtccccttttcagcctagagctgtcaggaaattgaagatgcatgtctaacaaaggttctgggcttcccagatttaggagtctcatgcggaaaggaagcagcaggtgtgggattctgagtactggtgcgttgttgaccatatgcccagtgtagctgaagaggcatgttgtctctgcagctcttcactgtgacattttgatattttttgagcaatgtcccggcagttatatttatctagtatgttttcccgggaattttcaaggtaaacatattcagagttatattaacagaattgcttttatttccctttcaaactacattttagaatctgtttagttgtatctgcttgtgtgtcatcccccaccatggtgctcagggccacatttctccccctccctttcacatggtcgtcggggaccacaggtgcacagaattgagttgatcacgttcttgaaactgtgacacgctatgattgtctgtgcgaggtccttgtttcttgaattttgttttttctcctttgccccattcccaattccatggtccatccctcttccagcactcactcaggtatatagtatatttaatatacattcttcggtctgctttccgtgtgctattaaacacacacacacgttggtgttttatgttaatctaatttttctttttttcatttaacattgtgtttttgagatactcatgtttctgtgtgtaaacctagtttatttattctggctctcctatgtagtatgctgtcacattttatgtatctatttccctaacaatggcccatctagactgctgtcagctgcaatcataaatgatactgcagtaaacattcttgtcaacttcagttctgtgtaagaatttcaggtttatacttcagaattcctaggccactgagcatgtgcatatttatatttagtttcacagaacttcagctctgagagatgtgtgctatcagattacactcctgttagagtacatgatacagcaggaaatttcattcattacttagaaaaaaagaacatgttatgaatgtaattccttgatccaggctttggttctgtgagaagaaagttcctataaacgaatttttagtcattatcaaaagcctttactcttcaatatcattctttcttttctcctttttcttttctttgtgttaggtagcaatagggatcacagatagttttttttacagggtgtctctgtaacacctgtgtaattgtgacaatattatgaaaatacgatcatgtgtaacgatggggatatggtgtgagaaatgtatcgttaggccatttcgtcattgtgcatgcgaacatcagagcgttcttacataaacctaggtggtagagcctactgcacacctaggctagatggtagagcctgttgctcgaaggccacaaacctatacagcatgttcctgtattttctaggcaatcgtaacacaggaataagtgtgcatctgaacatatctaaacgtaagaaaggtacagctaaaaatacggtgtaaaggataaagacgcacctgtgtagggcagctccatcgtaatgtgataggaccatcatgttgcggcctgtcattgactgaagtgtcattatgtggtgcatgactactataaatactaagatttttgtttttcattttatagggcgccaatgcttcggcattagagaaagagattggtccagaacagtttccggtcaatgagcactattttggattagtcaatgtaagtatccattgatacgcttttagaatcatgttcggaagcagttttaaaaacgatgaatgcattccataagttattaaaggaaaattgttcttttctattaatagaattaaatgctaagagacttgattgggaattttgaaatgatctttaagggaagggaaacaaagttgcctgacatcttttttttttttttttttttttgagacagcgtcttgctctgtcgcccaggctggagtgcagtggcgcgatctcggctcactgcaacgtctgcctcccgggttcacgccattctcctgcctcagcctcccgagtagctgggactacaggcgcctgccaccatgcctgactaattttttgtatttttagtagagacagggtttcaccgtgttagccaggatggtctcgatctcctgacctcatgatccgccaacctcagcctcctaaagtgctgggattagaggcgtgagccaccacacccagccagttgcctgacatcttaaaatcttggagatagatagtttctaacttgtcaatctgatcatccctattttgtcagaaatttctcatagccaaaatttagtattaatatatagcctagtctaagtgatctcttgattctttgagaatgatttacttgattaaatggtacaaatgtacaagtatacatttagctgtgcaaatgcctccatgtgtctgtggggtatttgacaatttacttctctcattgtaccagtgctagagatataaaagtgtgaaatgtgggggaaaagcacatcccagttcttatggaggtaattctagtaattacacgtttttaaaactttgggaaaatttgagaagttttacctgaatgttacctgttctgagtcactggggagtatcacaaacttgtgctatataattgttgtggtagtttattttatactgttgtactgtactattaggtgaatccatggcaggtgttttaaaacgcatatattgataaaataggtaacacagtaagttatattgaacagattggtggactctaaatattagtccctacataggacatattagatgggtttctcatggatttgaggaaagcggttgaagtgatgtgtgtgattccctgtgctttgggaatgtctctgtgcactatgcataaaacctataacaaagaatcagcactcccttacctttctctctctccagaacaggctactcattactcctctcacttatttttttctggaatttagccttatattctaatttaaaaaacagcatttcagttagaattctcaacaataaaattaagacaagcaggagagaaacttactaagagaccatcagaggacgctttgtctttatcccctggagagattcatttgatcagtagaaatataagcttctggtctctgtgtcttgttattatatataaaattaacatatctacaggggccacagctccaactattaaaggttggtgaacattgtgaattatgctcagaaataaaactgtggtcagagtagatgcagcagagctagtagagtggttaattccatgcagcaggctggagtgtggtggtgccatcacagctcactgcagccttcacctcctgggctcaggcaatcctgccttagcctcccgagtagctgggaccacaggcacacaccaccatgcctgtctaatttttaaaaaatttatttgtagagatgggatcttgctatattgctcaagtttgttttttttttttttttaaaaatggagaggaggaaaatacccacagattaacctagcagaaaattaaacagagtagttgctcttagtgctttaatgacaacctgttttctgttactttcagttgcagatatttttgtctcagaagaatattgtcacagataatggctcttatggcagcttactcttaattacctgtcactataatttgtataatacatagaatgaggatttcctctcagcttatctcctgtagatacaatgctattcctgatattattggaagtagagaggagaaatactagtgtagcttgaggacctttggatggggaaaggagcctttggaagctttcttttgctgtaaagtatcccacttacaggccagctgttagatagtcagcaaaattcttagataacaagttgttttaacctgataaattgccttttttccttttatattgtagctggttagtacttattttagtagagctgatagagagtgatttaaaccacaatttagtgtatctttcttacttgtaatatagtctgtgcatttttttgaatagcttttttttcattgttttattgtatggttctttattaattttctaatacaggtaggcctcaacacacaagtagcctggcctcagtaagtccatttgtgagggtactgtgaaatatgcttttcctgtcttctaaggttttaggttgtttgttttaaaaataacaaaaaaagaaatgtgctttcccttcagaatctttattataaaattatgattgcatttctaatctgtcatataaaaagctatttaacctgaattgctactagtcattagttggagcagggtccattatagaaataaataaaaatgaaactttccatttttgggttataaagttcattaggcaaatgtctcttggttctcttttcttttgtattgatttcattctcattcagtttctcctcatctgatggccataggttacttgaggtttacattgttggagagtccagaaaatatccatatcaaacctgggaaaagagctctggcccaggtcctctgcctagactgtaccaagcgtccagccctgttttaggggctgtaaaagggctttgattgataacacgacagtaatttgcatagagaagagaaagcagttcctacaaggaagcatggggcagtggagtaagaacatagggtgaggaactgacgtccattggagtatgaaaagatgacttctgggtgaggtactcaatgtctggtctactctgctggagtaagaagcgtggtgggtagggggatgtggaaatacaatgttctaaaatgtcacctaaacaagaactggttggtgcaagagggcattcccttagaacatcttagcatgttcacagaacaggcaccatcacccaggcccagcatgggggacagggaagaagttgtgcttcttcaaaaacggttccttttcaacatttttattttttatttgtctgggttttttgtttgtttgtttgtttgtttttgtttttgttttgagaaagggtcttgctctgtcacccaggctggagtgcagtgagtgatcatggctcactgcagtttcgcctccctggctcactgcagcttcaccttcttggctcaagccgtcctcctgcctttacctcctgagtagctgggactacaggtgcacaccaccatgctcagctaattttttaaggtttttgtagagatggggtctcactatattgcccatgctggtgttgaatccctggtctcaagcgatcctcctgcctcagcctcccaaagtgctgggattacaggcatgagccattgtgcctagcctcagtatttaaacaaagtaatgctattgacattatggtggttaaaactagtagtctccaaatgaagtgtgtaagatgatccattgggaataggaagaaaatattagcatttctgatgtttatttttatctaaaaatggtagactaagcattattcttaacatatggatgagactggtgcctatactctatctgtatatgatatggttgtatgttatttcaagttccatgatgtcaaagggttgatggcatcatctctctcatttgtttctgctgtggcagatctattataatttaaatgtagttttagagaattatatgattgaattttagttaacttaaaaggttgttttaaaagttattattggctggccacagtggctcatgcttttaatcccagcactttgggaggccaagacgagaggattgctttgagcccagaaatctgagaccagcctgggcaacagagtgagaccctgtctcttaaaaaaaaaaaaatgctgggagcattttgcatgcctgagtgcctgaggtcccagttactccacagactgaggtgggaggatcttgagtccaggaggttgaggctgcagtgagccatgatcataccactgcaccccagcctgggtgacagtaagacactgtctcaggaaaaaaaaaaaaaaagtagctatgaaatgatgaagggccagtaactgttctgagtgttttatgtgatgattcatttaattatttaagaaattctaagaggtaggtgctgtattaccccctttttgcaggtgaagaaactggtaaacaacagtttagtaatttcccaaggtcagatagtggaaccagacttgaacctagacagtttggtttcagatcttatgtgcttcattactgtgctgtggggctctcaaggcaggcatttcctaaatgtattcaaactaatttggtagataagactacaaattggataccatgatttaaaaagtaaaggtaggtagtgagactctcattcccttgcacctatgtatctttaggaaggtatctttttcagttttgatagccattaaaaccacatatccaaataactgaacatcacagactatcaaattgctgttttaaaatctaaagcctttacaaaaatactcaatctcattgctctcacttaagactaataatttttcatgaaaataatagtgtgtaataaataagacaaacatctaaaatgtgcattttcttaattgcattcctttacatttttaatatacatagtatgtataatttataaatgtgtaagggatgtgcgctcaaaatggtcttagtagtaggtatataaaaaatacttgcggtgggatgtttgttaaggtttggagaagaaggcattagagaaagctctttgaaagcaagaatgagattgtattcactaagcaatcaaaaaatcaatgatcagacctcgagtagggtggcaacttttaaaatttcttctccctaatttaaacctacctttgattttcaaaaccagctgagataacacagcatagatttcagcactaaagcaatgtttttttgttttttaagaaattgagcattcacaaacaagaatatagagaaaatcatcccagaaaaccttttgcatgaaggctctactcttgaaagataatttttaggtcttaggaccttgaatgaaagttaatattaaaaatcaagaaaattgaaggaaaagtttcaaaattattaaaaagattgaaagtcagcttattctggagaaagagtagtattttcaaccttttaatttttctttaatgggattgatgaaagtaaataaaagaagactaatggcaggcctcagagaattgattataatattactgttgctttatattcagaagatgagcaagtcatgttggacagaagtgtgagcctgacttccagtagtctacaaaatagagactccctctagttttttagcctatcctatttgcttctcatattttttatagataggtcaatcctcattatcataatatttctggtatacttggagatgatctcttttgctttcatctccctgctcggtggaagttgttcaattcccctgttgcctattccaaaatatggagattgtatcttctcttcaattgatataaccagatttgttggtcgttagcttgattagattgtagtacaaatacaattttaaagacagatttatactggatactgggtaaattaatcttagtaacattcagttgtacttaacccctgggtagggttcattgaagtgtatctgtagttacatttatgatcattgatatcagtacgctttaatcacatacctcttaagcttaagcgcctctttttctgaaaccagtgcttgtctcctactagcagtgtagatatgagaagtcattgtcctcactaggtctcaggtcctcagctggagaggggttggatctcacaagcctcttcaaaaagttggtaactcctgtttcagtggggcagagggatcttatttgtttaatctctgtggaaaaaaagaaacatattcagacaattaggagattgaacatagcagagctttgttttatcccctcaaattattggctctgcctagtgtctgtcttccctatgaacttatctggttaggtcctttatttgcaatgattgtgacacataatgacatgattatacaatttacctcaaagattaaacacctcctttgaaaagctagagtaggagaggtaaatataatgaatcactatgaacccatcaacctagcttgaacaattaccaatattttccttctcttccacttatccttttttttttttttttttttttaacctggaaaaggaaatcctagtcatcatggcattttggccataaatgggacacgtttaattacatgtctcaaagtggcaggaacgttttaaaaaatatgatcacctaatgatcacacctaacaaagtcaacaatttcttaatatcatccaatgcagtggtattggattgattcaagtatcttcttttgtctcaaagatgacttttttttttttttttttggagacagagtctcactctgtcgcccaggctggagtgcaatggcggcaccatctcggctcactgcaacctcagcctcccgtgttccagcgattctcctgtctcagcctcccgagtagctgggattacaggagtaaaacgcccggctagtttttgtatttttagtagagacggggtttcaccatgttggccaggctggtcttgagctcctgaccttaatccacccacctcggcctcccaaagtgctgggattacaggcttgagccactgcgcccagccaaagatgactttttatagttggtttgtaaatcaggatctaagtaaactccagcatttacatttgcaatttgattgttgtgtctcttgagtccttttcaaccttttttcaagtcatcaatttgtggagaaactaggtcatctgtcctagagactattcccatttcaaacttggccttttccttctttgtggtattgtctctttcattgcctgactgttgactgtcttgtaaattagtagttacacgtagagacatgattaaagtttagtgattttgcttaaggcaagaatacttcataggaggtaagatatattaaaagacacacaatattcagttgttcacttgagcaatgctgaaatcgctggggtgtttaggtctgttcactctgttttaaacatccccatcaacttttaacctaatgctttgagcatccattgataattattgcttaatccattatttacaaccatttcttctgattttattcactggacttattttataaacagaaacttccttcatcaactgtttagtgcccctgaaatatggttcttataagaaaggcaagatgaatcttgaatgtttttccttttatatattagtttgcaattgtcaatggagactaaagagggctgctttttaaaaaaatgtcattatgtgtatatacacacacacacacatatgtatctttttttgtggagaaagtctcattctgtcgcccaagcccgagtacagtggtaccatcttggctcactgcaacctctgcctctaccaccccagcttcctgagtagctgggattataggtgcgtgccaccacacccggctaatttttgtaatttcagttagagacagggtttcaccatgttggccaggctagtcttaaactcctgaccgcaactgatccacctgccttggcctcccaaagtgctgggattacaggcatgagccattgtacccagcctaaaatgtcattttaaatttatgaatttttgtatagttggtgtgttttggtccattgcagtaatccttttgtattaaagttgacacttatatttaagatatcccaggctaatcttgcacattgtacatttctttttttttttttatgctttaagttttagggtacatgtgcacaatgtgcaggttagctacatatgtatacatgtgccatgctggtgtgctgcacccattaactcctcatttagcattaggtatatctcctaatgctatccctcccctctccccccaccccacaacagtcctcagagtgtgatgttccccttcctttgtccatgtgttctcattgttcaattcccatctatgagtaagaacatgcggtgtttggttttttgtccttgcgatagtttcctgagaatgatgatttccaatttcatccatgtccctacaaaggacatgaactcatcattttttatggctgcatagtattccatggtgtatatgtgccacattttcttaatccaatctatcattgttggacatttgggttggttccaagtctttgctattgtgaatagtgccgcaataaacatatgtgtgcatgtgtctttatagcagcatgatttgtagtcctttgggtatatacccagtaatgggatggctgggtcaaatggtatttctagttctagatccctgaggaatcaccacactgacttccacaatggttgaactagtttacagtcccaccaacagtgtaaaagtgttcctatttctccacatcctctccagcacctgttgtttcctgactttttaatgattgccattccaactggtgtgagatggtatctcattgtggttttgatttgcatttctctgatggccagtgatgatgagcattttttcatgtgtcttttggctgcataaatgtcttcttttgagaaggcacattgtacatttcttatcgcagatcttgtatcagccatatcttcaaggtgtccgagttcttttggatgggaaaagggtgtttagagaacacaatctgggtataggagaaacttgttgctgccacaccttttcagtggacagaatttgaaaacacgtacacacaaacatgcatgcatgcacacagacatacattttcagagttataagtttatgttgatatttctaactgaagtttacaaggcttttatttttctgatttttattatagcatctttttttcctttacattaaaaattttggttcctaagggtattaacataattccttgtttgctttgtcctatgatatagctacaatagtttcaaaataacaatatcaataaatttgttttttttgtttgtttgtttttgagacagagtctcactttgtcatccaagccggagtgcagtggtgcgatcttggctcactgcagcctccgcctcccaggttcaagcgattctcatacctcagcctcctgagtagttggaatcacaggcatgtgtcatcatgcctagctaatttttgtatttttagtagagatggggtttcaccatgttgatcaagttggtctcgaacttctaacctcaagtgatccgcctgcctcggcctcccaaagtgctgggattacaggtgtgagccactgcgtctggccagtagattttttgttgttgctgtttttgttttttaaaatgattagactatatctcattaggcatgtatggtaaacattctttaagtcacctgaaataattaatttctctttatttctaccattaaatccatatacatttaggttttgtttatttttgtttttaattttagacatttcttttttattttagaaaagatagggggtacaaagtaaatgttttataacaacattctttcagagaagtctcattttcatccatctctccattatttttcctcttctcctataaacatttttgttagctttttgtttatccttcctcatttttttaaaaaaaataaatggtctatggacatacatttgatatcacccaatcttaaacatttttctctgcctagcctttttaacctaatactgtatatacttgatttcaccccatagtagaaatatgagaattatcctcattccttttttatagtttcatagtgctccccaaatcttcatgactgacttttagctgttttatagcttttagagccagtgtttattaatggaagggaaaaggaaggcaatacatatttatgaaactgtgtgtcatttactttataaagtaggtttatttccccgcccgccccctcccccgtctcgccccaattactagagtggagaggagtagagttcagtaagatgtagtgacataccccaatgacatggctggtaagagagaaattcatagttaaggatttgatgtctttccaatacatcatgaatactgtgacttggcatttcagtggttgctagactgtcatactggtgactttttcatgtaacgtttcaggggatcttgttttttttattttttgtttttgtgtgttttaatttggatgtacctaagaacctgatagaaaactttacttttgtgatttccaaagaatttttgagagttgtattttaaaatgtataatataatgcagtcagtgttatagtaacagtagtaaccgattgtcatctctttctgttctcaaccatataccgggaatttctctcttgaaaatgtgttgccctaaatttaacaaaacttttttttttctgttgcagtttgggaatacctgctactgcaattcagttcttcaagcactttatttttgtcgtccatttcgggaaaaagttcttgcgtataagagtcaacctaggaaaaaggagagccttcttacatgcttagcagatctcttccatagcatagccactcagaagaaaaaggttggagtaataccccctaagaagttcatcacaagattacggaaagaaaatggtaattctacttcccactgtattaatgacatactaggaaggttaaatatagtgtgccataattccagcacttactgagcatcatctgtatgcctgataacatgttagctgttgaagaaacaaggatgacacgcctttcttcaaagaggcactcgtttagtgaaggagatagtcttacagtaattaatacaagatacggttaatgtttgcattgcgttatacagtgataaaattctgtgtggcagcaaatgagaaatcacagtttctctttttgcttgcttggcttttctgtcaagaatgaagggtttttgtttctttttttttgcatgcttatgcatttgttttcataatgctttcatgtgtgttaactcattggatccttgcagtagccttagatagagagcatgtcatttcccccattttagccgtgaaaaatcaaaacctaaaaaaggcttgccaggagccacactccggggaaggagctagaaaagaccttttggcttagggtagataagttttaatcccccaacccctttttaaaatagttactgagtaagccccacctcccttttcttttttgaaatattgttcatttaattttcacatgccaataagttggacattatcaccctatgaaataactgaggctcagagaggttaattcgtccaaggtcccacagagttagtaagtggtggagctggtatacaaacttacttctccctgatatgtaagcccagtgttctatctaatgtgggacactgcctcaaaaattcaaatggaatttagataacatgtagaattctggcttttgtttaatgtaggcattttaatcattgtagaaagaaaattgaatggcatttttagttgatttgttacctattaagtagacgctcacaagcaggatttgggaagtcattaagatggattattaaataccctattgcgtaatcctgcctttaaattagtcagttgacactgtacacagtgaattgaggtaagcctggatcatatctagttcgctgaaatataagatgacccagaaataggctataggctattattcttgaatttgatacatttgttgaagatttgttcatattccccacatacacatgtagaataatttgattaattgctcataaaaatacatcttgtttcccctaatgaaagctaaacgtatgtactttattagattatagatctgtttatcttgtttttttagaaaatcaaatataaccttaatgctcaaatgtggattgagcagttaagtcttctcagtctttttgtgtgtgtctgtacaaaactttaaaagttttgtccttgtggaaaatttatgtatttggtaattgaacatggcaccctttctcagtgactttattagtattttaaaaatgttcagtgactggacacggtggctcacacctataatcccagcactttgggaggccaaggtaggtggactgcttgagcccaagagtttgagactagcctcagcagcaaagcaagaccttgtctcacaaaaaattttaaaaattaatcggatgtggtggtgcacatctgtagtcccagctacttggaaggctaaggtggcaggatcgcttgagcccaggaggttgaagctgcagtgagccctgattgcgccactctccagcttgggtaacagagcaagaccctgtctctaaaaaaaaagagttcagaagtatgcagctcatacagagcatacattatttcccttttcatttaatagtacatttctcttggccttattaacctatcacatgggctctttatacaatgatgttatcttagttagattgaccctcatgctgaacagaggtaaaatacagttacatacttatggctttatatgtttgtttgtcaaacctggggtatttttacagtgttcgttattttttccaaatgggctttttttcttttttcatctctttctctctctgtctctctctctttttttttttttttttggtagagatggggtctcattatgttgcccagactagtcttgaactcctggcctcaaatgacccacctcagtctcccaaagtgttggattacaggcatgagccactgtgtctggccttattattattattattattattttttttttttttttttgatagttcaatagttactaattctttttgtatttaggcagattgaattggtaacacaatagagttcttaaatacttctttgaaagagactgattctagaataaatattctaagcccatcttctcataagttttgcttcatttttctaaacttcagaaataatgcttaatagaaaagccatttttttaatagaaaagcatttttattatttgatgttgctgacatttgcaaatatgttttgaaatatatttttggcttttgaattttcccttgagaattgtgtagagaagaatatacaaatcaaagaggatttaatatattattcattgcatatctttccttctgagattttgtttgttttaaatctttggaaagtatgttactcatttcagtatttccactgactttcactggtagatggttcttactaaattaatttcctgccatactatgttaaaaattttattctcaatagatattagccccatattgttttaaccaccattgctttatgttactaatctttttgatggtcctggaaagaactgattttaatttctatttattaatgaatttttgtttttacagttttaactcatgttacctaatcatagcataagaggactgttgcacagtgctcctgcatagagtacagcaacactggctccatgcatgttacctgctgatgggatggatgctagctgagtgtttgagtagactaatcatgatagatatatttcctgttgtgtgccagacactgtttaggaactgatgatacagaaatatgccttcaggtacctgacaccctcgtggggaagcagacagccatcaattgtgtgatgtaatgtgtcactgtcacgaaaaaaagaagactgggaaaggggacagaggatgagggagttgctagttcatatgtcagtcattgggaaatgtccctgattaggtaatgttagatcagaaatttgaagacatcattttaagatctgaggcaaaaatgttaccatcagtaggaagaaagtgcaggttgcctgagtgcttgaaggatggaaagaaaattagcatggcaagagtggaataagatgaagataaagtcagaagaacaggggcctaaagcttgggttttatttggaaagccatgggaaaccacgagagggttctgagcaggtgggtgatacgttctgatttgtttgagaagaccctttggctgctgggtgggcctgggcagcatgagagtagaggcaggagaccagcctggaggctgttgcagtacccaggtaggaaatggagtcctctctttacaggtactgcctgtgggtgatctactattattttggaagaaatacaacataggatggtgatctgattgtgttagctagagttgaccctcaactggactgtttgggatcattttaggtgggcctgagggccacatcagctggcatctgtagttgtgtgctctgactcactgaaccttagcagtgtcagtcatttcagttattgtttgggggcagatctacttttctgtcatcatcttagttgtttcaatccctattgtccattcattcattcattcattcattcattcgttcattcaaaaatgggaaatacatctcattatgtggcaggcacggttgtcagtcctagggatgagatagaaagggtccttgttcttaaggaacctgcatggacaagcagcgtttcatgtgccgtggagagatacaaaaacagataaatttaagtcttggtctccctcaagtgaggaaattttagttgttcacaaataatacctgttaaatatatttgagtaaataatttcttatgtttatttcaaacaattctttttctccaaaagagcataaatggtattttgtgtaatgagagcttatagctatttctgaattatgaggagaacataacctatttttaagcagtgtttttcatttttttttgcattattgttgcagctatatcaggactatagtagtttataatcatacatttatttaataatgaaattgtctgtctctcccactagactgtcagttccatgacggagggaacccatttgtttttgctcaccattgtattcccagcacataatccagttcctggcacatagtaggtgcttactaaatatttattgaatgagtgaatgaatgaatgaaattgtttaacttccaaagcaagtttgaagtccacctttcccatcatgctacttagcaaagaagaaagcaaaccataagaaaaccagggttttaaaaattaaatataatacagttcacagggattgtcctgaggtcattcatcagtgttattttgatgtttatacagtcctggttgacgcttttaaaactataatggctgctttcacatacagcaaaattctggcatattcagtatactctaaggaaaatggactacaaataatcttagaaatatttcaacaaaagtttaaagattatttttttggtttactttgcctctcatttccagagcattcaagtcattggaggtatttttgtgaatatgaaatcattgctctgtgttaaaagagcatccagaaaaagatgtacatttttaaaaagcaaaaacatttgcacatttttgcttaaaaagtaattattttgaaaaacatgtatatgctaaaattcttttcaacagggagaaattaggctacttcagattgtggcatcaagccaatatgtagttagccgctgtagggaattattcatctctaaccttaactaggtcctcagcagtgtttataaaatctttttactagttctccctgattattcttctttttagattcctctaggacttttccagttggtttccaacttttcttcagcccctcaactcaactttagcataattatcttccactccttgccttagtggacctgtttgaggtgggtggttccagatttgtgacccggaaatgggtgggtgagtgagagataaaggttcttgaattgtacgggattgaggtgcatgcacgtcaggaagctgcctagacactgacatgtcaaggttggtgcaggaggcaaagtggagagagaaactgaatcaggccatcagtggatgaggaggagggagatgacctcagagagaggagggttgagggtcatagtatggctgtatcttgggcacttttgtgattgagagcaagtagcagtaggaaactagaaaatgccaaaggttgataaggcgagggagtttgtttagaacagaatggaggacctagaatgagcaacttagaaagggttgggaacaaagaaaatcccaaggatgagaaaggaaataaggtgcaataagcaaatgagagtagtagaggataggagattgaggctgagaggggaaatggttattattttcagggacggaggattattgcattgaagggcaaggttagataatttgcttcagttagcttagctgtggtctagacttttccaattggtggaaccacgcaaggttctatgcatgacttggcccggcctcggagggatggagtggactgctgagaagatttttgagttgcaggctgtctcagtgttgagagaggttgcatagacttctactctgagcagggagaggggaatggtgtcccagtgctttagatctactatctcttgtggacaaaaacccacacacagtgtaccaaattcaagattagttgttaagtccatgtaggctagtacggagctcttagaactcatgacttttattgtttttaaacataacatggggattttgctaaaggctaatgggtccctcaggctaaacttacagcagagaagtgaactgtggcttcagttgcattcttaatattattgtatttgatttgagacccaaatttgtggaatggatttggatatatgaaaataactaaataatgaacgtgaaaaaaattattgtgaattttaccatgtaatgcaagagatatcagggaaaattcctagggagaaagattcagggtctataaattaaacttgtctatttgcagtgtgaaactgaaggaaaggagacttagtgggttaagtgaagggaggtgacttgaactaggtagatttaaatggaaatggaacagactagacatgcaggaaatgaactttaaaaattgaaagggtttgggaagtaattgtttatgaagaatatgcaatagacaggcagattgcttgagcctaggagttcaagatcagcctggacaacatagcgagacccccatctcttaaaaaaataaaggaatgtgtaacaggcagtgacagggagcgaggaagtggactttttgtatggaaagctctatgttatttttaagcatgcaaataatacatgcatacattcttacaataacatttcagtaccaaacaaacctagaagtttccctgagtgctctctgcttccttcccagctcctcaatctcgtcttcctttgaaataccttgatgctaccaaaaacccttttctatgcacttaaatatatatgtccaaataggaagccacagttacattttatgggaactatttttagtggagatggggtttcaccatgttggtcaggctggtcttgaactcctgacctcaggtgatctgcccccctcagactcacaaagtgctgggattacagacatgagccactgcttccagccggttgtttgtttttcatgagtgggatccacatgtgttcagcatccttgtttcactttctgttttggaagttttgccatgttaattcaatggaactgtttccattttaaccgttgcccagcattccctaacaaaattatagcataatttaaataaatcattctcctgttgataaacatttaggatattttcagacttctgctgttataaataagcagccgtatttatgcttgttttggtacatgcacagatacttacctggcatcgatacctgggagaactaggttgcattattttaaatctgttaccaaaattgcctttacaacgtgccataccagtttatactcccagcagcaacagttgagaatgtccatttctccatactcaagctaacactggatggaaactaagtcaatttttattttgccaaagtgatgggcaaaatgatattttgtcattgttttaattgttatttcccagtcccttgtcatgtattatttaggcatttgtatttctactctgaattggctattttcctttgccagtttttaaaattttttttcttgttttgtaaagggttttttttttaaatattctgtatattaaacctttacatagtctggatattaatatgcaaataattatccttgttcgtcacttgtcttcatttatgttgactttgccatacagaagttcatagtttttacatagtcagtctttgatgtgttttgtattctgttcagtagcaacaacaattatataggttgagcatccgtaatccagaaatctgaaactttttgagctgcatgatgccacatggggtggctgaggtagtaacaactttactttctgatggttcagtgtacacaaatttacttccctgcacaaagtttttaaaaatactatatgaagttgcactccatcctgggcaacaagagcaaaactccatctcaaaaaaaaaaaaaaaaagtactatataaagttacctccaggctataaggtgtatatgaaacaaatgaatttcatgtttagatttgagtcacatccccaaaatatctcattatgtgtatgaaaatattctcaaatctgaagcagtctgaagtcccaaccactgctggtcccaagcattttagataaaggatattcaacatgtagtgatattgccaatattgttactgtggttgttgttgaacagaatacaaaacctattgttgtattctaagcacttttaatcttcctcccagccttgtgaggtacaggtactgctgtgagccccatttttcagatgaggaattatggaacagggagcttgaataagttgcctatgccacgcgtgcagttagaagtagaaccatagcaccaacccagacagccttgctctagcagctgtgccctcctacccccataaaaagcgtcactcattccctttctgtttttacaatgactttgcaaagaaagatggtattctgttttgttgttgttgtttttgagatggagttttgctcttgttgcccaggctggagtgcaatggcgcaatctcggctcactgcaacctctacctcccgggttcaagcgattcttctgcctcagcttcccaagtagctgggattacaggcatgtgccaccatgcccagtgaattttttgtatttagtagagacggactttcaccatgttggccaggctggtctcaaactctttacctcaggtgatccacctgccttggcctcccagagtgctggattataggcatgagccactgcgcttggcctgctttttttttttttttaaacttactatgggattgaacattttctcatgttttttagccttttgattgtttttttcttataaattgattgccatttataagattgcccagtttggttttcttttatatgagatttgcttttatatgttgaaaatgttaataattttcaggtttcactttttttaaaacttttttaaagatttctaatacatagaacttaattttatgtagtcatatctgtatctcttctaaaatgtaattgttaatttgttttatcttagactttccctaaatttttttctaaatttgtatgcattcatttttaaaatgtaaaatctttctggaacttattaaatgtacattgaggatctaaaaataaaatgtcctaaataggtaatttttctcaatgcattttattgaccaattcatgtatgttcttgtgtgtgggcttatactgggcattactttgtgtgtggcatggtggagtcaggctgcccagtttgaatcctggctctgccatttcttggcagtgtgactgtactctgtctcgtcccattttcatgtttacaaataaagttaataacaatattacatggttgttggggatcaaatgagatactgcctctaaagtccttactgttctatggtagagttgtatattgccaagcacagggtaaagcacgcttgatgttagcaccaccaatatttcagttatatttactcatttgtgtaactgcagggaacgttttgtggaattataaagtctcacatttggaagggacttgagattatctggattatatagataattcttgataacatgattcttaaacctgactctacatcagagttagttggaggagctttgaaaagccccacgttctgggcttaccccttatcaactaaatcagaatccctgggatgtatggttcagtaatttatttttgataaactttgtgggtctaaagcagttggcttggcattggcaaatggttgtccaacttctgctttaaagcttgccaagttgaaatatttgtggaataataagtcaggtaagctaataagcaatttcttcttaaattctcagtatctgttatgccaatatataaggataggttttgcccttttctcaggatcaattagtagtatttttaaacaagattttaattaattttacattttccccaaatacagataaaagttttagatgcgaaagttatttgttatacattacaaaaacattgtgcatttatattttagttctgatccaatactagatattcttttataaattggttttttatgaagttatgaattctgaaataattctctaatataatgtttttattttcagagctttttgacaactacatgcaacaagatgcccatgaattcttaaattacctactaaatacaattgctgatattttacaagaagagagaaagcaggaaaaacaaaatggtcgtttacctaatggtaatattgataatgaaaataataacagcacaccagacccaacgtgggttcatgagatttttcagggaacattaactaatgaaaccagatgtcttacttgtgaaactgtaagtatatcatacaattttgtatagagaaaaattgaattactatgttaaaggttgttctttgagaaagacagaatggaagatgaacttgaaagttgtaattcttaggtataggagttaaagatgtatttttcagttaaaaggaatctgtctgtattcttaatgtaatgttgcttattgacaatgaatacctgaggtgatagaaagatacttactgtagcttgaactgtttgattttctttcagtttaggaggccatagaaccatgttgtggaaattatgtcttatgacataatctcataggatcatacagatcagggaggcatattaattcgtttttcctttttctacgattacctttagtatccattgttgggataaaaactaaagcatacagtgtaccctcaaggaggggaaaaaatcccacttgctggacactttgtaaagatgaagcttgaaaattgttacacccaggctggagtgcagtggcccaatctcagctcactgtagcctcgacttcctgggctcaagcaatccttccatctaagcctcataagtagcaaggaccacgagcacgtgccaccacacccagctaatttttaaatttttattttttgtagagacaggggtcttactgtgttgctcaggctggtcttgaactcctgggctcaagcagtctttccaccttggcctctcaaagttctgggattacaggtgtgagccattatgcccggccagtcatgttctttatagcattttccctattcagtacagaatccaatttagagggggacattgcatttagttgtttctttagccttctttaacctgaaacatttacatggtctttttttttttgagaatatgcctccctcacctttttaaaatcagatgttctcatatttagtttctctgatgtttcttcctaactagatgcaggttatgcattcatggctaataataatatatcattcatgttgtgtttttctcggggcatcacgtctgtaggcacacaatatccatctgcctctcattggtgaaattaattttggatcacccagtcaaggtggtggtgtttctccatttgatttatttatttggagacaggttcttgctctgtcgcccaggctttagtgcagtgacactgttatagatcattatagccccaagactcctgggctcaagtgatcctcctgcctcagccttctgagtaactaggactacagtgcatgccatcacccccagctagtttttaaacttttttgagacagagtcttgctgtgttacccaggctggtcttgaactcctgccctcaagtaacccacctgcctcagcctcccagagtgttgggattacagacatgatccaccgtgctgggccagtttctccactttatgatgacttttttttttttttttttaaatccccttgcaattagtaggcagtctgtggggagacacaaatacctccctcctcatcaaaatctcacccaagatttagcatgcatttatgattttgcctgatctcatctttactgtgacagttgtgctgctagtttttaataacattggaaaatagggtccacaagcaagaaagctaagagtcctgtaaagtctccatagttttgccttttccagaatattgtgtagttgaaatcatatagtatgcagcctgtttggattagcttcttccacttagcaatatgcatttaaggttcttccatgtctttttaaggcttgataacttatttcctttatttttggctgagcaacatttccactgtatggatgtgctgcagtttttaaagttcattcacttactgaaggacgtcttggttgcttccaagttttgccaattatgaataaagctgctataaacatttgtgtgcaggtttttgtgtggatgtgagtttttacttcctttgtgtaaatatcaaggagcaggatcactggattgtatggtaagagtatacttagtttgataagaaaccaacattctgtcttccacagtggctgtacgatttttccttcttaccagcagtgaatgagagttcttgtttctccacatccttgctgacatttggtgttgtcagttggattttggccattctaataagtgtgtagtgttatctcatgttaatttgcaaggccctaatgacatatgatgttgatcatctttttgtctgcttatttatcatctatatctctttagtgatgtgtccagatcttttgtccattttttaatcaggctgtttttctttgagtattgtcgaattttaagtgggtttttttttttcgggtataattttggctactagttcataatcaggtgggtctttggcaaatattttctcccagtccgtgacttgtttttcattcttttaacactgtttttggcagagtggaagttttttttttttgagatggagtttcgctctcgttgcccaggctggagcgcagtggctcaccgcaacctctgcctcctgggttcaagtggttctcttgtgtcagcctccctagtagccaggattacaggcacgcgccaccacgcccggctaattttgtaattttaatagagacagggtttctccatgttggtcaggctggtcttgaactcccgacctcaagtgatccacccaccttggcctcctaaagtgctggaattacaggcgtgagccaccgggcctggctggcagagcagaagtttttaatgttttaattatcagtttttaattttaataaagtccaactttttctttcatgcattatacttttggtgttgtatctaaaaagtcatcaataaactaaaggtcccttagaatttctcctatgttatctaggaattatatagtttttcattttatatttaagtctatgatcctttttgagttaatttctgtataaggtattagaaagtttattctgggttaatttttttgcatgtggatgtccatctgctccagcatcatttgtttaaaagacaattctttctctgttgaattgcctttgctcctttgtcaaagatgagttgactcttatttgtgtgagtgtatttctggtcactgtcttctgtcctgttggtccgtatatctgttctttccccactaccacactgtcttgattaccgtagctttagagtaagtcttaaagtcaggtagtctcagtcctctgactttgttcttcttcaatattttgttggctattctgggtcttttgcctctccatgtaaactttagaatcaagttcgtcgatatccacaaaataacttgctgggattttgataaggattttgctgaacctatagatgaagttgggaaaaaaatgatatcttgacaaagttgagtcttcttatctaagtacatgcactgtctccccttatttaccactttttttgctatctttcattggagtttggtagttcttcctcatatcaataccatgcgtgttttgttagatttatatttaagtattcattttggggggtgctaagcaccaactatgccaggtagaagatggtagaagatgagtaagacataagcctctgatcacaagatactcctatggtaatgaagactggcaaagcagtgttcaggcagttccagtacagtgtgttatcgtatgtgtatgcacaggatgccatgccagccagagaatagtagacctaacccaggtgggagtgggaaggatttggacaggtaaaggaccagcttcctggaggagctcatgcttgtattttagaaatgcaattggtaatgtctcaggtggtaggaagctggtgtctataacacccttttctggtgttctctatgagggttccttttcagtctcattccttggcttctctttttccattctttaaatgtgggtgttccccagggtttcattgtcggttgcttctcactctgaattgggaggatcatgatcatgttccattttattatcacatgtgctgatgagtctcaactccagatctccaccctagacttcttccctgagttttagactgggatctccccatattgtgcatgacatgacattaggacatattagtccaatagcagccagatgtctttacaaccactttgaaaagtggaatactgtcctacttgatgaccgcttggcaccaactcaatcgcaaatataaacgtagtaactcatgcacccaggtgatctagagcatccttgtgtctaggtttttacatgatcataaaaggaacatttcaaatgaagacccctgaggcagtgtctgaggacttcattttgaggaatacaaaattgattttgagaaacaccagactgtgtaacttttacttctctgtagcttacatgtaaattccagcctgatctggctagcctacctctgccatactatctcttgtcaccctacccacttttctacaaaattgatgtgttttccttaaacatatcatgtcctctttttttctctctgagttgtctgtgttccctcttctttttcaccagactttttgagactcaggtcagttatcttgtagtgttgctgtatcttccatcgtacagtggaatggcatcttacagaaggggtttcggtcctatggttagcttaatgttgaagtcagggaaagtcaaaatcaccattggaactcccttcaactgtctataaaatacactatgcacagtaccttggtttacgtatatttgcataaatacatactttgtatagtcacatgttgtatgacaacttactgagttgttcgatgaacaactctatgtgctaataataatcttgatgtattaaaatgggaaagcatttgcttaactgagtggagaggcacaggttgctgagtcagacgtatctcctgttgcacacgtaccttcaggatggacttgctgaaggaaatagctaggaagatttatgtctaaagttctgtcctattccagttcacatgagcaagtgataactttataagaagattatttacccataaatcaaacaaaactttatattaaatttttaggagaaataaagtcagtcacaaatgaagaatgtaatttaacattttgggctaaattttttttttaatgacaatacagatatcctgtcctgtgtgaagcatttttattcagtcttggcctatgtttttttaagaatcagtgtatatggtacagtttatttcatgctttaaaataacacaaagactttggaaagtcatgaactctcacatcatactagcctttgccagtgagagtcagtcaaaagtgtactttggtgttttatttatacatctggtaggggttatttattcagtgtccttttggataatccaaattaagtagttctcttttgaacttgagggaaaagaattgtttacttactgataataatagaatggcatttaattctgttaattgggaactgtggtttactagtatttgaaaaaatcaaagacaattcactgtttttacagataagcagcaaagatgaagattttttagacctttctgttgacgtggaacaaaatacatcaattactcactgcttaaggtatatgtagaattatttagtttgaaatttaataattatttttagtctggaatattttttaagatacatgatttcctggtatctacaaaataaatttgttttgaatttcacacaggggtttcagcaacacagaaactctgtgcagtgaatacaagtattactgtgaagagtgtcgcagcaaacaggaagcacacaaacggtaattttagagctttatggatttttaagtgattttattttttgtaattgatgttggaggtgggcttagaaaaacaatctaggaaaatttacattgagtaaaaattcttaattctatcactaacagttaatgttcattaagtattactaggtaaatgatattctactcaatgtttattttacaaaaactgtgtaccctgaagtgatttcctatgtctagcgattatttaatcatcataaaccagtacagttaaaatatttggctttgaggctttcctgatgatgtaaacttttttcttggtgaagagggttgagggagatagcactccccattgcccatcccccacacccccagtttctgcttttcctacataggatgttgtacattctcttagcatgttattgtaagactggtttggtatcaataaatggaataataaacatcatcatcatcgttacttcttattttgaaacagtctcaaactcagaaaagttgcatgaatagaccaagaaagcttttttaccctaaaccatttgaaaataagttactgatatgtacctcatggccccggcactttaataggtatttcccagcaacagggacgttttcctatgtgtgcacatccatccaaatccagaaagtaacactgacatgctactgttactgcaaaccttattttggtatcacaggatgtaccggtaatgtcctttatagaagaaggattctgtccagaatcccacattacatttagcattcggtctctttagtctttttcaatttggaaaagattctcagtcctttcttgacattaatgattcttgacttttgataatcataagttagttattttgtagaatgtcccttattggagtttgtctcgttttcctgtgattagattcaggttatgtatcttggacaggaatcttacagtgtttttctcatcatgtcctgttaagtagcatatgtgacttgatttgtgccatgtgttggagtatccccaagatcacttctaggacaggtgatttcctagaaggactcacagtgctcaacatccaagcgtgctcacagctaagatttattacagggacgggatacaaaacacagtcagcaaagagaaagccaggcaagcacccagaagtcagtgccccagtggagtcacaaaagactattaattcttcccacattgaattgtgacaacacaggaagctcattacagactgagtgccctgagtttttatttggggctagtcatgtaggtaccctctgcctaccatgcccccaaattccagactcccagaaagaaagcaagagttcagcataaactgtcttgtttgttcaaacaatttaggcacagcgagacacttattatttggcaaatggtgggaacatgtccaaaatccaagtttccagatgctaaaaaggaccatccatgcaagcacgccattttttttttttttttttttttttgagacggagtctcgctctgtcgcccaggctggagtgcagtggtgcgatctcggctcactgcaagctccgccttcccggattcacgccattctcctgcctcagcctcccgagtagctgggactacaggcgcccgccaccacgcccggctaattttttgtatttttagtagagacggggtttcactgtgttgggatggtcttgatctcctgacatcgtgatccgcctgcctcggcctcccagagagctgggattacaggcgtgagccactgcgcccggccgcaagcaggcctttctaaggatagtttgaggccatgtgaatccttttctgaacctcccattactgttcttggctgttattgaacatttgagtgaatgttccccagatgttttacagagttcttcacttaatctttattttttctcattgtaatttagaagtattttatgtggaagcattttgagattgtaaatatttcattcttcattgaactttcattttattcacttttaaaatcttacagtggacccaaaggttcctgttttattcagtggattgttatccattagcattcttacttccatgctcacattatctccagtctggccagggggagttcctccaagctggctcctctcttcttgatgtgcccagtcattctccagtatttctttcctttctgactcaagctgttcaggctcattttgctctttctttgcccctactctggaacaagccatttctccaaggagccctggtttctcttaggggaaaacaataaactaggaccttgtacagttgtgctcgttgctattgggatgtcattgttcttgagcccgcttagtgagcagagctagaggatagatgagtatttataaatacacacacacttttcacatctgcatttatttctcttctacgtctattgatctctttatctgtactgaaaaccgtgaatacacagtgataatcttgtagccaccaccacagtatttgtaattcctttttctgacagtacagttggctgctattatccttactagatttacttatttggtcattgcacctttaggtaacccagcttattctctctgccttcctgcccccgctccctgcatgcacacgagcgtgcgcgcacacacacacacacacatccctccccactatatttacttatttggtcggtgcaccttttgttaacccagcttattctctctgccttcctgcccccgctccctgtatgcacacacatgcataaacacacacacactctcacacacgcacacacacacacacacacacacagccccttcccctctgctttgacttccccctctcctgcctgtacagatgtctgtgttatttggccccatcaaatagttgaattgagttgttcattaagggaggggaagagctcagatttttaagtgattatatttttgttttggacacagacatttcctaggaaggaaagtgtttttggtaatggaccacggaatcaaaacagattactcactgtttctgtccattagtgcatatgatggggagcacctcaaagaagtttagtcagagggataggggctaaagcattacattcatcctgaaaatgccttagaaagtacctaagaccgttggataagtaagagtcagggactaaatgtagctaagagaaatacaactttcagactttactgactatatggaggaaggcccatctgtgagcaaaagccaccctttccctagaatgatggttatacaagtaatcacatgtgagtaattgagaattgtctgtaaaatcgagctctttgttttaaagacatgaaattttaatgtattagaaaatacatgaagaatgtatattctttgtaattaaattagaaaatacggataaatgtaaatcgagaatcactataaaagctataaaatgttaacatttttgtgtatatcttagatttttaaagtgtgtatgtatatacacacatagtccctaaaatgctatcaaactttatgtacaagttcgaaactttttcacttaaaaaattgcaaccatgttaatgaaaaaatatttttatatccttcttaggaggtgctgcattgtgtgtgtgtgtgtgtgtgtaattatatatatgtgtatgtatatgtatatgtgcatatatataaaatatatgtatatgtgcgcatatatatatatatatatatatatatatttttttttttttttttaaagagacaaaagatctctctctgtcacccaggctggagtccagtggtgcgatcttagctcactgtagcctcagactcctgggcttaaatgatcctcctacctcagccttctgtgtagctgggactacagatgtgtgccaccgtgcctgaataatttattgaattttattttttatagacgggctcttgctatgttgcctaggctcatctagatctcctggcctcaagcagtcctcctgcctcagcctctggtgtagctggaattacaggagctagatacgacgcctgctgcatagtatattttttttgtatgaacataccatagtaccatgtatctaccagttgtctaaatccaacaatttagattttttacactgttataaacagtgatttgatgaacagttttgtgtgtatatacacatattccccacatatttttggacactttgtaggataaattatgcataagtttctggaaagaaaactttacagaagttacatatttctcattaggatctagtatcaacctgttaatttatggtgtgatattgagcaattcatttaatatttttgacctttacttggatgaattcacttctgaaagtttatagttctcagtcttggaataataggataagcttgtgttgagtatacagaccatagttcttagtaaaaaaccaaaaatcaatttgacggccagatgcggtggctcacgcctgtaatcccagcactttgggaggccaaggtgggcagatcacctgaggtcaggagttcaagaccagcctggccaatatgctaaaaccccgtctctactgaaaatacaaaaattagccaggcgtggtggcacacatctgtaatcccagctactctggaggctaaggcaagagaattgcttgaacctgggaggcagggaggcagaggttgcagtgagctgagatggcgccactgcactccagcctgggcaacagagcgagactccatctcaaaaaaaaaagaaagaaagaaagaaaaaagaaaacattccatttataatactattagaaacaataaaatacttaggaataaacttacatggcagaagacttgtatattgaaaattataagatgttactgaaagaaattaagacacaaataaatagaaacacatcctgtattcatggatggaagacttaatattgttaaaatgtccatactacccaaagcaacctagagattcagtgcagtccctatcaaaattcctatggcattttctgcagaaatagaaaaaaacatccaaaaatccacatggaatcacagaagaccctaaatagttgaataatcttgagagaaaagaacaaagctggaggcattaaacttctgatttcaaagtatattacaaagctaaagtaattaaaatagtatggtactggcctaaagacatatatagaccagtggaacaaaatgacccagaaataaaaccatacatatacaggcaactgatcttcatcaagggtgctaagaatgaatacatagtgggaaaaggataatgtctttagcaaatggttttgggaaaactgaatatccacacgaaaaagaataaagttgaacccttaccttatgtcatctacaaaaaattagctcaaaatggatttaagacctaaaactatagaactcttttttttttttttttttttcatctcactgtctctccaggctggagtgcagtggcatgatcttggctcactgcaacctccagctcccgggttcaagcgattctcctgcctcagcctcctgagtagctgggactacaggtgtgcgccaccatgcccagctaatttttgtatttttagtagagacggggttacaccatgttggccaggatggtctcaatcttttgaccttgtgatctgcctgccttggcctcccaaagtgctgggattacaggcatgagccaccacacccagacaggaatttgtgtgtgtgtgtgtgtgtgtgtgtgtgtgtgtgtgtgtgtgtgtgtgtatgcaaacatggatttatgagtgacagacttcaagtgcatattttttttgtagttaaaaagataacaaaatgtataacctagtttgagaccagcctggccaacatggtgaaaccctgtctctactaaaaatacaaaatttagccaggcatggtggcaggcgcctgtaatctcagctacttgggaggctgaggcaggagaatcacttgaacctgggaggcagagcttgcagtgagccgagattgcgccattgcactccagcctgggtgacaagagtgagacttcatctcaaaaaaatatatatatatatatattctcccaaaaaggttcatcccgagaacactgaagaataatttttgggaatgttaatgatgtgccacaaaattagtattttatgatcaaatgaatttgctttataatattttatctaaatattcatgctcctgaagactcacaaaataaaggaaactttatccagctttttccagaatttacttgcacatagactccatttatatagcatgcctattgaactctgtaaatagtgcagttcaggaaagatagcagtgtgggaaatgtcactctaatggtcatatacgtttatcccatgggaggttaaagcatataggtgagaggagagtgatcgccctggggaactgtaatgagaaaggattgatggctgtttcagttgttgttttcctgtccctggctgctggcatgggggcaagggggaggctgaggctcaggtcttagagaacagaacattgcatttcacttcacagcaccttgcagaccctgtggtttttacagattgaaggtttgtggcaaccctctgttgagcaagtctatcagtgccatttttccaacagcatgtgtgcacatttcctgtctctgtcacatttttggtaattcttgcactatttcaaactttttcattattatattgttacggtgatacatgatcagttatcgttgatgttgctatggtaactgtcttgggagcaccatgaactgcacccatttaagatgatgaacttagccaggtgcagtgactcacacctgtaatcccagcactttgggaggccaaggtgggcagatcacctgaggtcaggagtttgagaccagcctgaccaacatggtgaaaccccatctctactaaaaatacaaaattagctggacgtggtggcgcatgcctataatcccagcaactcgggaggctgaggcaggagcatcacttgaacctgggaggcggaggttgcggtgagccgagatcacgccattgcactccagcctgggcaacaagagtgaaactctgtctcaaaaagaaaaagatgatgaacttaaatgttgtgcgttctgactgctccacccacctgacgttttccccctcctacctctctctcaggcctctttattccctaagacacaacaatattgaaattaggccaattaataaccttacaatggcttctaagggttcaagtgaaaagaaatatttacatgtctctcactttaagtgaaaagctagaaatgattaagcttaatgaatagggcacgttgaaagccaagataggctgaaagctaggcctcttgcaccaaacagccaagttaggagtgcaaagaaaaagtatttgaagagaattaaaagagctactctagtgaacccacaaatgataagaaagcaaaacagccttattgccaaatggagaagtttgagtggcctggttagaagatcaaactagccacaacattcccttaagccaaagcctaatctaaaaccagggcctgtcttcagttctatgaaggctgagagaggtaaggaagctgcagaagaaaattttgaagctagcaggggtgggttcatgaggttttaaggaaagaagctgtctccatgagataaaagtacaaggtgaagcagcagtaagttatctagattgtctagctaaaatagttgctgatggtggctacactaaacaacagattttcaatatagaggaaacagtcttctattggaaaaagagggtgtttaggactgtcatagctagagagaagtgagcgcccagcttcaaaggacaggctgattctctggttagcggttaatgcagctggtgacttttaagttgaagccagtattcatttaccatccctaaaatccttgagttcttaagaattacgctgaatctaccctgcctgtgctgtagaaaagaaacaaagcctggatgacagcacacctgtttatagcataatttactgaatattttaagctcactgttgagacctatcactcagaaacaaagatttctttcaaaatattactgcttattgacaatacatgtgatcacccaagagctctgatggagacgcacaaagagattaatgttgttttcatgcctgctaacataagatccattctgcagcccatgaatcaatgagttattttgactttcaattgttattatttaatattttttaagtctacagctgccatagattgagattcctctgatggatctgagcaaagtaaattgaaacccctctggaaaggattcaccattctgggtgccattagaatatttgtgattcatgggaggaggttaaaatattaacattaaaaacagtttggaagaagttcattccaaccctcattgatgactttgagggattcgaacttcagtggaggaagtcactgtagatgtggtggaaacagcaagagaacaagaattagaagaggatcctgacgatctgactgaattgctgcaatctcatgatcaaacttgaatgaatgagaagttgcttcttatggaagatcaaagaatgtggtttgttgagatggaatctactcctggttaacatgctgtgaacattgttgaaatggcaacaaaggatttagaatattacataaccttagttgatagcagcgtcagggtttgagaggattgactcaattttgaaagaagttctgtggataaaatgctgtcaaacagcatcacatgctacagagaaatctgtgaaaggaaaagccagttgatgtggcagacattcttgtcttattttgagaaattgcctcagcctggatcttgcagtgagccaagatcgtgccactgcactccagcctgggcgacagagcaagactccgtctcaaaaaaaaaaaaaaaaaaaaaaattgcctcagccaccccgaccttcagcaaccaccatcctgatcagtcagcagtcatcatccttgaggcaaggccctccaccagcagaaagattatgattcactgaaggctcagatgatcattttttaagcaataaactatttttaaattaagatatggacttttttcagacataatgctgttacataatacactacagtatagtataagcataacctttatatgcactgggaaaccaaaaatgtgtatgacttgctttattgcggtcttcactttattgcggtcctcactttattgcggtggcctggaactgaacttgctgcgtgtccaagatatgcctgtatttctgtcactactctgtgggatccaatgattagtgacagtacgctgggagctaagctccttgccttctcatctttcctctctcaagtctctttactctccctttattccgtgtgtgcctgaccccacttctgggaccagtcctgttcttaccaggtattgaagaagatccatgcatggccaggtgactcagcatcacattgtcatggccacagtccatctctgagtatctgccctagatttaatgattgaatggcttcctgtttgtgagatgaaggccctaccttttgcttcattttcctaactagatccatatcttattcccctgtagccagttccagtaatggtaacttgtgtagtatcatgtcaaaatcatatcagcaatagggatttgctttgctgtagtcagcatctgcaaccacctgttggcacacacacccccatgcaagtcttctggaatctgagttgggtgggtccttccatctgttgagaagttgatgcctcctgcctccctgcctgcatgcctacctggatctccagatgtccatcactcagtactatgttttatatacatgttggggtatgtcatgagcctcatttgtgcctgtgacccatcccccattttaacacatgctggagttcaggttctgctgcctaaatgtcctctcattgcttatatctcactgagtcaccttagtgtctttctcacataaagcattctatttgccctgaccccctcattgtaatgtgtcacaattaatccttgttgatggtacattttaaaagggcatggaattcagtccttggaactgaatgtctgtacaattattaagcttttctgtgtggtcaggacttctctgctgacaggatgttggtaagttcttaagtgcctgtggctggggtattgcattcatctgtggcagagcttgcaaatagtgtcctctggatcagattccatctaaagaactctggctcacacaatttataaaaataggaaatttactttaaaaagcgtttctgactattgagaaaaacagttcagattccactggattccagggtctgcattccatcccatagtggtgttgcttgcctgcggctgggtagttggtattccggttgagggtggttgcaggcaatgtcagtccttcctccagctcctcccctagtcctttggaatacttagcacctgatggctctgggaaggactcccccttgggctactggagaagggagtttctggagtttggttcaaattccaagtctttgaccagtcactgacaggtgctaaagagcatataaaaccccagctaccttgtggtcaagagaaatctgaggtgaaatttagactctggggttctctgacactgagctgaagccactcttcctgggattttgcttcagattgaatccttacctggtttccttccctctccccccactcccccccgccccacacacagggagcacgacattaaatcacaggcctgggactttctgtctcagggtctgctctagggaacaggacctaaaatgagaggatgttgtagtctcataataatcatccatttaaaaatatattctaatttcccttgtgatgttctgtttgtcctatggcttatttggaaatgtgttgcttagtttccatatctggggggattttctagtttttttttttatcagaggacatactctgatttcatctttgaaatttatcgagacttctttattgtccagtacattagtgaatgtttcggttgaacttgagaagaatgtgtatagtgcagtttgaggttgagtattccataaatgtcaattaagtccatagttagggtgttcatattttcctatccttactgattttttttgttagtgagagaagtctgttaaagattccaattctgattatgcacttgtctatttctataattctttcaaattttggagcacatgcttttaagattgttatgttctcttagttaattgaccttcattattatgaagtattctttatttctggtaagactccttatcttgtatgctttgtctgacattagtatagccagtttacttaggattagtgtttacatggtatgtcttttcccatccttctttcttttttgaatagttttaaattataactagacattatcaagaaaggcaaccccctgttatgttagaatacaacatggatgcagtttgtcattttaaagatgtaaaagcaagaaaatgcatacagttatgctccgtatcagttggttccaggaccctcacatagagcaaaatgcatggttgctcaagtccctgatataaaatggcatagcatttgcatatgacctatgcacatcctcctatgtactttggtacctaatacaatgtaaatggtatataagtagttgttacactgtatttttttaaatggtattatttttgtctttttaaaaattttttttacttatttattttttgaatattttcaattcatggctggttgaatctgtggatgtggaactcccaatatggagggccaagtgaataatagaaattcatccaaattttaagtagttggttatgtggtcagtaaatgtcattaaaaaaataaatttaaatagaaaattaatttatatctgtttacagaagattttttaaaaatcagtgtttattcaaacttaaaaggaaaaaaatgttctctgtcctcctgtttttccttcaaaatgtttgtcttttgtagaaaacattatgttctaagaccacttttttttttaaaacaatgacagtgatcaagacctccctaatgtaacctccctccccacaagtttgaatggaaggaaagccagaatcctataaattctttggtgttttggtgaccttagtgttttgagcaggaaatcaacttcttttttcttccttctgctgcaaaatctacataatgagtttcagactccttacacgtatgttcaagcagttttctgcttttttttggagccatttcaatatgagggaaattttgtaagctagtctctcatcatctttaaaatatggctccacacatatttttgcttgacaattccatgggtagttggtttctttgtggtagccagcacttctcctctgggaggatctttggcaaataggattcatattcttcatgtgttatcttattaaacatattgtatctgctattattgagatattttctcttttctgcatttggactcctccccttgtgtaatttctaaaagcacattttccctaaccatcgggccatgttcattctctttcctcctcctaatcttacctgactgccatttattaatagtgcactgacactcattttatgctgagaaaattcttcttttgcatctaccatccattggaaattctcaaaggataccttgttgttttgtaaagatttcttttcagtaactctatgtgggtttaataaaaggtctgatgtttcatagttgaattatattttatgtataattttatatcctgacttcttacgtattttcttatgtcacctagaaactttcatcagcattgttttatttaagttgtacaacactcggttatgtttgaattctaatttatttccacatttcctgttgctgaatagttgggattttttacaatgtaaaagaactctaataggagattattctcataagggatgtttttgagattatacatttaattgtatttccagaaataggattactgagacaaaggccataaaggctcctaatttatattggtggattgctttctaggagtgactaggtgtttacctttactttggctaatgtttccaaaaggccaagttcattcactagtaagtaatttaggaataataagctatccaccatatttaagaagtgtagaatgcagatttagtataatgttataaaatgattttttttttcacttattagaggcagtggcttaccatatatcacttctttaaattgtgaggagtattttgcttcaccagacccatttaaaattcagttctgcagcatttggcatctatcatatgtcaggcatgttgctagatagtggggaaataaaaatgaagggaatgctttctagctgccaagagttcagggcctagaagaaaagaaccataatcacctaaaattgttaccatgtaataagcttgacatatataaagtgaacctgtaaggtgctgatggaggattgaagagagcaggtgtatttgtgccagagggtgtgacatttgagctgagccattaaaagaagaatagatttttaggtgaagtaggagtacaaaggcactctcagggagaaatggcatttaaaggcataataaagattgtttagaacatgaagaacagcctgtgtttcacagttaaaaacttaactcctaagtttccaggttattttactccctttctaggatatacattgtcatttttcttaatatggagttatttcttgtctctgacaagcaccttgattggtctttagtgcttttattgttttagtctcctattgtcagtctgtacctgcatcatatagattgatagaaaaaatagatttcagtctacccaagtccaaaggaattgtcagtttcaagaaacttgttttccctctaccactctttttttttttttttttttgagacggagccttgctctgtcacccaggctggagtgcagtggcgtgatctcagctcactgcaacctccgcctcctgggttcaagcgattctcctgccccagcttcccgagtagctgggactatgggcgcctgccactatgcccggctattttttgtatttttagtagagacagggtttcaccatgttagccaggctggtcttgaactcatgacctcaggtgatccacctgcctcggcctcccaaagtgttgggattacaggcgtgagccaccgcgcctggccttccctctaccactcttgagcaccctgtgcatttagccttattataagagacgtgtgtttgaaaaatacagattccttaaccaaggactaacgccattccatctgttttggagccatattgagtgctgtgtcaaattatgtggtgtgacaatgatgggtagggtggggtcatattaagatgttcagaatgttgttttgtcagtataaaaataattgatagaaatgtgcaaaactgggcattgctgggctattaaaactgaccattgtctatctgttcattggatatcgtaaagtttgataattcaaggacatggtggatatcttttatgaaattttgttttcatttttatttttaataggatgaaagttaaaaaactgcccatgattctagctctacacctgaagagatttaaatatatggatcaacttcatcgatatacaaaactctcttaccgggtagtttttcctttagaacttcgtctgtttaacacttcaggtgatgccaccaatccagacagaatgtacgaccttgttgctgttgtggttcactgtggaaggtaattgcaactccggggacatagtagtggaattcctaggttagaagagcagggtacattcaagatgttcatgaattattcatatatagaacttttagaaattctgtattctctcaagataattttatttcaaaatggagttttagctttatgttttatcatttcttaaaaattttatatgttaaaatatattgtttttatttttattatttattactctacaagtactatatctgatttcctagaactttgagatctgttagtttttcttttccttttttggggtgtgtgtatagagggttgttggttaaaataaatcacttctgagtttaattgcgtatgttcagcatatcaatggttgtaaaaagcattttaaaatggcattggaaataatcttcaaagattcattttttgattttacctgtgtgtgtatttatcatttcttattagccaattttgctttctgtcttcttctcatcttcttttccaacatggtatacacatcttctctgtatgaacgtacatacctataattggccttattaaatacctcagaaaattctcaaactgcaagagcatcacataatcaaaacttgtatttggaacataactgtcttcattgactgcttagaatttcctttaataattttaaagcaggcactcatcattttccccttggttttgggaaacttgtactaacagcatgttttatccaaataaaaaaagttacagctttctcatcttcagccctcctcccagctctctgattagaattttttttttttctttttgagatggagtcttgctctgtggcccaggctggagtgcagtggcgccatctcggctcagtgcaagctccgcctcccgggttcacgccattctcctgcctctgcctcccgagtagctgagactacaggcacccaccaccacgcccggctaattttttgtatttttagtagagacggggtttcaccatgttagccaggatggtcttaatctcctgacctcgtgatctgcccgcctcggcctcccaaagtgctgggattacacgcgtgagccaccgcgcccggcctctgatgagaatttttaaggacaatctggagggagcaaatgctctttaataatcgtcttcttcctccattgcctgggtcagccttgggtcccgtcttttatcctcagcaagaatctttcttctacttctaaattaagagtgatcacatcttaaaggagtgaagcagtgtcaagattacttaaagaaccttggtgtagtgattcagaccgggttttcagagtgagagaaacttggatctcagtaccatttctgccaattgtgggcagtgtaacgttatgcatagcttcctgaaaagccttcagttttctcttctagaaaatgtaaataatactaattaccacattgctttgttaggattcaaagggagatgtaaatcgcttagctactgctactgttctattaacaaaaatgtaatattaccttctcacatcttagctttataatatttactttctcacaccgattagcctcttcaaatttagtgacagtcctactctacttaaatcatgctagatttttagaattgctctactcacaatatactgagctgagatgcctgactcattggggaggggtcccctccccactctccccttttaaaattaacccaactctttccccagccttaaatccttaagtctcttgaccctttccctttttaaccttttctttggcctcacttgcttctcccaacttgaactccacagtcagttatttaaagcatgttctcacaagcactgtaaaatcctcttgccagctgtctgaatccctactgtcagaattgttgcagaaaattgcagagagatgtttattgactttcctcacagccctggtggtctgccttcactgggaactctctcctgatggagttctgcacagcaggtctttggtatcccgcccccaccccagggtcttactctttctcctgtctcactctcattgcctcatgccttcctgcccctccgctctggaagtcttccttgacgctcttctgcccagcctcagtctccatgtggtgctgctccattgtcttcacataaatactagacgtgcattgctagccctgtcttagtgctttatgtactctcttaggatgtatgtctacttcccttatgagaacaggtgctttttaaaacagaaaataatttgctcactaataaaagactaatcatattttagaatctttttccattgtgtattttatttatcagacttatttgtagatttgcttcatatgaaagtgtggagggtgtgcgcagcctcattatcagcatgtcagttccagttcagcttgctccttctctgtccccggtgcccagcctagaagagacttctagcaaatgtttgttgacttaagtattacccttcaagcccatgtcaaaactgggcaccatttcgtgatttcccatccctctctcccttctacctcctgtcttgctggatgaggtctctcctgtggctctacttttatatcatattcttccttggattatgtttttggagtagttatctattgtactgaaggggtatttgggcaagcagttgttggtatctctttaatctccacagcaatcaatagttatttgcataccttacgcatttgtatctactcaactgagtgtgtttaatgtccagaaatcagatgcctaagaaacatcttccttaggtggaagttcagcccttcatctctcatttcatttttagtttatgaaattaacttttgtctactgttcctcaaactagttctttgccaaaggaaaaagccgcctaacttttttcaatttaccagtccttaccccacccacctcctttccttccaccctgtgttctgcaacctttctttgatttttctttatttcaccttttataattttgttttcatttctgaccctctccccataacacacaagaccctttagatgagcctaaataaatacagaaatagacttaaagcattaaatgcttttttaagaaaaagttttgatgtgtcatcctccatagttaaaaaaaaaaaagtatttttgttggtgtcattctgtcaaagatatttatctcacctacaggatcaaatgatctgagaaacataagatattatagtaggtggcttattctaatatctggtcactacttttaaaatagtgttcaccataaagaataatttgtgttgaaaaggattttaacttctgtattaattatagaattacaatttaataaatataattatatgagcctttataatgaaccatacttaaactggaagaggttaaaacctttgtcatatccttttataaagaaaaggaattatgcttcttttatttttatgtatatctacatttatatattccagatttgtttgaaatgagatgcaggggcaatcatagtcatagttataatggtattaagaattaggtacttaataatgacttaccattgagcaaaggtcatttgcttttaaagacattttatgaagttcaggcttgattttggaaccaaggatttgatatccttgcctgtttcaagcatcatattggatctttcctcaagaaaaaaaccattaccaagggagtgagacttagaaataattctatatgcattgttttatagtccaactcagcatgttctgctgtgatcccctcccttataaaatgatagaaaaatatgtcttttattatagaagcaaaattgaaaattattacaaagacagtaaaaaatttcaataatatagctgtatgtgaaaagaatactgatatatctcttagagtactaattatttgattttaaaattgatgaccagttcaactcagtgtagctttatctcttttggcaagaataggtaaggggtataaaaaagaagcagttcttttttactgctatttatctgtttctgtttctttataaaacaaaatttagagcatgaaagagtaatattaataaatatattgaattaacttcttcttcgtttgttttagtggtcccaatcgaggccattatattgcaatagttaagagtcatgatttttggttgttgtttgatgacgacattgtagaagtaagtagtttcttaatttcttatttttgaaagttgtatgcatatgttgcttttcacttttttctcatagtttttcatttatatatgactggtgatgatatgagacaaatgtctgggtctatagattgtagtctaattcctacttcttactctgcaacgtccaagcccagcagttgagtggtcacctaacctttacacacctagaataaaacaagggaggccaggtgcggtggctcacgcctgtaatcccagcacttggggaggctgaggcgggcggatcacctgaggtcgggagtttgagaccagcctgaccaatatggagaaaccctgtctctcctaaaaatacaaaattagccgggcatggtggcgcatgcctgtaatcccagctactcgggaggctgaggcaggagaagcgcttgaacccgggaggcggaggttgtggtgagccgagatcgtgccattgcactccagcctgggcaataagagtgaactccgtctcaaaaaaaaaaaaaagaataaaacaagggaaagctttcaacaacagacctggctttaaaaaaaaaaaattaagccatgtaacatacatacagtaaagtatacaaatctgaatttgatgaatttttatacatgtgtccccccatgtcacacacacatagccatactcacacactcacatttgtaactaccatccaggtcaagatacaattcattttcaacaccgcagcaggcccccttgttcctccttctggtcagaacttacagctttcctcacctctaccctcctggagcctgctatttggacttctatcattatgattaattttgcctaggcttgaatataaatggactcacatagcatgatttcttttgtgtcagactttattcactcattgatatatttgtgagatgcattcttgttgcctgcggtaatagtagttctttttcactgctttgtcattttctactgtatgaatataccaagttagaaatttgactttttgtcagttaatgactattgtgaattaaaatgcattggtcatcttttataagccttttgctggacgtatacactcatttttcttggatatatgttaggttggaccactagaagttgcctttttgttgttttgggagacagtcttgttacctaggctggagtgcaagggtgcgatctcggctcaccaccacctccacctcctgggttcaagcgattctcctgcctcagcctcccgagtagctgggattacaggcatgcgccaacacgcctagctaattttgtatttttaatagagatggggtttctccacgttggtcaggctggtctcgaacttctgaccccaggtgatctgcccgccttggcctcccacagtactgggattacaggcgtgagtcagtgtgcccagcctagaagttaccattttgttggtccaaaatagttattagtggtttcatataattcatcctgtacctagaagtagaattgctggatcaaagggtagttgtatgttcagctttagaagataggtatttataaacatttttttggtgtgccctgccagctgtgtgtgagagttccattttccccacattttcaccaaatacttggtattgtcagtcttttaaatttaagccattctggctgtacagagctcatttatgtactaatgtttacattttacctcacagaaaatagatgcacaagctattgaagaattctacgggttgacatcagatatctcaaagaactctgagtctggttacatccttttctatcagtctcgggactgagagggaaccgtgatgaagagacactttctgcctcatttcttctctggttattttggaaaggatcaagcactgatttttcaagaaaagagaaatgcaggaagctcagggggcagtagcacactttgcacacgataaagcaaagacgatggattgacaagcccttccgatcatggtagttgatttatttgctcaggtatcatgctgtctgtacagttccatacaacaaggaggtgaaatcagagataccagctcctcttttaaaacagccttccagtcattggcacgcattttctctttattaattgcaccaataatgctttgaattccttgggggtgcagtagaaagaatcggaatctgtgccgtattgataaggagatgatgttgaacacactgcataaatttgcctggttcagtatgtatagaagcatattcagtggtcttttcaagagtaaaccagaaatacttttgggcccaacacttgcagttgccttcctgatgtaaaaactaacatgctagataatccagtgtcgggaagacaaagatgttttgcttctctgaagaagcttataataatatacagtatatgtatatgtagggagcaattggtcaaaagtggctttttgtttccccaaggggaaagactggctttgtaattataattttttccttatttattttacttaaaactggtagagtctaagtattatatgaagtgcccatgattctgtcagtaaatttgaacatatttttattagttaatgtcagtttaagttgtccttttgtttgtttctatttttaaggtgaattttaatttctatctgaaatcagttaagataccttgagaaaaactgcagtgagaggagataaatatcctttttcaggaggaactgatatctctggctaaatatttgtccttttattatggtttctaaatcagttattttcttcagctttaatttcataaaattaaaaaactattttaaaaattcctgtagttgttggaataattaaaaattctggtgcagtggtggtataccaatctttagaattcttaagtattctaatgtttcaagttgagatcatgcttgggaaaatcatgtcatagcatttatgttattttcagatgccattttttaccctggaaagaagtcataatgttcatcataaccctagcagcctggatagtgagctaaacaaacccttcaaagattaaattttaatcaagtagaccgggaatacaaaagacaagtccttccttcccttccccccacctttacaaatcttactggaagggtgttcagaaattaaaatctgtgtttgctaagacttcattctgttgggggttttaagaagtaatatatgtaacataaaatatatgtaaacgattgcagtttttttggacgtttttccatgcatcagtaagttgtctgacagtagccaaatgtaacttgcagaaaattattgaaaattatattcagaataatagcaatcaggccttggatgttctttattaaactcttttcaggcagtaaatttaaaaaaaattgtcattttctaaagtccttttgctaaaactgttgactatggaaaacaacaaaaaggaattttttagtctgctgctattattaacatttattatctgtatcttttggctcaggaaatgacttcacctattttttccataagcagacctttaacagagtcacttaattgggctgcttaaacagatgttctgggagaaaattataatatttagtatttgtacaaaatatcaaaaagtattttgacaagtttctttttaagatagttcctaaagccttaccctggctagaggtgttttgtacaaattatatataagccagcctgatctaccaacatgccacagagaatcacaatcaacagtgtggggaaagtcagggcagtggaagtggatgcactctttttattttgaaggcttaaaccaaattgtcttggaattaaagctgtatttctgcagctttcggtacagagaaaaagaggaaagtgaagctgtgtcagttttaacattagctatatcaacatgtttaagaaagatagatgaagtcatttgcataaaggtacagcattgaaatactatgttgtgtttgtttttacatttttgcattaaaaaaaaacatgccgtaaaagccaagttaaatttcatattaaagcaagttctagtgtatgtgttgagttcctggtaatcacatacttgttcacatctacaccgtacttcatagtatgatttgtcaggggagggattgtggggtgacagttttacatttactttttcttcttaatgcagctggatctaagtaaaatgttttgaagtttatcagaaactaaatgtacttttaaaacgtatagggtcagggttgggggaaaaatacaggtatagtaagtaagaaaagtgacccatgaagaaagcatcgtgaggttgtatgttggttgactgtgattaaaatgcggggctggtgtaagttgtaagtggtggctgattgccgtgtaactatgtacatgattgttgggatggctgtcccatattttgtatattggaataaaaatttctataaattattgtaactaaaagtaaatattctaaattaagtcccacttcttaagtcacatggcttctgtcttggaaattttacctttaaaagattatttaagacaggaaccaggaggcttgggaacagggaaagagggaaatgttgtattatgtgggtcttggggcctctaaccatcagtatagggttttttctttccttgatggcagtagaaagacctcattttcataacataactactcttgatactttctttaaaaacactttttattaaagattctatcatgaggtatttggctgggagctgggaggctaaagcgctcatgtcctggctcttcagtgaatttaactgtgtgaccttgggcaagtcacttaacctctctgtgcttcagtctccctgtcttgtaaaatgggagtaatacctacctcacagggttgttgtggggattaattagagataatgtctgtaaagcatttaaggttcttgaagaaggcactatataaatacaaaataatatctattaaagttggtttatttgtgcctgtgggtttcaagtgtgttttttcctttttgcctaaaatgtatttacagattagaagtagacactttggaaactgtgttactgcttttgcccaagctcctacttctgtatccaaagagattttccctagaacagaattgcgtgtgtgtaaaacaacattctacatgtgcctgcatttatttagcacatagtagcttgtgtcacctttctgtgatagcatgtctgaaaagttcaaagtttaaatttgaacattgagagtcatagaatcttagagggtaaaataggtaaaataccttaaagatcactgtttctcctgctcctcctcctttcctgtgtagtaattgctcctgtaaaatctgttttcacaagtggtcagtcaacctgcacttgagtgctggaagcctgttccattattgagtaacttgagttgttatttatgttgccattattttcagcccatccttcattctcccagtgtgcttctgatctcaaggctgatctttgtattagatggctttcagagacttcatccttcctgggagccctattctggaagcactgtttttcattcatgtctctgaaagagtgttcctagaacaagcacagtgacaggtgaactatactgtcagttgggacctacgatcacattctcttttctaagcgtctgtatcacacacttcatattgaacttgtagtaaatgaaatcctgtatacctaaaagttttcgtgaactattgaaaagctgagagtcccttgccacacaccttttttcatgattccctgttagcggtacctgtgcctgttaacatgtcaaggctttccccatctctcttcattcatgtgttttctataataactgcatctgttttctgtctgcagagctactgaagtaacaacccatcgcttttgggtgatagcctgctatgtgatcgcccctgtactcgatattttacttcttttaatgttaatcttaaccacatctgtgagacagtgacatcctcattttacaaaggaagaatctaaggttctttagaggttaagtaactttcttagagccagtcagctggaaagtagcaggtccaggtttcaagtaggtataactccagtgtccaggctcctaaccgtggctatccttaccaaaagatttttgttgttgtggtaaaaaaaaaaaacaaaaaaaaaaccacaaaactaaaaattactattttagccatttttaagtgtccaattaagtgacactgagtacattctccatgtgcagataccactgccgtccatttccagaattcttttcattgtcccaaacaagaactctgtacccattaaatggtcactccccatacttcccttccccgcggcctctgtgaacctgcattctgctttttatcttgatgaacttgctctaggtgcctcatagaggtggaataatcactatttgtcctcttgtgtcatttcacttattttcaaggtgcatccatgttgtggcatgtgccataatttcctttctttgtaaggctgaataagacttcatttatgtatatacaacattttgtttatacattcatccattaacggacatttgggtcttttccaccttttggcagttgtgactaacgctgctgtgaacattggtgtgcaagtatctgtttgagccccagatttcaggttttctgggtatagatctaggaattgctgaatcgtggaattctatgttgaactttttgaggaacagctatattgttctccacagcggctgtaccgttacgcattcccactagcaatgtaccagtgttccagtttttttacattcttgccaatgcttattattttctgagttttttttataatagctatgctaataagtatgcaagtggtatctctttgtgatttgatttgcatttccctaatgccttgtcatgttaagtatattttcatgtgcttattggccatttgtgtatctttgaggaaatggctgttcaagttctttgtccagttgtttgcttttttttctgtcgagtagtaggagttctttataaattctggatatccccttatatgtacagttcgcaaatattttctccctttctgtggtttgttttttcactgtcttataggtagtatcctttgatacacagttttaaattttaaattttggtgcagtccagtctgtcttttttctttctccttcccttcctttcctttcttcccttcctccttttttctttctccttcccttcctttcctttcttcccttcctcctcttccttcccttcctcctctccctcccttcctccctcccttcctcccttccccccagggtcccactcccacccaggctgcagtagcacaatcacagtggctcactacaatctcaaatttctggactcaagtgctcctcctgcctcagcctctcaagtacctgggattataggccaccacacctagctaatttttaaatattttgtagaggtggggctgtcactatgttacccaggctgctctcacctcctgggctcaagcaatcctcccacttcggcctcccaaagtgctgggattacaggtgtgagcctcctcacctggcctaatttttcttttgttgtctttacttttggtatatctaagaaagcatcaccaaatccaatgtcatgaaacttttgccctgtgttttcttctaagagtattattttagctcttacatttaggtctttgatccattttgagttaattttagtatgtgatgtaagggtcaacttcattcttttgcatgtagctacccagtgttcccagcaccacttactgaaaagactgtccttttcccactgaacgaggtgccaaaatcagttggccatgtatgctagggtttattttaggactctcttttgtcccatttgtctgtatatctgagcttagccagtaccacactgttttgattaatgtagctttgtagtaagttttgaagtaaggaagtatgagtcttccaactttgttctttttcaagatcgttttggctacttaaggcccctcagagtttcatgtgaaccttaggtttttctgtttatgcaaaaattgtcgatgggattttcaaagattaaattgacttaacaattttaagtctaatctatgaacactgatgtctttccatttatttaggtttttaagttctttgaccaaccttttgttgtttttatcatacaggtctttttaagtattttattattgatctattataaatgggattattttcttaatttcctcttaggattgttcattgtgtatagaaatgcaactgatgcttgttggttttgtgtcctgcaactttgctgaattattagctttattagtttttttttggtgtggaatctttaaggttttctacatataagatcatgccatttgctaacagataattctttgttttcaaactttttttttttttttgagacggagtctcactctgttgcccaggctggagtgcagtggcatgatctcagctcactgcaacctccacctcccaggttcaagcgattctcctgcctcagcctccctagtagctgggcctacagatgcccgcccccatgcccgtctgatttttgtatttttagtagagatggggtttgaccatgttgcccaggctggtctcgaactcctgacctcaggtgatccaccctcctcagcctcccaaagtgctgggattacagacgtgagccattgcgcccggcctgttttcaaatttggatgacctttatttacttgttttgcctaattgctctagctagaactttcaatactacattgaatagaagtggtggaagtaggcattcttgtcttgttcttgttttagaggagaagcttttagtattttatcatagtacgatactatctgtgggtatttaatatatggcctttatcatgttgctatttcaatttgggtgtggcttttttttaaatcaagggtattgaattttgtcaaattttctgtatcaattgagatgatccctttttttttttttttttttttgagacggagtcctgctctgtcacccaggctggagtgcagtggcgtgatcttggctcactgcaagctccacctcccgggttcacaccattctcctgcctcagcctcccgagtagctgggactacaggcacccgccaccacgcctggctaattttttgtattttcaatagagacggggtttcaccatgttagccaagatggtctcgatatcctgacctcgtgatccacccacctcggcctcccaaagtgctgggattacaggcgtgagccactgcgcccagtagatcacatgttttttttatcttatcagtgtgatatattatagtgtttttcatatgtgaaactatccttgtactccagggataaatccactcggttattgtgcataatacttttagtacgctgctgaattcagcttgctagtattttgttgacaatttttccatcaatattgatcagagactttggtctgtaatttttatttcttgtagtgtctttgtcaggctttggtgtgggtaatgctgctgtcatagaatgagttaggaaatgttccaccctcttcaactttttgaaagagtttgagactatcaaaagattttttagcaataaccagtacttccatccttactgtaagtcattattaagaaagatgaaggcctagtttttgctcttgaggaatttgtcatatgagaatgaatcaaaggaaacctagaaaaatcagctgtataaatggacatatttatacaactctacagggtaggtggaggaatgcagagtaggaaagtattggtgaaattgcagggatgcagtcagattgtccagcccaaaatgggaatctggaaatcaacagcagtcaaagggactggaaatactaagtataattgcaatttaagaatattaacttatgatactattgggtaatagaatttctaagactccatcaaactaaattttcccctttcctttccctaaggaaaggccctaaattactcttgaggaattctcactcaggcagccactgtagagccccaactcctgagaaaaagattttactctattttgtatcatatacatctgttataatgcatctaaataactggatcctttaaaaatcatctgttctggccaggcgtggtggcccatgcctgtattcccagcactttgggaggccaaggcaagaggattgcttaagcccaggagttcgagaccagcctgggcaacacagggagaccttgtctctagaaaatacaaaaaattagccaggtgtggtggtgtgcaccagtagtctcagctacttggaggcttgagcccaggaggttgagactgtagtgagctattatcacaccactgcaacccagcttggatgacagagtgagaccatatttcaaaaaagaaaaaaacctgttctcaacaatttgtcatataattaaactgtggtataaaacataactgaggaaagctcatacctcctgcttgctttccattagccaaactgtcttaagtagtgccgctatattgatttgatcaaatctggatgattagtagaatgttttgattcctgagattgatccctgaagattttgatccactgcagatgagaaaactagttttcagaagttccccggtgattctgatcagctgggttttggtgattagaattccgtgggatgcaattcgtctggagttctctagcgtgttcctgtaaggtctctgccaagccagagttgatctgacatggggagagttgtcagaaaaccaaatcatttcaggattgctcagggaaaacttacacggggtgtagcacctgtcttctcatacatcgtttgaagagctgctgtctaggggatgttttgcttctagggttgaattgggactgcattgaaaaggacagagagccacatactgagtacaagtaagagcttcctggttgttcagcagggagaggagctgacatactaagaaataaagtgtcaaacgtacgtcattagactgttcataggtggggttcttaacactggctggaacaagcttgtgcaacccgcggcccatggactgtaggccgcatgtggcccaacacaaattcatcaactttctgaaaacattatgagatttatacatgaaccttttaaaaaaatttttagctcatcagctattgttagtgtattttatgtgtggcccaagacagtccttccagtgtggctcagggacgccaaaatattggacacccctgggctagaaggttgcgcaggataaccttaagcttcttcccaggtgaggcagctaagactggggaacttacccaaggtcactggtaaatggccaagctagtgcctgagcatatatatatatatatatattttttttttttttttttttttcgagatggagtcttgctctgtgtcacctagattggactacagtggcatgatcttggctcactgcaacctctgcctcccggattcaagcaattctgtctcagcctcccgagtagctgggattacaggcgcctggctcgtttttgtatttttagtagagacagggtttcaccatgttggccaggctggtctcgaactcctgaccacgtgatccacctgcctgggcctcccaaaacgctggcgttttggacctgggcccatattttctattccagggctcatatttagttctgcattatgctgtcctttgtcctttaaaatagctggacctagagtgctgtaacacactatagggagagtttacattgccactggtcattaggatggcaactatcccatcaccagttcctgactagaacagaggtgggttgaacaaaacaccagtctgaagattttagagtggcagtcaagtttatatcaccttcagtgtgagcaggcggggtggtgtcaaagtgacattactggtgttgggtaagtctatgctgcattaataaaacacttcccaccatctctcaaaacaccttcctttgaagattcaggttcttcagactgaggaacctctgaatcgtgactagcttgatagaagactttacattaaaaagtaactgagagatggtctattcaccttgcatgactgtgctatctttaatcatcaatctttgaagtgcacactgggtcattcgtaagcaagattacagagaataaaatagaattttgataccactgtattcgccatgtcattacaaagtctgtatccactgtcaggcccagaaacaagacagtaatatactgtctgcacattttgagatgagaaatgcaatgattgtgttgtttttaaactagttgctggaacttttttttttttttttctggtagctttttccttcagttagaaaccattttccaaacaatattcttaggctacaaaaatgaatgtttttgtgggtggacttttactggatgctagttatttataacctattgaagttttacatttaagaaggaaaaatgatagaatgaggaggaaagtagacataaaatttcatgtcaatggaatagattattattccgttagatacaatagattattattccattagatgtaatggaaacctcagaaaacagctgcaaataagcatctgacttattttcccaatactacatatgtttatcattccctaaatcatcagttgttgcattttgattaaattggtttgttgaacacatgtatttttaaattttctgcaaaaaacaaattcctatcatgaacacaaagtaggggcatcgcagtatctggatttctacacattatttgtactctgtattttactacctattaaactattgattagaactgatttgaaattccattaatttacctttccgcgtgtgaagttacaaatcgagatgaggtttaggatcctgtgccacagtgtgcaggggttgggagatgagtccttgtagaagatactgctgggtgtggagcagagttcagaaggtgacaagccttaaccatgggagggagtcctaggggaggatgcctgcgcttccctggcttgcacagctaggtcaatggaggaggcttttgctgagaatctaggaagagaaccagctttgggggcatgagtgtttcatggtatggatgtaccacagtttaccagcattcgcttttaataaattgaccttgctcagcagttctgggagctgtaatggaatgagaataattggaattcacatgcccagggtatacctattagcctatcccacatcccacatgtgcaaaacttagttattaggatttgagattaggtggagttgaaatggctattaggattcttaattagactctgtttttggtgtgctcacaaactgtgttataaagtctatagtgattctgaggcatttgataattgaggacacactggtaaaaccaaactaacagcctcatgttgaagagtgctggtgagtggctattgaaaatttctgccagaaactagttgcatctgtatcatttgatctagcataaaacatttccttttcacttatggaaagacacatcttaaaaacccttgaaagggtttaggacaagaaaaaaaattcatttgcttggcaatttgcacatgtttggagagttttgtgaagtgaactgactgctagataggttaaagccagcctaatagcaaatggaattgacctcgatgttgctctctgtgatagatgcagatgtttcaggcaaacaggaggtaagatgactcgagtgcagcctttcagcctcatctggtgcgatagccccttggggttaggtttgctaccaggctctctaaggaaattctgtcgtcagagttatctgtggcagtgtcactttctctgacacaggtctattggcatccttcccagcaccaatctagatctggactggtgatcacttgttgaccataaggtgtttattattattattattactgttctgtttttgaggcagagtctcactctgtcgcccaggctggactgcagtggtgcaatcatggcttactgcagccttgaccttcggggcttaagcaattctcccaccttagcctcctgagtagctaggactacaggcaactgccaccatacctggctaattattttattttttgtagagatggggtctcactttgttacccaggctggtcttgaactcccgggctcaagcgattcgcctgccttggccttccaaagtgctgggactacaggcattgagctactgcatctgggtgatcatgtttactgccattccttttgttatatttgatttaattttttaattttttttttttttccttagagacagggacttgctctgtcacccaggctgcagtgcagtggtgtgatcatggttcactgcaacctcaaattcctaagctcaagtgatcgtcctgcctctcagcctcctgagtagctggaactacagacatgccacgatgcctggctaattttcaaattttttgtagagatgcggtctcgctgtgttgcccagatgggtctcaaactcctggcctcaagtgatccttcagcctcagcctcccaaagcgctgggattacaggtgtgagccactgtgccgggccatgccttctcctttgtatgttgagctaagcatacacactttaagtaggcagtgagccagctcttcacagcctcatgaccttgaacaagttgcatagccctcctaagcccacatttcccatttgtaaaatggctaaagtaataccatcttgaaagacgtgaaactcaactgagaaacttaacctcacacagtttgtggcaataattccccaaatagtgtcatctagaaatatgctaaaacccaactgtaattacccagatatttattgaacatgcgttatgtgaagagcatcgttatcagttgttgcaaggaatgtaaagatgcctaaggcaatttccattctcatggcgctttccgatgtagaagaggagtttttgttgttaaaggctagacaaaatctatgtaaaatgtcctttgggttcagagaaaggagttaccaga

SEQ ID NO: 456 - DNA, 4562 bp, Homo sapiens
cccggaggcagcggctgcgccctgcgccggggcggagccgggggcgggccggcggccggcaggcgggggctggggcccgaggccgggagtgcctgagcgccggcggcgacgacggcagcggcggcccagcgggctcggtggttgggtccgcggcggctcggggtccgcccgcgggctgcggtgcgagcgggcggcccggctcccctcctcccccgcccgccgccgccgctgtgattgggtggaagatggcgctggccggatggaaatcctaatgacagtctccaaattcgcctccatctgtaccatgggcgccaatgcttcggcattagagaaagagattggtccagaacagtttccggtcaatgagcactattttggattagtcaattttgggaatacctgctactgcaattcagttcttcaagcactttatttttgtcgtccatttcgggaaaaagttcttgcgtataagagtcaacctaggaaaaaggagagccttcttacatgcttagcagatctcttccatagcatagccactcagaagaaaaaggttggagtaataccccctaagaagttcatcacaagattacggaaagaaaatgagctttttgacaactacatgcaacaagatgcccatgaattcttaaattacctactaaatacaattgctgatattttacaagaagagagaaagcaggaaaaacaaaatggtcgtttacctaatggtaatattgataatgaaaataataacagcacaccagacccaacgtgggttcatgagatttttcagggaacattaactaatgaaaccagatgtcttacttgtgaaactataagcagcaaagatgaagattttttagacctttctgttgacgtggaacaaaatacatcaattactcactgcttaaggggtttcagcaacacagaaactctgtgcagtgaatacaagtattactgtgaagagtgtcgcagcaaacaggaagcacacaaacggatgaaagttaaaaaactgcccatgattctagctctacacctgaagagatttaaatatatggatcaacttcatcgatatacaaaactctcttaccgggtagtttttcctttagaacttcgtctgtttaacacttcaggtgatgccaccaatccagacagaatgtacgaccttgttgctgttgtggttcactgtggaagacttatttgtagatttgcttcatatgaaagtgtggagggtgtgcgcagcctcattatcagcattggtcccaatcgaggccattatattgcaatagttaagagtcatgatttttggttgttgtttgatgacgacattgtagaaaaaatagatgcacaagctattgaagaattctacgggttgacatcagatatctcaaagaactctgagtctggttacatccttttctatcagtctcgggactgagagggaaccgtgatgaagagacactttctgcctcatttcttctctggttattttggaaaggatcaagcactgatttttcaagaaaagagaaatgcaggaagctcagggggcagtagcacactttgcacacgataaagcaaagacgatggattgacaagcccttccgatcatggtagttgatttatttgctcaggtatcatgctgtctgtacagttccatacaacaaggaggtgaaatcagagataccagctcctcttttaaaacagccttccagtcattggcacgcattttctctttattaattgcaccaataatgctttgaattccttgggggtgcagtagaaagaatcggaatctgtgccgtattgataaggagatgatgttgaacacactgcataaatttgcctggttcagtatgtatagaagcatattcagtggtcttttcaagagtaaaccagaaatacttttgggcccaacacttgcagttgccttcctgatgtaaaaactaacatgctagataatccagtgtcgggaagacaaagatgttttgcttctctgaagaagcttataataatatacagtatatgtatatgtagggagcaattggtcaaaagtggctttttgtttccccaaggggaaagactggctttgtaattataattttttccttatttattttacttaaaactggtagagtctaagtattatatgaagtgcccatgattctgtcagtaaatttgaacatatttttattagttaatgtcagtttaagttgtccttttgtttgtttctatttttaaggtgaattttaatttctatctgaaatcagttaagataccttgagaaaaactgcagtgagaggagataaatatcctttttcaggaggaactgatatctctggctaaatatttgtccttttattatggtttctaaatcagttattttcttcagctttaatttcataaaattaaaaaactattttaaaaattcctgtagttgttggaataattaaaaattctggtgcagtggtggtataccaatctttagaattcttaagtattctaatgtttcaagttgagatcatgcttgggaaaatcatgtcatagcatttatgttattttcagatgccattttttaccctggaaagaagtcataatgttcatcataaccctagcagcctggatagtgagctaaacaaacccttcaaagattaaattttaatcaagtagaccgggaatacaaaagacaagtccttccttcccttccccccacctttacaaatcttactggaagggtgttcagaaattaaaatctgtgtttgctaagacttcattctgttgggggttttaagaagtaatatatgtaacataaaatatatgtaaacgattgcagtttttttggacgtttttccatgcatcagtaagttgtctgacagtagccaaatgtaacttgcagaaaattattgaaaattatattcagaataatagcaatcaggccttggatgttctttattaaactcttttcaggcagtaaatttaaaaaaaattgtcattttctaaagtccttttgctaaaactgttgactatggaaaacaacaaaaaggaattttttagtctgctgctattattaacatttattatctgtatcttttggctcaggaaatgacttcacctattttttccataagcagacctttaacagagtcacttaattgggctgcttaaacagatgttctgggagaaaattataatatttagtatttgtacaaaatatcaaaaagtattttgacaagtttctttttaagatagttcctaaagccttaccctggctagaggtgttttgtacaaattatatataagccagcctgatctaccaacatgccacagagaatcacaatcaacagtgtggggaaagtcagggcagtggaagtggatgcactctttttattttgaaggcttaaaccaaattgtcttggaattaaagctgtatttctgcagctttcggtacagagaaaaagaggaaagtgaagctgtgtcagttttaacattagctatatcaacatgtttaagaaagatagatgaagtcatttgcataaaggtacagcattgaaatactatgttgtgtttgtttttacatttttgcattaaaaaaaaacatgccgtaaaagccaagttaaatttcatattaaagcaagttctagtgtatgtgttgagttcctggtaatcacatacttgttcacatctacaccgtacttcatagtatgatttgtcaggggagggattgtggggtgacagttttacatttactttttcttcttaatgcagctggatctaagtaaaatgttttgaagtttatcagaaactaaatgtacttttaaaacgtatagggtcagggttgggggaaaaatacaggtatagtaagtaagaaaagtgacccatgaagaaagcatcgtgaggttgtatgttggttgactgtgattaaaatgcggggctggtgtaagttgtaagtggtggctgattgccgtgtaactatgtacatgattgttgggatggctgtcccatattttgtatattggaataaaaatttctataaattattgtaactaaaagtaaatattctaaattaagtcccacttcttaagtcacatggcttctgtcttggaaattttacctttaaaagattatttaagacaggaaccaggaggcttgggaacagggaaagagggaaatgttgtattatgtgggtcttggggcctctaaccatcagtatagggttttttctttccttgatggcagtagaaagacctcattttcataacataactactcttgatactttctttaaaaacactttttattaaagattctatcatgaggtatttggctgggagctgggaggctaaagcgctcatgtcctggctcttcagtgaatttaactgtgtgaccttgggcaagtcacttaacctctctgtgcttcagtctccctgtcttgtaaaatgggagtaatacctacctcacagggttgttgtggggattaattagagataatgtctgtaaagcatttaaggttcttgaagaaggcactatataaatacaaaataatatctattaaagttggtttatttgtg

SEQ ID NO: 457 - protein, 391 aa, Homo sapiens
MEILMTVSKFASICTMGANASALEKEIGPEQFPVNEHYFGLVNFGNTCYCNSVLQALYFCRPFREKVLAYKSQPRKKESLLTCLADLFHSIATQKKKVGVIPPKKFITRLRKENELFDNYMQQDAHEFLNYLLNTIADILQEERKQEKQNGRLPNGNIDNENNNSTPDPTWVHEIFQGTLTNETRCLTCETISSKDEDFLDLSVDVEQNTSITHCLRGFSNTETLCSEYKYYCEECRSKQEAHKRMKVKKLPMILALHLKRFKYMDQLHRYTKLSYRVVFPLELRLFNTSGDATNPDRMYDLVAVVVHCGRLICRFASYESVEGVRSLIISIGPNRGHYIAIVKSHDFWLLFDDDIVEKIDAQAIEEFYGLTSDISKNSESGYILFYQSRD

SEQ ID NO: 458 - DNA, 4499 bp, Homo sapiens
cccggaggcagcggctgcgccctgcgccggggcggagccgggggcgggccggcggccggcaggcgggggctggggcccgaggccgggagtgcctgagcgccggcggcgacgacggcagcggcggcccagcgggctcggtggttgggtccgcggcggctcggggtccgcccgcgggctgcggtgcgagcgggcggcccggctcccctcctcccccgcccgccgccgccgctgtgattgggtggaagatggcgctggccggatggaaatcctaatgacagtctccaaattcgcctccatctgtaccatgggcgccaatgcttcggcattagagaaagagattggtccagaacagtttccggtcaatgagcactattttggattagtcaattttgggaatacctgctactgcaattcagttcttcaagcactttatttttgtcgtccatttcgggaaaaagttcttgcgtataagagtcaacctaggaaaaaggagagccttcttacatgcttagcagatctcttccatagcatagccactcagaagaaaaaggttggagtaataccccctaagaagttcatcacaagattacggaaagaaaatgagctttttgacaactacatgcaacaagatgcccatgaattcttaaattacctactaaatacaattgctgatattttacaagaagagagaaagcaggaaaaacaaaatggtcgtttacctaatggtaatattgataatgaaaataataacagcacaccagacccaacgtgggttcatgagatttttcagggaacattaactaatgaaaccagatgtcttacttgtgaaactataagcagcaaagatgaagattttttagacctttctgttgacgtggaacaaaatacatcaattactcactgcttaaggggtttcagcaacacagaaactctgtgcagtgaatacaagtattactgtgaagagtgtcgcagcaaacaggaagcacacaaacggatgaaagttaaaaaactgcccatgattctagctctacacctgaagagatttaaatatatggatcaacttcatcgatatacaaaactctcttaccgggtagtttttcctttagaacttcgtctgtttaacacttcaggtgatgccaccaatccagacagaatgtacgaccttgttgctgttgtggttcactgtggaagtggtcccaatcgaggccattatattgcaatagttaagagtcatgatttttggttgttgtttgatgacgacattgtagaaaaaatagatgcacaagctattgaagaattctacgggttgacatcagatatctcaaagaactctgagtctggttacatccttttctatcagtctcgggactgagagggaaccgtgatgaagagacactttctgcctcatttcttctctggttattttggaaaggatcaagcactgatttttcaagaaaagagaaatgcaggaagctcagggggcagtagcacactttgcacacgataaagcaaagacgatggattgacaagcccttccgatcatggtagttgatttatttgctcaggtatcatgctgtctgtacagttccatacaacaaggaggtgaaatcagagataccagctcctcttttaaaacagccttccagtcattggcacgcattttctctttattaattgcaccaataatgctttgaattccttgggggtgcagtagaaagaatcggaatctgtgccgtattgataaggagatgatgttgaacacactgcataaatttgcctggttcagtatgtatagaagcatattcagtggtcttttcaagagtaaaccagaaatacttttgggcccaacacttgcagttgccttcctgatgtaaaaactaacatgctagataatccagtgtcgggaagacaaagatgttttgcttctctgaagaagcttataataatatacagtatatgtatatgtagggagcaattggtcaaaagtggctttttgtttccccaaggggaaagactggctttgtaattataattttttccttatttattttacttaaaactggtagagtctaagtattatatgaagtgcccatgattctgtcagtaaatttgaacatatttttattagttaatgtcagtttaagttgtccttttgtttgtttctatttttaaggtgaattttaatttctatctgaaatcagttaagataccttgagaaaaactgcagtgagaggagataaatatcctttttcaggaggaactgatatctctggctaaatatttgtccttttattatggtttctaaatcagttattttcttcagctttaatttcataaaattaaaaaactattttaaaaattcctgtagttgttggaataattaaaaattctggtgcagtggtggtataccaatctttagaattcttaagtattctaatgtttcaagttgagatcatgcttgggaaaatcatgtcatagcatttatgttattttcagatgccattttttaccctggaaagaagtcataatgttcatcataaccctagcagcctggatagtgagctaaacaaacccttcaaagattaaattttaatcaagtagaccgggaatacaaaagacaagtccttccttcccttccccccacctttacaaatcttactggaagggtgttcagaaattaaaatctgtgtttgctaagacttcattctgttgggggttttaagaagtaatatatgtaacataaaatatatgtaaacgattgcagtttttttggacgtttttccatgcatcagtaagttgtctgacagtagccaaatgtaacttgcagaaaattattgaaaattatattcagaataatagcaatcaggccttggatgttctttattaaactcttttcaggcagtaaatttaaaaaaaattgtcattttctaaagtccttttgctaaaactgttgactatggaaaacaacaaaaaggaattttttagtctgctgctattattaacatttattatctgtatcttttggctcaggaaatgacttcacctattttttccataagcagacctttaacagagtcacttaattgggctgcttaaacagatgttctgggagaaaattataatatttagtatttgtacaaaatatcaaaaagtattttgacaagtttctttttaagatagttcctaaagccttaccctggctagaggtgttttgtacaaattatatataagccagcctgatctaccaacatgccacagagaatcacaatcaacagtgtggggaaagtcagggcagtggaagtggatgcactctttttattttgaaggcttaaaccaaattgtcttggaattaaagctgtatttctgcagctttcggtacagagaaaaagaggaaagtgaagctgtgtcagttttaacattagctatatcaacatgtttaagaaagatagatgaagtcatttgcataaaggtacagcattgaaatactatgttgtgtttgtttttacatttttgcattaaaaaaaaacatgccgtaaaagccaagttaaatttcatattaaagcaagttctagtgtatgtgttgagttcctggtaatcacatacttgttcacatctacaccgtacttcatagtatgatttgtcaggggagggattgtggggtgacagttttacatttactttttcttcttaatgcagctggatctaagtaaaatgttttgaagtttatcagaaactaaatgtacttttaaaacgtatagggtcagggttgggggaaaaatacaggtatagtaagtaagaaaagtgacccatgaagaaagcatcgtgaggttgtatgttggttgactgtgattaaaatgcggggctggtgtaagttgtaagtggtggctgattgccgtgtaactatgtacatgattgttgggatggctgtcccatattttgtatattggaataaaaatttctataaattattgtaactaaaagtaaatattctaaattaagtcccacttcttaagtcacatggcttctgtcttggaaattttacctttaaaagattatttaagacaggaaccaggaggcttgggaacagggaaagagggaaatgttgtattatgtgggtcttggggcctctaaccatcagtatagggttttttctttccttgatggcagtagaaagacctcattttcataacataactactcttgatactttctttaaaaacactttttattaaagattctatcatgaggtatttggctgggagctgggaggctaaagcgctcatgtcctggctcttcagtgaatttaactgtgtgaccttgggcaagtcacttaacctctctgtgcttcagtctccctgtcttgtaaaatgggagtaatacctacctcacagggttgttgtggggattaattagagataatgtctgtaaagcatttaaggttcttgaagaaggcactatataaatacaaaataatatctattaaagttggtttatttgtg

SEQ ID NO: 459 - protein, 370 aa, Homo sapiens
MEILMTVSKFASICTMGANASALEKEIGPEQFPVNEHYFGLVNFGNTCYCNSVLQALYFCRPFREKVLAYKSQPRKKESLLTCLADLFHSIATQKKKVGVIPPKKFITRLRKENELFDNYMQQDAHEFLNYLLNTIADILQEERKQEKQNGRLPNGNIDNENNNSTPDPTWVHEIFQGTLTNETRCLTCETISSKDEDFLDLSVDVEQNTSITHCLRGFSNTETLCSEYKYYCEECRSKQEAHKRMKVKKLPMILALHLKRFKYMDQLHRYTKLSYRVVFPLELRLFNTSGDATNPDRMYDLVAVVVHCGSGPNRGHYIAIVKSHDFWLLFDDDIVEKIDAQAIEEFYGLTSDISKNSESGYILFYQSRD

SEQ ID NO: 460 - DNA, 29352 bp, Mus musculus
  misc_feature (1)...(29352): n = A,T,C or G
tttgaacaagtaattagtatgtaagcagcaatatgacttttgaaaagctcatgaagtaaacataaaatagacattgcagggctcaacttggaggctcagagaagaaggaagggcctccacatcctcaccaacgctcctaagaccgtcagaaaacagagtgcctggatgctgtcttccttgcctggagtttcccattctcatgaaatgctgttgtctggcttgggagttggatgaggtctgatttctacttaattttatgatctaggacgccattttccaacgttctaccttctcagcatcttctaattctaccgattgagactttgctaaaatatttttggagtttttaccatgtcttttccttttttacgaattataatgtaaaagaggggataataatttcctaagcactattttgtttcacagccctcttatggcctctggacacctgaataagacacatctcctgcttgtatacaagatccattcatctactaagcatgcacatattagttaccatgtgccacacataagactgtagagcaagttctcataattagatttgtacatgcttaaatcaaagaacattgaaggttggagagatggcttagccagtacagtgcctgccacggagcatggagacctgcgttctgatctccagcacctctatacaagttggcagggtgataaatatctgcaatcctggtgttgtgaagaaggaggcaggatataaagacaaacagattcttggatcttgctggatatcttatgatcttcaggatcagtgagagagccggtctttaaaaaagtaagatggacattcatagaggaagacacccaatgttgacctctggcctacacgccacccccaccacgcacacacacaatgttttaaagaacatttagaaatttgtctgttgtgtagtgaagctcataaacatcttagaagccagagcatcaggagtcagatgaaggtacaaaaaaaacactcttaggacttttgttcagcagggtcctccttccacagctagaatttaggcatctagaacttcatcttaatttttatagtttcataattaaatggttacatcacaccttcactccagagctctaacaattaccaatgagcacaaatagtaaagtgaaatcattatttcataaatgagttattgattatattggctattcctggttgtcaacttgactctaaatggaatgaactacaatccagaattggagggcacacctgtgatccagaccttgaggttggaagacataagttctgacctggatcttggcatggggatcttgaggcatagtggccatgaaaaacttaggcccaggcaagaaagtacatgcctttaatcccaggagactgaggcaaagatatctctgagttcaagatcagctgggacaaagcaagtgcatatctttgttctgggccacattgtctgctagaagcctacatagggacattggaagaagaaagattcactcttttttgactgtttgcacgtaacttagttctacagaagaagaccgactgatacaactagcttcctgggactgagcaactactagattcttggccgtcccatccacagcgacccattgttgggttagttggactacagcctgtaagtcatcacaataaattcccttaatatgtagagacattccataacttctgtgactctgaagaaccctgactaatacattgatgatactctgtttttaaattctaagtgttgggaagtgagggtttctacaaacagcttacagagccatagactcccactggttatgtttaagaatattgcgtatcatgtgctctctgtgagagacatgatacatccctcacagtagagagctgaaggaacttgggggagacagattccacaaagctattgagttgtcagaagtagaagacacttttaaaggggagtaaggtcgactacagctcactacagcttatgctgtgtcacaatgcagccagaactatgtaataggagatgaacacaacatagatttcggttcagcttgcatcctggttatgcattttgaactcttccatgatggagatatctattataaatattggcctcttctcatagcataggcagtctcctacaatccctcagcactgttgcttttcaagtggcttgtcccttagtaatcataatgttgggtagtatttagtgagcttttgttataactaagcattacaccaagttctttgtttggggcttctggacagggatacagctttatactatacatagtatactatactataaacttaggtgaaggaacaaaaccattaaatctactttccaggcacctatgtggtactttggtgaagggttgtctccaccaaaaaaacagtttcagaatttctgacctgcacaaagcaatttttatcttctctatgtgcaattctcatttaattgccacagccttcctcgaaggtaggtggcatgtcctaacactgtgaccattttccatggtggagggttaagtcaacgggttatttaaaattctgcacagttgtttaactaataggaagaccagccaggactttaacccagatagagttaagcattttatgctagatattttcagaagcggggatgtgtttgggaacagattcccaaacattacttggcatattcacagccattctgctcttagtagatccagagatgctgtgtcttcccatcacaatgagtggttgcctaaatgatgggaagcagaggcacattaagagctatccctgtaactagcaagtttggctgtgatggtcatttctcttaggcacttgagccacttaagtaacgttgtcaagccaggcagtggtggcacacgcctttaatcccaggacttgggaggcagaggcaggtggatttctgagttcatggccagcctggtctacagcgtgagttctaggacagtcagggctacacagagaaaccctgtctcaaaaaccatatatatatattagttctgtgttacggaacctgaatatgtaacacaccttaggggatttccctcattaaacaggcaggtatacaggattcctggacaagaaggaaaggtgggtaaaaggacctcaccatcagtgatgtggttttccgttcttgctgggtaaacgtcaacaattttctacacagctcacaagctgctgtgaaggtagactaaatgagaataacaacctggcatttgagaaacatctcaaacaagactgttaaaagggcacatgatcaggcttaaagccaaaactactcaatctgtgaatttaacctgttagcactcctcttccatctctgcacctgaatgctcttccttataagctgccatactgtttcatttacaagaaaaaattctttaagagcaataaacaagccagcttatattcttaacctaacttcaatctttacctaattaaaaaaaaaaaaccttgtttaatcttgattatagatgttaaaagaggtctgcctcttgcttaacagtgggtagtgcttaaatgtaaagtatgtgctttttctttaaaaaaaaaaaaacaaaatgaacaaactttgtgtcacattgacttactctgtatagtcattttaactaacaatggctcccataggttcatatatttgaacattcagttgccagttggtgaaactgtttaggaaggattaggaggtgtggtcttgttggaagaggttatgtcacttggggagggctttgaggtcagatgcgcatgttatttccagttagtgccctttctgcctcatgttttaggattagatgtaaaatcttatctactactcaagagtcaagcctgcccacctttggccatgctccctaccatggtggtcatggactcatccctgaaactgaaagcctcaaataaacactttcttctacgaggtgccttggtcatgacatctttgcacaatgatagaaaagtaactaagacaccttgagaataaagaattctattctttagagcaactcaaggtactgggctcactgaggtccataagtaaggtgcttctcacactgtagcccattgccttaggctggacctcttgttgcttctgacatccattctaggttcttggtcatctgccacttagctcacaggcccttcttgtcactctaatatttctgtcatacgcttatatcatatgcaaataaaatagttgagaaaggccctcaacaggtataagtggagaccataaagaaggaagattgaaaataacaagcaagaattgggacctacatcaaggaaatatcctgaagtaaaagaagatttttttaataaataaataaatattaatattattattattaataataataatatttatttatttatttatttatttatttatttatttatttatttattatatataagtacactgtagctgtcttcagacactccagaagaggaagtcagttctcattacagatggttgtgagctaccatgtgtttgctgggatttaaactcaggaccttcggaagaacagtcagtgctcttaacctctgagccatctcaccagctcgtaaaaggagatttttaatgtaagcctaagtcagatgccagggggagtcaccagagttgccagtacagagacatgaactagcttcaccagtgaaatttgaagaaacaagaaagtgagttcagtttttttgttttaatccaatcatttataagagaaaacatggctgcgtgtaacaggtctccaaagtttcgtcttacaaatgctcaaagttgcaacgcttgcacctgagttacaggaagcgtctcacaagatctttagaaaattgctagagactgaattcaaccaaattataaaaacagaaacaagcatgagaagtataggccattggaaacactctactataggactagtgactgtataaacacagcgccaggattaacaagtagaatgctgctgttctaggccctgaaatcagagctgagtctattaatatgctttagagacaagagggaagtcaagcggtattggatgtctcagctagagtggtgaaggtgaaaggagataccctgaatgatgtggcagatactggaagttcaagcatatctacataaaaacaaatgctgagccactcaagcttttactgacatctatagacgaagagatgcagaggagacaagaggagagatatcacatattttcccccatcaaggtactaacaggcactatacaacaaaaccaaaaaatcaagggaggtatggatattagagttatccactaaattaaaaaaaaaagtcagccctcctaaacacgtaataaactacaaataaaaactgaagtataggaaaatattttttaaatggccagagtatagctatatctttcatacccaaaatgtaaacgaacctcattgactaagagattaacatatgcacattatatttttacctctctccttattttctctcttttgtgtcctagaatccaaaggacccggaactaacaagatcaataaaaatccaatgaagaatcaaagactgaaaaaaaaaaggagataaagaaataagagtgcatccaggtaaaatgagacagggaccacttgcacattttgtagcctgcttgctcctgaggaagaagtgaaattcatttctcaaaaccttgttgcatgacataaaatcttttgtgcaaagtacagaggattgaggggaagaagggctgcagtgtcaccttttgggagaggcaggcaatgaaatggcaaggtaggatgagacactgtgtaggggaggcttcaaatgtgggccggtaggcattgatgctcttggctatgggactgctccagagtatacagtaggacagtgctgggatgtaggcaacatcctatgtaaacacaaataaaacagtgtttccggggcctggtccccacccctttcctaacattatcatctggaaagttgttagaaactcacagttaggtcttaccctagacttcaaaaccctgaaaagcatcagaaacttggattggggggctgggggcggtacagtttgggacaggtattggctgaggtccagcattctctgtttgaataaaccttcagaggactctagttcccttcaaggtcggcgtgtcagtgccttggaaggtatctgggttagtgagctacttagaagtagttttaaagtgttgagaaacttgaacagtgtagggagaagtactcagccagccaaacaagagaagatagggtttggtggccaattttccacataagaaacaacagataaagtgactccaagggacattctgggagagactgaatgagtaaagagactgagcactgaattaagaatcattggaaatagatttgttttatttttcatgcatcttcaaaataaaactttcatttgtttgtaatatcatcagagatttataaaagtgactattgaataaaattcagttggaatcatatggctaagtttgtaatttccttcccttttacccctccctacccctcccccctgccccccaagcaaagcaatgacagctttttgctgttcggttaaattagtaagatgtaaacatgctaaaactaatttcaaacctcaagggacagggagagacgtgtaagcacaaagcacatctgccagagtgaggagagtcggaggcaggttccaattatattcagctttgcctggtcctctcttaaacagtctgtaagaggggacacgattactaagcagaagcaagcccggagggctcacacgggtccaagaatgacagcatgcccagcagcctgttgtgaaaggagggaatgaaaaccaccaggaggaatcacacggtgtgaaaaagggaagcacctaggagctggccaagatttaaccatgccccatcagaacgcattgtccctcacagatacattatttgctgcatctttctagttgtctaaatcacttaagtctttttctccaggccatactccctgctgcatccttggtcttgtaactgggaagttacaagaaacagttttgtttggtttgcttccctcccagtttccctaagagtctcttggccagctccccacagccaacaaaaacagctatgctcttaagatatgatgtatagtccacttaatttccttcctccccatcctttggtgtcgagctgctgtgaacattcctgccatacctcttgctcagcaggattacactgtaatatatgcacctttctccagcccgttctcattctaggttctgacaacgcactgactcctttaacaccttatttctccagccccgtaagtcagtctcacagtctgtattaaaaatgcatgtgatgggacacacttaagttacatacaaagtcacaagatcgagtcttctttagttactgactgctattagctatgattgtttgaatgccacgtgggctttgagtccctgatactttgaaacggactttcttcccccaccacctacacgatgctgagatattctgggccagactcttttatgctgtacggacaatatttcatcacaaagactgtgccaaaacatgtaaaagaacacacacacacacacacacacacacacacacacacacacaccccaaacaaaaaacaaccagcaaaatcctccattatctaagtgatggaagattgtcattaacttttgtcaccacctgctggtcaaaaagctgtatggctcatggattaactggacccggaagaggcagcatttgagatgcttcaactatatttgtatcacaggattatatgtagcagagaaaggacaagttgtttaaatataaagactcctaagattatttctttcttcattatacgttatatattctgttttatttaatattgtatactacaagcaaggaagctcttagaccccaaagctatgttcactatgacattttgaggtagtgggggagaatatgattacactatttacccaggctttcaaaacatgtggattagtatgagaattccaccctgtaccattgtaaaagcttatatataattttaggaagaattagggaggttctgatgtttcttagccccagtggttaacccagatcatcttcatttccctgtcacctctgaaagcaggcaccacactgttttgttaccccattgtactgctctttaaatgtcttgaccagtgctgttagtaaacataacatttttgttattgtttctttcttttttttccttagtggaaaatttccaaagaagtaggcttggctagagtgaaaggtgggagaatgcagtttagtcagagcgatctgacagttgaaggtttttcatttatccacgagatgctctggttaagtgattttggccttgaaactgtccagggaacaggactctgttctgatgagaaggctaggctgatctcatgtcaggcttcagagtggcagttaaggagactaggcctaaatctttgtttccaagaactgggcaattccaagcaagtccaggcctcagaaactgtcctgccacctggcctgaggcaaggacaatgaggtcagcagcagttcccagacctcctcagctacttcctcagcaacagcttccagcccccaagatagtaaaggaatgtccctagagatggagtaagataagggtcatctaccccagaatgccctaatgtgctttaaatcaggcctgtgagtacacttgcttgtctctctatcttggtaatgggcgattccaacatgctggacttctgcagaataaaacaccttgtgcttatatactattagagtctggagtatcattcttcagtgaagcatggatgcttacactgactgttccttcaggatgcagcatcctttagctggttctgtgtaacaacagttctttactcggtctcacatttccacataaataccaccctctcagagacaggctgtgccctgctcattccttttgaaaatggtcacactggacaattttactcattaattttgttgaacctctttctgaacaaatggtatgagagaaaatctccaagtggttaacttaatgactcaaacaggcctagttaggttttggagaggggtgtaaactgtctggtttggcattgttatcacttctggtacaagccaggaatgataagttatgtcccttcgggcaaatgtcctcaccattacctgggcaccaagacactctctttcagttgtttctcctagttttgtttgtttgtttgtttttgttgttgttttgttttcctctgttgaatcagaaccctggatttcattaactacctaattttgttaagatggaacctctcacgataaagcctctaaccactgagaagcagaaccacaggctccagctcaggttggaggttagagggcctgaagagcaaattctgtaagatgtagtaggtcgagagcttggctctagttctcctgcctcaaactcctctctggcattttcaaactttcctaaaatccgcctttcctagaactgggacatttactcctctgggtcggccatacagtgcacttctaccacctgcgaacccagaacattctattcttgcaatgtttgttaatgcattcctagatccccttctgatatcacagatgccacgggatgtgtccctttatagcgaattctactgtctctagcttagaataccactagcaagctttcattcagtgtggccctctacaacaggttggttcagaaatctacttatttttgtaccgcatggaagcaatccgttttgtagtacctcatagcctggatcagtcaagtctgtctactctcgatgtctttagcaaatactgccatgcagacgcttgaatccaaagttacaaagaacacatgcatcttttataaagccatgattccacattctagaacacactcaacaatgacagatgttcttgggatctggagggacagagaacagggactatgacctcataaacacccactggaacaaagactacgacttcataacctttcattcatcagtctcctcaagagaaaacggatgcatcagatggttaattccactttataatttccacttatgagtatgcattcacacacgtggagggaaagcattcttcatggtgctcaggcctgcttccaccctcatttccataacctgaggaagtccgggtaaaatagcagtcgaaggctgagcaaaatcaaagtccctgcagtgactacgttgcaagtttttccgtagcgtagcgcttttcttaacctttagtactcagagacgtcagtcggtctctactacaccaaagccctgcgtggagccgcttgtgtgagctgcgcaggcgcaaatctacctctcctaggtgggcgggagctgcccctacccagcccgagcggttggagccaagagtgttcttaggtgactcaggggcagcatcgacgctcgattgagcgggcttgggaaaggttcccagagggctgtgcgctggaggcgctggacgctgtcatggcgggcttgctgaaaaaggtgagcgtgtggaggtcaccgtgatgctgcgaatggggaccgtaggcagccgcgtctccctcatcggtgggcagagacgctaagaggaggggttgggggagtgttccgctgtcctggcagggggcgacagggtgcgtagttgtgtcgggagggtcggctaaccaggggattacggtaaacatcacggtcctgttttgtctctgcacagacaactggcctggtggggttggcggtgtgcgacactccacacgaggtaagtgcgactttttgtgtcgtccttctcaagcaagactgtgatcgaccgaacttgcccttgcaagattaacgagacccccgtgagctctggcctccggggcagcgctgagcttcgctgaccccgtggcatcctttttgcaatgcctccttttgccttcgccgtgacctcttaattaagacgcgtttcttcacggcattctcttagcgtcagtggtgtggagtattctcagctcccttcagagtcgcattttcattttccatcctttccctaccgacatttctgccttgcctttcgcacactggctgaccctgtcgtcctcatggttgcctccttcggtatccattggggaaacataaacaacaaccaagaccaaacaaacctaaacaaaaccactgtgatttatcccccctttcagcaattgcaccatttctttccttcccgtctacacacataactcgaaagcgttgtcagtgctcactgtctcttactccttgagtacacttaagcgaggcccaaactttttttttttaaggagttaccagtgatgctaaatttgctagtcagttcacatttctcgtaattgtaccgaaagtggcattgaaaatatccttacgtttatttatttgtgtgcatgccagtgtttgtccgtcagaaaacaactttctgaagttggctctctccttgcaccttgtagatcctggggatctttcaggtcacggggctgttggcaggcacctttgccctctgtgccctcacattgacccaagtgaagcatttttgacactcttgataatctgcattaagtactttgtttactggatgtcagagcttcgaagtttcttagtttgggatttttgtttgtttgttttattgtttattgtttctttccccctaattatttgccttttccagttgttccttcatttccccatgttgtagtattgaagacctagctcttagacaggttttaggtttaggttggctctcatggggtacagacaacagttaacgtttatatttccatatcaagtactgaccttttatagtcatgtgtgtgtatgtatgtattacacacatgctcttagttgacatcttcacttgtgtcaggcagctaggtaagggttagcatagccagctgggatgtctcatttgaaatggtcctggattgcttgcatgaccccacacctcacttgccactaagaaaatcctctgggttgacccctgggttatgcagcctctgttcacatctcatcacctccttggctgctgccattttttctgccaccatccttatccctgtgacaattacatttctcttgtaactgcttttccctgctttctttcagctggtttgcaagtgctaaaacatgttgggtatgcaaatctttctttaaaaccctcccgtggctttctattttaggggttgtccagatgacttaacagaccacgctccactgacatgtctgttccaggtttcacaaagactttattttgcgttcactgctagaactctgactagtacatagtacatagtgaatactgagtggctttcttgcagtctttatgaacttcagacttgtggacaacaaaactcacacttctatttctagatattcttcctctatgggttgaatgtctcttgatggtatatgaattgttctgtccccagctctgaatttggatgttgttattgatatcaaaaccttctactttcatatttatcctagtagtgaattgtgctgcatttttctgcagcagtctccagtttgtcctctttcgtcttccatcagatacaactgcggcttaagtccttgttcttgatcaaatcattgcggcagctttattcctgcccttcctgatctgtgtccattgttctttagctcacgaccaccaggttgattttccttaaacacaaaccttgtccttaagtcttttagtttcccccacaaaaaggcccaagtgcttggacttgtgctataaaacactgcagtctaacttgttctcccgcttacttatttcctaagtgcttgctttatagtgatttctagtgaggcgctctccaaggagatctgagcaccacgtgtgtaagctaagagttttctagaaagttcttctttatgatgtaacctaacattaagcgtaactatcacttcatgatataatcaggatgaaaactaatgctagtctgcagccttttttcagtatattttacttacatcatattttagcctgaataatctcatttcaagtattctttaaccgtgtttacctactgcacagcacagctgtagagctatgcactatttacttcatgttcttgatggtttttttgccatctatttctttattacttcatatataaattattttttccaacatcttcaagttttccactcgctatcccccaaactctgtctcagatgtatatttttttaatgaaccattctattttccgctggagtgattcttcccttataggatgctaatactgggaatgagacaatatgtggctggtactgctctgatccagcatcctataaagttctgcacattttacagatgaagaatgagggcatctggacagaaattgtctaggcaaccaggcagtggggctgtgtgagtgcaggtagttggctcttctgttgtttagcactccctctctgccctgtatcttaccctggactgccataagttgactttgtgttttatgatgttaatcatcttttcctcttttgttttttaccatacagcctcttatgtatacactcatatatatatatagtgggatccatgtccagtctgtctttatatccaaacaacacatggtgctctctacataggaacactgaaaaattcattcttactggaaaaggaaaagtgttctgtagaagtggtgattgctcgtgattactgatacactcaggtgtagggtgagtgcattcctgcttgagaggacagctctgggttacttctatggcgtaatgatgagtagtctctttttactgtgagaggtgtcccagttagttttttattcttttcactgtcctatgctgatcattctgactctcctgtgaatttctctaagactagatgcattcggtctcatcctgaaagatgaaaaacatgtgttttcaatttatttcatatttgtgtatatgagtggtttgcctgcatgtgtgcatatgcaccacttgtgtgcctggtgccagtgaagaaggtgtcacatcccctcggactggggttccagatgttgtaggctgctgtgtagatgctgggaatagaacccaagtcttctagaagggcagtcagtgcttttaactactgagccatctctccagtcactccccgcccctgccatatcttgttcaaaaaccttaaaatttgagtcagaatgaaacttaataaaatgctatattaaagatgaatatatgtattatattcataaatttgagagggtaagaattaaaatggtgccaaaattaatagtttaaatcagatcacatcctttcaaatttcttaaaaagaaaatttcaacttgccaagtttacatccccagaaaccacttaactgttgtgttggtgtgaagttacctatagttctgacattcagaaggcaaaggtgggatctttagagtcagctatagctaggccattcctgtctgcaaactctaggttcaatcacaagaccctgcctcagtgaatcacgtgggaagagatggaggtggatgcccagcctgggttctgtacatacacaagcacacacgtccatacagacctgcatgcttacatgtgcggccatgcatacatatgcatgtatactgcatacacatgctatccacagtctctttaattgtggacactaataaaatcagcaagttacatactcactctcctattccaagaaagaaaaacaggatacagttagaaccagatcactggaacagtaaaacccaacagtgtaaatagctcattgtctgacatctggaatgtactcatgaccttctgggctcctgatagcttggagtagactcactccttaggctctgtgatcctcagtataaacaacttctctggtaggctcaggcttcttcattctacatctgctgctgtccatggtggtctgcctatagtcctggcatctctgaacacatcctggcatgtgttcaatttgtagtatccattacctaaagatgaggaattctgcttttaataaatgattgatttccaaaaaggccattaactatatgttaatttggcttttacttttgatatatacacgcataatttttatgttatcacatatagcaagaatttccatatttatatattactttttcttaggttgtaaagaatgagattgagtataaatataaattttagtaaagccctgtttaaaattgtgaatcctcttagtttttccagtaagataaatgtgttctgtctaaactttggcggtatttcagcttattgaactgtgtacggtttggttttgcagaggctcacaatattgtatacaaagactcttgatattctgaagcactttcctaaacatgcagcctatagaaaatacacagaacagatcaccaacgagaagctggatatggtcaaggcggtaagtagctgagtcagctgggtttgttgggttgatttgtacatgcagtatggctggtaaggagtatttcagttgcttgttttaacgttcagtttgtactactcttccttagtgctgctctgctttttctcctttgcattcagcaagtgtgtattttgactgagtactgtataaagcctgttggagggcagcctggaagaagactggacccattgtggtgtgctttgtacctcttttcttgtctggttgtcagtgatcatttacctcttactcttgcatcatccacccgacctctaatcacagtagagaacaaagctcaggagaattggatggtggtgatgttacagaaagctatcaagacaattatttgaaaaaagtacttttcctgggcctgatggtgcaggcctataattcccagcttctaggaggctgaggcaggaggatcacaagttcagtccgtcttgggctgcagaggaagtgcaaagccaggctgggtaactttgtgaggctctgtttgaaaataaaaggctagaggtgtggctcagtggtggaactcctagcgtggatgagccctgggttcagctaatactataaacgaagcactttgttgtataggaagagcgccacatttggttttcaaatctacccaaagctacactgaacagtgttgtcactaacactgagtactctgtccccagaagtctgtatgtcaaagctttagtatataatagtattgctttatttagaagtaaatcatcaatggaaataattaaaattaaattcataagggaggggccgtggccccataagaattagcttgtgtataaaatataaattagacactaggcagccagtgtttgccccttgcactcgagtgcccagcaagtgaaggatgtaagagcacatagcaacgaatcagctgtctgggacttgagacttgagaggaaatcctcatagacccaactgggttgtcacggtgactttggacttctctctctaactattagaaaattgtgtgtgtgtgtgtgtgtgtgtgtgtgtgtgtgtgtgagatgatgcttgagattgaacctaggtgctcacacaggtaaggcaagcacaccgtcctatcccagtccctccttttattttctgttttgacataaaaccaaactttcactaaagtgctcaggaagaacttgagcttgctctaagtatggttcaggcatgcctaaagcttgcaatcctcctgcctcagtagccagaataggtgagattacacatgtgtatcacctggctcagctgaaatttccaatgtttaatccagtctacgtgttttgttgtggtggccaactacatggcacattttacagctttaagttcagcatctggtggggagacagtgagagaagtgacatgctgcacaggactctgtccaactgtgactgagtttcatcctcagttatttcagactttgaagaattaataaagtgttcacccaggcacaagtgataactgaaaatgaattattattaggtcaccaaaaggtcagtcagtaaatcctcttcctgagagttaaatagcagtgtgagctttaacttacctgagtcttagcttgccaagtgtggaaggaacttatgaggttaatgttagcttgatttgcttaaagaagatgagctgatgtcttgttccctcacagaatatgaatgtccctgctgttcatctgtgagtccgcccactaccttggattcttgctcagctttccggctcagtgacccttattcatttatcttgtgtgttcccttttctcccccttgccttttatcgctgtttctgtagtctgtgatgtgtacgttggctcccacttctctcagaattccctttcgcttaccattgtaagtctttggatttgttcatagtcagtgtcacaggtctctgcatcgcctcttcacataggaacttaagatctttgctgtcacttcagctgcttttaaattatttatttgtagtgcctcattgccagggctggactgtgttctcaggctgtaaattttgtctttttcctgttgaagaaagatcttgtgattttcccatgtttctttccgagtttctgaaacccagctttaactgatagagttggagggtagagtcgtggtgggaactacggtctcacaggttaattgtgacttggtctgtaggtctgctaaggtctagcttgtgtttatggtcttaatctaccatcatcttgttaggccttacacttcagcagtttgaagctgatacagttctgtggattccatggagcttaatttttgtagttactttattttcatctttgaatgtccgttaccttgtttgacttgtttgaatgtgcacgctccaaaaacctgagggtgtagttcagcacctgaacattacctcatgggttctgctttcccataccatcagaagtaaaggttgttattgttaacactcttttcatttttggaacaaaaacaccctgataatgactgtcttatttacatatatatgtataaatgacagtgtctggatttcaaaaaattcggcttattagaaaaaaatttccttaggtaccatgttaacaattttcttgaagtatagaatagtgtacatttaaaatatgcagaagtcacaagtgtagggtttgatggattttcagaatcaacacattctaattaataccaggcaaaaaagtgacatttccacatcaccaaaatactttttccaaagttactaacttccgaatgataactactgttttattttttatttttctatttctaaactttttaggaatggaatagttttcatatacccattcatgtctatattttcctacttaatagtatatttgaagtaactatatgagttataccatatagttatatgccccttatcattgctatgtagtagtctattatatctcagtaccataattaacagatcagttctattggtggtaatttaggttatttctagtttggggttgtaatttgtggctgctataatgttgtttgtttatttattcactatttggtatatactcagaagagggttttttttcatatgatagcatttattgttaattcttttacatgaagtatagaaaataattacaaaaataaaatatttgaaaatctattttagaaagactaagttgtgcatcatttgtcttacctttgttaagaatactttaataatttttaatattaagacaaaagtaacgaaatagcagagaagtgaaatgaatttctatcaaattttgataaaacataaaaccatagtgagagaaaatttacttgtaagggcttttataaatggctttttaacatacaggatattaaaatattcatatgtgcttctgtgtttagcctttttttcttttcttcttgaaattataggagccagatgttaaaaaattagaagccttgcttcagggtggtgaagtggaagaggtgattcttcaggtaaagagcattggacatttaatgcttgggcgtctagtactgggtttgacttgcagcctgtggctaagggagaccttgggtgaaatttgaaagccacagatgtggatgaggacaagcttttaagtgtctaagagcttatgaacactaattcctacagatttcaatctcagaactcagaggtgacctttcttagtagtgactgtgaaatttgtgtaatattcagtatttgatggtgtactatatcatgactttagaatcctgactatgaaggtctgtgttctagcagttaacttcttgccattattctgaaaatacctctggaataattaatcagatgagcttatttttcaattttctttattaacaggctgaaaaagaactaagtctggcaaggaaaatgttgaagtggaagccatgggagccattggtggaagagccgcctgctaaccagtggaagtggccaatatgacctcagtgtcagatggtggatgggaattaaatgtgcaattaaatgctctgtgatgctaaaatgtgtccatgttattgacttcttacttaaaggaagtagtgtgtattgtattttggagatgcttagggaacaacattggttaagacaacgccgtcttctgagtcctttagcactggcaccctggcttgctcttcttcatttccaatgtcacacagtgagcatgctgtgcctctgtcattcttcattgaatttctcctgttagtgttgggcatctttgacagacgtagttcagcagacaagaaactgactttcaacattggtgtctcctgtccttgctttgcacatctggacttaaggctgaatattccaggtcccggacagtcttcctgttggaatgaaaatgacgtttaccttggataaccatagatatattcagcttggggcgattgtgaatgggtgtgtaatggtttcataaagatgacgggtatacactgggactttcctgaacaaacagtacataataccctactagagtgataggctgcacttactggaggctacatccgttgtgtgtgacttccagcaagaggcagtttccattgtgcccctagtctcaccctcgacttccagatttgcagaacagaagaaggcttgtcctgatttttctccctttcctaaagaagagtgctgctaagtctgggtgtttctttaaaaggatgcaaatttacattcgtggggcaaggctcatgtaaagtctactgatagcttcttagaggtatacaagttatgcccttgtatacgcatgcgctggacattagtgaatatgccaaacatcacacatttttgtttacattaaagttttccataaaaacctggatagtgagatcctaaattatacattcagattgaagttagttgatggagactacggaaaagtctctttaaaggtagtcaactaaaactagttagtggaacatagtccatccttgaatcagaagtgtgcgtgtgtttaatggtgcttgaaattgaacctaggccttcacacaagtgaggcaagcacactgtgtgtgtgtgtgtgtgtgtgtgtgtgtgtgcgcgcgcgcaaaaccataggacaacttgaagtgtgttatttccaagtgtgtgtgtgtgcgcgcgtgcgcgcgcgcacgcaaaaccataggacaacttgaagtgtgttatttcccaagcagcattcatatcttcttttaatttacttttttttttaagacagaattatctcattgtcttaggaaggttctgcattggaactacaaatatatgccacaactctgctttgttttgtaaacatagcttctagaaggcaaatttaggttcttgcaaatcaagcattctacagactgcctctctccaggttcctggtgtgaattccttggtttttcatagcgcgtgtgcaagaagagctgagaaagctaagagctctacccgggacacagactgagctgctactccagaatattctgtgtacatggctgtgtggaatgggaacatagcaaaccacatgagtaaagacagagtgtgttttgaatgtgccatagaactcataattgtgttccctacactgttagttaattttcaaagcagtcttcaaatgttgcatatctaagtataacaatgctatattaatttctgtatatgattgtaaattgcaagatatgcttcaggtaccatgattcatattcattctctctctctctctctctctctctctctgaccttgtagctttcttagagataaacatatactacttgttacagaatatcacattttactctttggattcctttctccagagtaaaacaggccttcagatctctgcaagagaaagttttccatagctcatttgtaagtaaacccaacctaagttgctacaaggctgtttgtggtctctacccactttagtatgaacaagtgcttttgtcacagctgtccatgtatttgattgaggactgaagatgcatcagtacaaactatctacattatctttcaaaattcagtgacatcttgaacatctggtggacctcaaaaatttcaagaggatggggcttcacaagttcacaaatgatgcaaattaagtcagggataagttcaaaacaatttttaggtctttggtattataaatatccattataatagttttcctacttacctgtttaggtctttagtattataaataattattctaatagtttttctacttacctgttttttatagagatacatttccatgtggagttactttgaaatgcttgatttcataaagccactaggtggcgactttgtaaaagtggaagcacattaaaaggaacagcctatgactaagtgcaagatgacattttgaacaagacctaagcaagggcatagatttaggataaaaagtaaaattggataaaaaaaaaagcatggatttgtttttattttctgattaatactatttttctattgctgttttcattcaggggacatcgacatttttatagccaagcacgtttatgtatttgtgagatagaaagtgtgtgtgtgtgtgtgtgtgtgcctttgatgtgttagtaacctatccaagtaacctatgtagatagaccatctaagaaaagtacattctataaagctaagtttgtagtacattatcagtaagttattaagacaggtggtgggtatcaagctacatttagcagtggaaagaatatgaatttttctgctgcctctattcctaaccctggtgtttgcatactgcccctaacaggagaataatgaatgataagcctttgaaagtgatggggtgggaaagtgatgtcagcaaattgatgagagtggatttgtagcaacaaggtataaagaaggcaacggcttttataatgaggggaatggactttataacacgttttttaatttcattaagctctttaaatatcaaaggatgttaaacatagcacatagtaagggttttaaaaaatctgggctctcgattcagattggattttaatactggctctcatttaatctttgtgtgtttcatttttttttttaaatagtatggcagtgctaatagcaatccttcaatagaatcattgcattggctattcgaaatacagatacggtgctatgcttaatgatattactaaacctttgctgttattgtgagataaccacatgaaatttgtgcagggaacatatttgatcctttctctaaaactgattttaagactaaagaacgtggtgatagaaaaagctttgcttctcctgacttataaaagcagagtagttattaattcttcctgttctttctggctgccaggaagctaaaggaaagatcttaactggacaaaagaacttaggtagcacacagttgtgttcctttataatccctgtctctcagtgttcacatttgcatttttaaaagaaggtaacccgtgagcttagactgtttacaggactgccttttcagaagtgtgagagaactcccggagaaaggttaacttggaataatctttaggtctcagttcctggcgccaaacaatctctacttctggctcctctgcttttgctcttgctggctgtttcctttcccactgcgcgggggcggtgccctggcagaggaagctggcagttgctaggatacgccagcaacagaacatctaagcagaaaggagctgcttccgaggactggtgaagcctcttggtctgtgatagctatttcttgaacaggtaagaggacacgtttggcagccctttcctagatggctgctggttctaactgggggtgagcctggcatgctaggccttgcaggggtgccgatctctcttggatacagggctctctggtcagaggacagtgctccttaactttacttaaaaacagaaaacttacaaagcatcacaccgcttttgacccttctctagttacccccctccccactgatatggtatcttgaatcaacaagatcactctgggaggtttacaccaccccgcctcctgggtgctaaggagaggagagtgcccgcatctggtactggtctatggacaccatttccagtctgcagggaattcagcctttagactttccttaccaggaatgctgctttcctccagtcattgtcttacctactaacaaaaacttcagtaggcctataaaataaaagacaagacagaatctctgtcttaccagtattctacatgtagcaggctttaatgggaagaaatgaagtggcagactttttatatacaatcttaatagccactgagttttattttaaaagtaaaataaagactgaaacatatttgaatggataatatataaaaatgaaggaaattcagcatccttggagatgcatgcccttagcactggggagatgaggcaggaggatggcaagtttaaggccagtctgggatgcataatgagatgctgtgccaagaggtccatacctccatccaatagcgtgacactctgtctttgttattgttctattgctttgaggagacaccatgaccaagccaactcctagaaaagaaagcacttaattggaggcttgcttacacttagtaagttagtcccttctcatcatggtgggtgagcatacaggcctggtactagagcaatagctgagagtactacatcctggtccccagggagaaagagggtggtgggcagagaggcatgagcttttgacacctcaaagcccacccccagtgacataccctctgacaaggtcatacctccaaatccttctaatcctatcaaagcgttccactccctggtgactaaggattcaactatatgagcctataggggccattcttcctcaaaccaccgcatactttaacaatgaaacactgaattgtaaacatcttaaaaccatttcagaccttccctccacacaaatatcaaagggctggaatacagtgtcaaattttaagaaaagaattttatttatggactttaatggagatctttgtgtcttttcacctaattatagaaacttctttcatagtgtgtttaaatttgtaaataagacgatgtacatttgttgcagccctattttctacttgtataaaaattgaagacagggggctggagagatggcttagtggttaagagcactgactcttcttcctgaggtcctgagttcaattcccagcaaccacatgggtggctcacaaccatctgtaataagatccgatgccctcctctgctgtgtctgaaaacagctaccgtgtactcatatacataaaataaataaaatcttaaaaaaaagaagacagtttaaatgttcatcagtagagcaacaatagaatatactgtggcttacttgtctctgtaatgaagttactgtacaattattgagacaaatgaggtagacatagtactttaaaatgttaaatacagaatgagtaaaacccacaaagctgcatcaatgtttaaaaacgcagaaaagtttatatattttaggatatagggttccaattataaattcatcaaggaacaatttgtaaaattatattgcttgactctaagaagtaaaactagagtattaacaatagaggtttatttcactgtttattttctccctttctgttctactggcttaattttttttccttttaagcatattctgtgttcttaaaaactatattaacttaattaacagtactcttttaacattaattgaaaaacttgcaaatgaataaaaacaccgcaaatcaaaattaagcagacccaaagtctataaaactcagtgaacttctgtgccatgagaacaggcatccggagtagaagttgtggaccctctcatacaatttgacacttcccagactgaatagattttatgtacttactcaccaccaaacccaaatttggtcatgacaaaattagaattacaaaatagttatctttaaattccccttcctggcttttgttattaaaaactgtactaaagtttagaaagttgaaagctaattaagaacatcttttcaaatcgtacctgggatgctgttgatactatttatgctaggagcatccctgcacttccagctcgtcctgtaatatgtgtgcttgatcatttacatgtaaaacttgctgcggtgagtgtttatacacatttctgtgtgcaagtggagtgtgttaatagacatatggggagtgttaggaatagttattaattagcagcagactgaagatggaaacctgctggatacactctaccccattttaaatcattcccgtgtttcagactaccaaatacaggacagtttctgattgtgaaattagcgtttagcttcgggaggtgaccacctgtcgcatatagtggggcaaacaaatatcagcttgtttgtgttgatggaattggcagtcccaagagcattcctgtcattatggtgccatggtgccgcctgaaatgaggtgatacagtcagaggatctcttgtcagattggcaccatgttgcttgggctttcagtcttcaggactgtgagttagataaagctacctttctttttaaaacatcaatctcaggatcttaggatagttgcctcagtccctcctgaagggagcaccctggtgacttcccactaggttccatcatttaaagaagcttggaacccccaagatacaattcacaaaccgcatgaaactcatgaagaaggaagaccaaagtgtggatgcttctatccttcttagaagagggaactaaatgcccatgaaaagagttaaagagacaaactgtggagcagagactgatagaaagaacatccagagaccctggggatccatcccatatacagtcatcaaaaccagacactgttgtggatgccaacaagtgcttgctgacgggagcctgatatagctgtctcctgagaggctctgccagtgcctgagaaatacagaagtggatgctcatagccatccattggactgagcacagggtccccaatgaaggagctagagaaaggacccaagagctgaaggggttagcagccccatagggggaacaacaatatgaaccaaccagtacccccagaactcccagagactaaaccaccaaccaacgagtacagatggtggggctcatggctccagctgcatatgtagtagagggtggcctagtcaatcatcaataggaggagaggcccttggtcctgtgaaggctccatgccccattatagggaaatgccagggccaggaagcaggcatgggtgggttggtagtaggcagagggggagggaaaccaggaaaggggacaacatttgaaatgtaaataaagtaaatatctaaaaaaaattcttctagaatcatgtaaagccaacctcgcatgaggttacacactcagtccaaacccataccagtgtagtgagactgcatggatagctgtacatggtactctcaatgcttattgtaaaccaaagaaatcctgttattgtttgaagaagaggcttctcctcttcccttctcttcccttcccttcccttcccttcccttcccttcccttcccttccnnnnnnnnnnnnnnnnnnnnnnnnnnnnnnnnnnnnnnnnnnnnnnnnnnnnnnnnnnnnnnnnnnnnnnnnnnnnnnnnnnnnnnnnnnnnnnnnnnnnnnnnnnnnnnnnnnnnnnnnnnnnnnnnnnnnnnnnnnnnnnnnnnnnnnnnnnnnnnnnnnnnnnnnnnnnnnnnnnnnnnnnnnnnnnnnnnnnnnnnnnnnnnnnnnnnnnnnnnnnnnnnnnnnnnnnnnnnnnnnnnnnnnnnnnnnnnnnnnnnnnnnnnnnnnnnnnnnnnnnnnnnnnnnnnnnnnnnnnnnnnnnnnnnnnnnnnnnnnnnnnnnnnnnnnnnnnnnnnnnnnnnnnccctcccctcccctggatttctctcccccagtaaaccaaacccccaaagtaatagtgtaagcagtggtcatagcctctactttgtcacactgagttaagggccaaaaaggacatccagggtccatctgtggcagattgcctctgtcaacaggaagctttatatcatatctgtctacttcaacaattgtatattttatgtgtgtgtgtgtgtgtgtgtgtgtgtgtgtgtgtgtatgcatcttctagaatggagataactcatcttctagtagggggataattctattattttttgttttcccataaggatagtactcaaaatggaagagccagaaagagattttacccctcactctacccctcagactgctgggtttaatctgcactgggcagagctatagaaattcccccttctattgattgacttctttctgtcctggctcctcctgctctcaactaatcattatgcacactggctttgggatgacctggaccacattgggctaaacactgaggcactgtcattttgcttcccaaggtcaagtcctcggttactgtaactttgactcaaattagcctgcagcatgtcctacagttgaaaggatatctatgtggggtcagaggtcattgaggtctctgcttctatttgtgagagcagagctaatgcagagtgtactttttatccagggtacattgtctggctggctctcttgaaatattgaatcctttctattggcaaaagcataaataccatattatatattctgaaagaaatggtcaagccctttcttaaagagatgcttcactgaataagaaagaaataaaaaaaaaataatgttttccaccaaatgctctcagaaaatgtcatattccaaatcccatttataagattcttggttatttttaatattctgtaatttttaaaaattaaaatctcatctgatgcctgtcacccataagaaaataaaccatcccataatcagcttccaaacgctgacaccattgcatacactagcaagattttgctgaaaggacccagatgtagctgtctcttgtgagactatgccggggcctagcaaacacagaagtggatgcccacaatcagctaatggatggatcacagggcccccagtggaggagctagagagagtacccaaggagctaaagggaactgcaaccctataggtggaacagcaatatgaactaaccagtaccccggagctcttgtctttagctgcatatgtatcaaaagatggcctagttggccatcactggaaagagaggcccattggacttgcaaactttatatgcctcagtacaggggaacaccagggccaaaaagggggagtaagtgggtagaggagtggggggtgggtannnnnnnnnnnnnnnnnnnnnnnnnnnnnnnnnnnnnnnnnnnnnnnnnnnnnnnnnnnnnnnnnnnnnnnnnnnnnnnnnnnnnnnnnnnnnnnnnnnnnnnnnnnnnnnnnnnnnnnnnnnnnnnnnnnnnnnnnnnnnnnnnnnnnnnnnnnnnnnnnnnnnnnnnnnnnnnnnnnnnnnnnnnnnnnnnnnnnnnnnnnnnnnnnnnnnnnnnnnnnnnnnnnnnnnnnnnnnnnnnnnnnnnnnnnnnnnnnnnnnnnnnnnnnnnnnnnnnnnnnnnnnnnnnnnnnnnnnnnnnnnnnnnnatgggcctctctttccgtgatggccaactaggtcatcttttgatacatatgcagctagagtcaagagctctggggtactggttagttcataatgttgttcctccgatagggttgcagatctctttagctccttggatactttctctagctcctccattgggggccctgtgatccatccaatagttgactatgagcatccacttctgtgtttgctaggccccggcttagtctcacaagggacagctatatcacagtccttgcaacaaaggcttgctagtgtatgcaatggtgtcttcgcttggaggctaattatgggatggatccgtggatatggcagtctctagatggaccatccttttgtctcagctccagactttgtctctgtaactccttccatgggtgattgtttccaattctaagaatgagcaaagtgtccacactttggtcttcgttcttcttcagtttcatatgttttacatattgtaccttatatctcg

SEQ ID NO: 461 - DNA, 762 bp, Mus musculus
gaaaacggatgcatcagatggttaattccactttataatttccacttatgagtatgcattcacacacgtggagggaaagcattcttcatggtgctcaggcctgcttccaccctcatttccataacctgaggaagtccgggtaaaatagcagtcgaaggctgagcaaaatcaaagtccctgcagtgactacgttgcaagtttttccgtagcgtagcgcttttcttaacctttagtactcagagacgtcagtcggtctctactacaccaaagccctgcgtggagccgcttgtgtgagctgcgcaggcgcaaatctacctctcctaggtgggcgggagctgcccctacccagcccgagcggttggagccaagagtgttcttaggtgactcaggggcagcatcgacgctcgattgagcgggcttgggaaaggttcccagagggctgtgcgctggaggcgctggacgctgtcatggcgggcttgctgaaaaagacaactggcctggtggggttggcggtgtgcgacactccacacgaggagccagatgttaaaaaattagaagccttgcttcagggtggtgaagtggaagaggtgattcttcaggctgaaaaagaactaagtctggcaaggaaaatgttgaagtggaagccatgggagccattggtggaagagccgcctgctaaccagtggaagtggccaatatgacctcagtgtcagatggtggatgggaattaaatgtgcaattaaatgctctgtgatgctaaaa

SEQ ID NO: 462 - protein, 75 aa, Mus musculus
MAGLLKKTTGLVGLAVCDTFEPDVKKLEALLQGGEVEEVILQAEKELSLARKMLKWKPWEPLVEEPPANQWKWPI

SEQ ID NO: 463 - DNA, 879 bp, Mus musculus
gaaaacggatgcatcagatggttaattccactttataatttccacttatgagtatgcattcacacacgtggagggaaagcattcttcatggtgctcaggcctgcttccaccctcatttccataacctgaggaagtccgggtaaaatagcagtcgaaggctgagcaaaatcaaagtccctgcagtgactacgttgcaagtttttccgtagcgtagcgcttttcttaacctttagtactcagagacgtcagtcggtctctactacaccaaagccctgcgtggagccgcttgtgtgagctgcgcaggcgcaaatctacctctcctaggtgggcgggagctgcccctacccagcccgagcggttggagccaagagtgttcttaggtgactcaggggcagcatcgacgctcgattgagcgggcttgggaaaggttcccagagggctgtgcgctggaggcgctggacgctgtcatggcgggcttgctgaaaaagacaactggcctggtggggttggcggtgtgcgacactccacacgagaggctcacaatattgtatacaaagactcttgatattctgaagcactttcctaaacatgcagcctatagaaaatacacagaacagatcaccaacgagaagctggatatggtcaaggcggagccagatgttaaaaaattagaagccttgcttcagggtggtgaagtggaagaggtgattcttcaggctgaaaaagaactaagtctggcaaggaaaatgttgaagtggaagccatgggagccattggtggaagagccgcctgctaaccagtggaagtggccaatatgacctcagtgtcagatggtggatgggaattaaatgtgcaattaaatgctctgtgatgctaaaa

SEQ ID NO: 464 - protein, 114 aa, Mus musculus
MAGLLKKTTGLVGLAVCDTFRLTILYTKTLDILKHFPKHAAYRKYTEQITNEKLDMVKAEPDVKKLEALLQGGEVEEVILQAEKELSLARKMLKWKPWEPLVEEPPANQWKWPI

SEQ ID NO: 465 - DNA, 36892 bp, Homo sapiens
caagagatggataacatccaagtgattggaatttgaatattttcgtctattttaatcattagcttagcagaatgtttgttttttttttctttccaaggttgagagaggaaataatagtttctgattctgggttattttcgcttttgctaccagtcttgaaaaataaggggaaactggctaagcattacctgtcccctgtacattttcagaaatgagctccccagggtctgagaattgagatgctttcttcctgttgagtggtttttcctcatgcctctctcagtgattggctgtggaggagcgctccagaatcctagattccaggctaacattttaaccacctaactttggcaggacccagtccctcacaaaagagcttgcatcactgagaagcagcgtaggaagtcctaactcttccaacacttaattttggataaacaagagctcttttattggataggctagaggcctcacaaagcaaattttgtaaaatgtgagacccagatttttgctctaagtcacctggatctggcctactaaccttatttacagaacttcccaacattcatctccttcctgaagaggataagaacatttactcctctggcaactctctcccacctgagaacacagggcctttgatccccttgctactcacatttagacattctgaaatccctttctgatgccaaggatgatgttcctaattctactatcactagcctagaataccactctcaagccactgcccctctgcaaaaggattggcccagaaatctacacattttctcactacatgaaacttaattatgcagtaccttagtcaggatcaaatagctctatctagttttggtgtctttagcaaatatgatacagcagaagcctgaacccagggttacaacaaatcaacacatatgcatctttcatgatcatatgattctatattctagaatacatcctacaatgataaaaattcttagaatctggaggaacagggaacaaagactatgacctcataagcttctattcatctcagttccagtgactataccagcattgcctcgtttgaaaaataaggtcatttcggccaaatccaaatgtggtttccagaaaagagtgacttagggtatccaaatacataggtcccttcacagaggagcaaatggatatataggtgattaattccaatgtaatagtttctttatatttatgaaaatgtatatatatacatgcacatgtatctttaaaatgtcattagtacatatatgtttgttaataaatatttcttctgtcctaaattataattgtggatgatataaatactagaaattaaaaattatgatggtaatttggtaaaggcctatttttcagcaatctgaactggaaaggctgtatttccatggttcatgtttctaggggcagctatcctaaggaagaggggagcatattattaaactaatctatttctcagggtattagttttctagggttgctataacaaaagtgccacaaattgagtggcttaaccaacagaaatttattatctcacaattctggaggctagaggtccaatatagaggtattgacagtgttagttccttctgagggctgagagaaacaatctgttctatgcctcttccctaacttctggtggtttgggggcaatctttggtggtccttggcttgtagatgcatcactctgatctctgccttcatctttgctagtggtactgaacagtgtgtgtttctatgtccaaatttccacttttaataaggacatcattgacactggataaggtctcactctaatgacctcatcttaacttgattacatctgcaatgaccctatttccaatgaaggtcactttttttttcttttttttttttttagacggagtctcactctgtcacccaggctggagtgcagtggcatgatctcggctcactgcaacctccacctccctggttcaagcaattcccctgtctcagcctcctgagtagctgggactacaggtgcgtgccaccacgcctggctaatttttttgtatttttagtaaagacggggttttaccatggtggccagactggtctcaaactcctgacctcaggaaatccacccgccttggcctcccaaagtgctgggattacaaggcgtgagccactgcgcccggctaacttttgtatttttagtagaggtggggtttcaccatgttggccgggctggtcttgaactcgtgacctcaagttatccatctgcctcggcttcccaaagtgctgggattacaggcgtgagccaccgcacccggcctgaaggtcacattttgaggtaatggggattaggacttcaacatataaattttgggggaaacaatttgtattatggttccccagagaaacagaacaaatatggtatataaaaacatatgttatctggggaaccctaaagcaaattgtttctccctaaattcgtgtgtggatgtgtgtgtgtgtgtgtgtgtgtgtgtgtgtattataagctaaatagccagatagctggtaaaacatttctgggtgcgtctgttacgtctgaggatgcttagagaaaagattagcatttgaatttatagaataaggcaaagaagattaccctcaccaataaggtggccatcatccaatcccttgaaggcttgaacaaagagacagaagaaaggtgaattcactctccctgtttgagctgagacatctatattcttctgcctttgattatcagtgctcttactcttggactgggaccaggattgataccattggctctgtgggttttcaggcttttgggcttggactgaatcacaacaccagctttcctagttcatcagcttgcagacagcagattgtgggacttttcaacttccgtaattgcataagccaatttctataataaatctctctacatgtatgtgtgtgtgtatgtttatatgtacttgtgtgtgtatgtgtatatatatgtgtgtgtgtgtgtgtgtgtgtgtgtgtccagatgcttctcaacttacaaaggggctatataccaataaacccatcataaaattgaaaatatcataagtcaaaaatccatttaatactccaatgaactatcataaagttaagaaatcataaggcaaacaatcgttaagtccagatgtttcttgacttatggtgttacgtcccaataaacctatcttaacatcaaaaaatcgtaagtcaaaacattgtaacttggagatcatctgtatatgtgtgtgtatgtgtgtatgtgtatatacacacacacacaataggatatataaaaatatcctatatataggggtattttatatatatctcctatatatatggctatttcatatgtgtatatgtgtgtgtgcatgaaattaaaatgaaatattaaatatcccactggttctctttctctggggaaccctgactaatacaggaggttaggtctgagaagtggggcagggccttgtggattgcaaggtgtaagaactttgacttttacagcttgagtgaaaaaaatcatgggagaattttgagcaaagtactttttaaaagaattattctagctactgggttgagaataaaaaaagtaaactaataaattaatagaagtcaagtaggtggtgccatattacacatactgggtgaggcatatacatataataactcatttaatgtactccagagagggaggcaaaagtcaaagtagggagacctgttttgggtgttcttttcttgttgttgttttattgatttacaaaagttccttacatattctaggcatcgcctattttttggtggctatatgggttgcagatatcttcttcccgtctgtgttgttttacaatttaagttgtgtctcttgttattcagaagtatagaatattaatgtagtcaaattcaccaaccttttttttgatagattttatttcattttttcatagatgtttgtattgggtcatactgctcacagtcctgccacatgcagactccttcttcacactgcccatgatgtggcatctaaacataaatctcaatcctggtgcttcctgtttagaacccttagagaactgcctgtggctctgtgaccctcatcatttagcctcctgtaggtctactggctctaggatactgtgataacagccacgtatatgtataaaaggcacactttatgttattgtgctttgctatattgttttacttcgcagatattttgcaaatttaaagtttgtggcaactatgtatcaagcaagtctattagcaccattttttccaacagcatgtactcacttcatgcttctgtgtcacgttttggtaactcttgaaatatttcaaacttcttccttatctattatggtgatctgtaattactgatctttgatgttagtgttattaagtgtcttagagttcaacaaaccacacccatataagacaacaaacttaaatgttatttgtgttctggttgctccaccgactggctgttccccatctctctccttctgctctagccttcctattccctgagatacaacaatgttgaaattaggccagttaataatgctgcaatggcctttaagtgttcatgtgaaaggaagagtcacaaatctctcactttaaaacaaaagttagaaacgattaagcttagtgagggaggcatgttgaaagctaagatgggccaaaaagtaggcctcttgcaccagttagccaagctgtgaatacaaagaaaaagttcttgaagaaaattaaaagtgctactctgttaacacacgaatgataaaaaggcaaaacaggccaggcgcggtggctcacacctgtaaccccagcacattcagagaccgaggtgggcggatcacctgaggtcaggagttctaggccagcctgaccaacatggtgaaaccctgtctctactaaaaatacaaaaaaaaattagctgggagtggtgtgcctgcctgtaatcctagttactcaggaggctgaggcaggagaaatgcttgaaccagggaggcaaaggttgcagtgaggcgagatcgtgctgctgcactccagcctgggcaacagagagaaaactctgactcaaaaaaaaaaaaaaaagaaagaaagaaagaaaagaaaaagaaaaacagccttattgctgatatggagaaagttttagtgacctggatagaccaggccatccacaacattcccttaagccaaaacctaatccagagcaaggccctgactctcttcagcactatgaagcctaagagaggtaaaaaaagctgcagaagaaaactctgaagctgttagaaattggttcatgaggtttaaggaaagaagccattttcgtaacataaaagtgcaaggtgaagcagcaagtgctgatgtagaagctgcagcaagatccagaagatctagctaagatcactgatggagataaccacaggaaacaatagatttttaaaaatgtagatgaaacagccttctatgggaaaaagatgctatctaagactttcaaagctagagaggacaagtcaacacctggcttcaaagcttcaaaagacaggctaactctcttgttacaggcttatgcagctgttgaagcccatgctcacttaccatcctgaaaatcctaggaccctgaagaatgatgctaaatctagtctgcctgtgttctataaatggaacaacaaagtctgggctaagaaaaaagaagatttctttcaaaatattactgctcattgaaaatgtacctggtcactcaagagccctgaggatgaagatgtacaaagagattaacattgttttcacgcacaacatgctgcagtcatcattctgcagtccacgagtcaaggagtaatgtccactttcaagtcttatttaaaaaaatacattttataaggctatagttaccataaataccgattcctctgacagatctgggtaacataaattgaaaaccttcttgaaagaactgaccacactagatgctattaaaaagatttggtgattcatgggccaggtgcggtggccacgcttgtaatcctagcactttggaaggctgaggtgggtggatcatgaggtcaggagttcaagaccagcccggccaagacggtgaaaccccgtctctactaagaatacaaaaattagccgggtgcggtggcagatgcctgtaattccagctactcgggaggctgaggcaggagaattgcttgaactggggcagcagaggttgcagtgagccaagatcatgccactgcactccagcctgggcaatagagactctgtctcaaaaaaaaaattggtgattcatgcaaggaggtcaaaatatcaatattaacaggagtttagcaaaagttgattccaactcacatggatgactttgaggggttgaagatcagtggaaaaagccattgcaaatgtgaggaaaacagcaagagaaccagaattagaagtagagcttgaagatgtgactgaactgctgcaatctcatgataaaacttgatcagatgatgagttgcttcttgaatgaacaaagaaagtggtttcttgagatggaatctactcctggtgaagatactgtgaatattgtttaaatgacaacaaagtctttataatattttataaatttggttgataaagcagcagcagaattgagaggactgattccaattttgagagttcttctgtgagacaagtgttatcaaacagtgccttctgctactgacaaatcttttgtgaaaaatttctgcaaaaaggaagctgggattttgataggaattgtgatgaaacgctacatcaacttgagtattgccatctgaccaatattgacttcaaatcattaaataagaaatgtctatttatttagatctttagtatttccaacaatatttaatacttttcagtgtacaagtgttacacttattttgttagatttatttctttttgatgctatggtaaatagaattgttttcttaatttattttcagattattcattgctataatagactagagcatatttttgtatattgattgctatggactatgtcccccagatttcatatattacagctctaaacctcaataaaatggtatttggagatggaatctttgggagataattaggtttagatgaggtcatgatggtaacagtggccttataaaaagggacaccagagatcttgctctccaccctgacccaaccccaagcacacacgaaaagaggtaaatatgagcataccatgagagggtaaccagtataagccaaaagaaaaagcctcagaatgaaatctgtcttgctggctttggtcttaaacttatcagccttcagaactgtgagaaatacatttctgttgtttaagccacctcatccatagtattttgttatggcagcctgagctgaccctgatagatcatgtataatgtaactttgctgaagttatttgttttaattgtatgtatgtgtgtattccttaataatcctatataaaagattatgcaactgtgaatagagatagttttactttttcctgtctcttctggatgacttttattcattttattttcttgcctaattcccttagctaatatttccaatatattgttggatagaagtggtgagagtggaaaaatatttgtcttgtgaatgatcttagcagaaaagaattgcctttcactcttaagtatgatgttgtggggtttttctaagcatctttatcaggttgaaaaatttctcttcttttcccagcttgttgtgtgcttttatcatgaaagcatgttgaaatttgtccaatgctttttctgcatctattaaaattatcatatagtttttgtcctgtattcaatggtacattagattaattgatttggggatgttaaaccaactttgtatttttgaaataaatatcatttatttgtggtgtataatttttttttcatatgctactgaatttggtttgctagtacttttctgagtattttgtgtttattaataagggatattggcctgaagttttattttcttttttctttccttttttttttttttttttgtgagacggaatcttgctctgtcacccaggctagagtgcaatggcccaatcttggctcactgcaacctctgcctcctgagtttgagtgattctcctgtctcagcctccagagtagctgagattacaggcacacaccacaaggcctggctaatttttgtatttttagtagagagaaggttttgtcatgttggccaggctgtctcaaacccttgacctcaggtgatcctcctgcctcagcttcccaaagtgctgggattacaggcatgagccaccaggcccagccgaagttttcttttcttgttgatttctttgtctggttggaatcagagtccacacctggctgaagtttttgtttcttgttgatttctttgtctggttggaatcagagtaatacttgccttatagaattagttgttaattgtttcctcctcttctatattttggaatagtttcttaagtgttattctttaattgttcagtggaatttaccagcgaagccatctggacctgtgcttttccttctggataggtttttttttttttcttgctaattcaatttctttaattatgttagatctagtcagatttttctttatgccttcttgagttgatttaggtagtttgtgtttttctaggaatctggccattttatctactttatcttttttaagcatagttgttcatagtattccttcttattcctgtttatttcagcaaggctattagtgatggttcttttattcttgcttgtattaaatcttctctcttttttttcttagtttcactaaaggtttgccaattttgttgatccttttagggaaccaattcctggtttcattgattttctttattgatattctgtctccttcttttctaatctttaatatttcctttcttctgtttgcttttggtttagctttcattttttctagtctcatgcctctaatgaaaggcctcatctcttccaactcattctcttcaactgttgcctaagttgtttgtatatctgaaacataaatttgatggtgtcacttagaagcttaaaagtcttctcattgttcccattccttaaaaagtaaaattcaaattttgtataatggcaaacaacacctttcataatcttaaccagtttaccttaacaatcaaacccacctttccaatcacataaaatcacctggaatttatatatacatttttaacctattttcctttgtacttgtgttttctcaatttgttcttttctcctactgactttttagaaagtcacccacgctttttagttatttccttttccctggtaccatcacactttgcatcaacttcttttagaacagttaccaaattatttattaatacacgccttcttcattattctttgaattccaggatgtgaaatcccattttagaaattatgtcccagtaactgacacatagtgagtggtcagtgtttgtggaggtaggaaaaagtggtatggtctgatatcatttcatctggaaataagatgatgtatttcagccagtgaaatcgaaaagagcgatggaaaatgacctcacactccatagggctttggttcgtaagacacagagaatactgatatccttgtgcgaagaactaacttgctgttgagagatcaattcagaggatgctcaagctccgttatcactttcattttactaaactgagaaaggaaggttgaggaatgcatcaacggttaagcacagtgcaggttcctacagcgactggagttttttggtagttgggagtgtttccctcaatctttgggcaagccgtcagcagtggcaggaacaggaacagacagctgggaaaccctttctttccccaatcgtcttctagcttagctttaggcttgtatgcccatcgcgcatgcgtcaatttttctcttttaagatgggcggggcagagtctttgctcctttggcgatcctgaaggggtggagctaagctgtttccagggtgacagagtggcgacctcggtggtcgattgagcaggtctgagaattgttcccaaagggttgtgcgtcaccgagtcgttggcgctgtcatggcgggtgtgctgaagaaggtgagacgaatggaggtcactgttggaatttagactgtgggggtagactcagtccgatagccctacttcccgcgggtgttgacccctactgtcgcgggctcggcggtgcttttcggggactcgttctgcatgccttaccgggtagggcaggttagtggttccgctccgagagtcaggaaaaaagctccaaacaagcgagactgagagaccagtagctggctttagaccagttttagccgggggattcgtggttttgtatttccttagcgtgctggatgtatggaaaccgtagtaaacagcatgaatcgtgttttgtttttgaacagaccactggccttgtgggattggctgtgtgcaatactcctcacgaggtatgtacctttgttctttcttcgttcttgaattcccaaggaagactaaattcctgtcactttgcttattgcagggttaacgggatacagatgtttcaagcccttaattacaagccgcgtgagctcttgagacacgggcgctgtccacctacttcgttgatccgatgtcacatttttatttatttttgccatgacctctttattaagccagttttcttgttgactttttccttgacattttcatggcttcacttgtgcttgcttctgtcagcgccatctcaaatttatatctccgttttccatcttttctccttgccttaccgtttctgcttaggtgcgttggattacatatatttaggcttactaaaggtactgcccccttttccttctgttaggtcttttccatctgtattcacgaatgttttcatcaaaaaaacccacaaaatttttttattcttcttgtcccttctataatcacaccatttctttgcttcactttacagataactcaaaagagttatctctattttctccaatttctttcttattcacccttgaatgcactcagtcacccttggcgtttttcaagttcaccaattatctccatgctgccaaatccaatggtcagctcatatttctcaccttcattgacctaatagcagcgttttttgacacatttgacactttttccatcacgctcttttcaagttcaccagttatctccatgttgccaaatccaatggtcagcttatgtttctcaccttcattgacctaatagcagcgtttttttttttttgacacatttgacactttttccatcatgcgctttctttactgggcttcaggactcccccagtctcctgattttttccccctactctttggctttctctttttctggttatttctcttatgcccacttttaaaatttgagttagtcaggatttagttcttggaccttttcttttggacctgtactctgtcaccaagagagagcaaatccaaatagagaacggttttaaataccacctatacactgacaacagatttccatgtaaagcactgacctcttcctttataaaagtcctgaatatttaattgcttagtgggcatctctatttgtatgtgtcagacaggcaacccaaacttaacatgtccaaaatggggttcctgatcttctgcctaaaacctgctcttctctcagtcttgctcatctcaattaatggcagctcaattattttgactcaggtcagaaacttgaaatcatctttgattccttcctttctcttacactccacatttgttatttcagtaaaccctctaggttccaccttcaaaatatatcttgattttgacaacatctcactacctcctctgctactaccctcttcctcagtcaccatcatcactgatgtggataattgcattcacttcttaactgcctctcaatgcttgtcacagcctccatttggtctttttttccagccaggctactagagttagtctgttaaaatatgaggtaggtcagatctctcctttccttaaaactaatggctttccatttcactctaaataaagacaagtttcttactgtgaccctctggttcactattctactgatttattttgttatgtctctactagaatgtaggtttcatgaaggcagggatttgtaattgtttcactgctagaactctgtcacatagtatgtgctcagtaaatagtgttagttgaatgagtgtcttgcacttcctatgatttcataataactttattgtcattgatgtaaagaactgaactcatggtttttcccttctaaatatatttcttcctctgtgggctgtatttttcttgatagtttcagatctttctactccctaggctgggaatttggacatcatagttggtatttctcttatacttgtactctcatattcattccaatgatgatttttatttttattttttttgctgatccttttctataacagctctccagtctgacttctgtttactatttctattgttactaccatagttcaggtccttgttcttgtttagagaattgcaacaacctccttactggcctttctgccttgtttctccttcagtccttttaactcactacaatgaagctaattttcctaatctaatcatatgattttcctaaatcttttaattgtccacagaataaagcccgaatgctttaacttggaatgcagaaccacttataatgtgacattttctctaactttatctcctatgcatttccttatgtgtcctgtacagcagtatattccaaaatccccagtggatgtctgaaaaccacatatagtaccaaactgtatatatgctatgttttgtttcatacatacctataataaagtttaatttatgaattaggcacaataagagataagcaggctggacgtgctggctcacgcctgtaatcccagcactttgggaggctgaggcgggtggattgctttagcccaggagtttaagaccagcctggccaacatggcaaaaccccgtctctacaaaaaatgtggaaattaatcaggtgtggtggtgtgcacctagtcccagctactcgggaggcagaggcagcaggattgcttgagccccagaggttgaggctgcagtgagctgtgatgatgccattacactctagcctgggtgatggagtgagaccctgtctcaaaaaagaaaaaaaaaaaaaagagataacaactaataaaatagaacaattataacaatatactgtaataaaagttatgtgaatgtggtctctttgtctcaaaatatcttactgtactgtaccaccctcttgtgatgaagaaaggatagagtgggatagtgtgagatttcaccacactactttgaacggcacatagtttaaaacttataaattgtttatttctggaatttttcatttaatattttctgactgaggttgactattagtaactgaaaccttggaaaatgaaaccacggatgggtaaaggggagctactgtattctaaccaagtgctggccattaaaaacataatgcgagccttaaatgtaagccatatttgtatgtaatttaaaattttctaggactaattttttaatgaagaaaaaggtaaaatttaattattttatttaccctaacaaatctaaaatattgccatttcagtatataataaaaaaattaatggtattttatagtgtttttcttcatactaaattttccaactctggtatgtatttatacttataacacatctcagtttggactagccacatatcaaatgctcagtagccatatttagctagcatctactgttttagacagcacagttcaagaaaatagaactatataccacttccttatgtttgctgtattttctgccattcagttctatgtattctgtatgtaattgccttttccaatatcatttaagtttctatgatctaccatccctctgggtctatcttagatgccacctttttgaaatatgaatgcttctctggtctcagctgaagtgaattcttcttctgctatagaaaaataatgctaatacttagtgaaacttaatgtgtaccaggtactgttctaagttgtatataccctatgaggcagtattattcccatcttacagatgagggatgaaggcacagagatggaaataacttgtccagtgcacctaaggagtggagccagtgtaaactcaagcagttatgttctggttagcacacccttaaccgttgctaagtattataatatctctttgctctatgtatttccccatccctgccaaacacacacttattttttctttttatcatttttattatttttcctcttctgtagcttaccctgtgatatggtttagctctgtccccatccaaatctcatcttgaattgtagctcccataatccccatgtgtcgtgggagaggaacctggtgggaggtaattgaatcatggggtgggtttttcccatgctgttcttgtgatagtgaagaagtctcgtgagatctgatggttttataaagggcaggtcccctgcacatgctctcttgcttcctgccatgtaagacaagcctttgcccctctttcatcttctgccatgattgtgaggcctctccagccatgtggaactgtaagttcattaaacttcttttcctttataaatcacccagtctcaggtatgtctctattagcagcatgagaacagataagtacactcgatagtaccttaaacatattggagtgtgatccatgtccagtctatctttatacgcaaacagtgtggtattgtacatggaagtactgagtatattttttcgcgggtagcgactgtctggggctggtgttgcgtggtggtaaaaataatttaccaagacatttgaggtaaagaaaggcagatttattagagaaagtatgaaaatacattgcaagaaagctattggcaagtcagcaaaagaggagctgaatgcaagtagcaaaggcttgctggggatcttaaaggatggtgcttgtgctgtgggctgaagagagctttgtgcagtactgataacacctaggttgcaatgagctatcaggcgagggtctgatgatagctgggcacaggaagattgtgagttatttgtggaggaggactgtgtgtcctggaccatgaagaaaggtggacttctagcttatctgcttttttatttttgctttaccctgttcccttattaggactgcacacaattttttttttttttttttttttttagttatactttaagttctggggtacatgtgcagaacgtgcaggtttgttacataggtatacacgtgccatggtggtttgccgcacccatcaacccgtcatctacattaggtatttctcctaatgctatccctcccctggccccccacccactgacaggccccagtgtgtgatgttcccctccctgtgtccatgtgttctcattgttcaactctcacttatgagtgagaacatgtgatgtttggttttctgttcttgtgttagtttgctgagaatgatggtttccagcttcatccatttccctgcaaaggatatgagctcatccttttttatggctgcatagtattccatgttgtatatgtgtcatattttctttatccagtctatcactgggcatttgggttggttccaagtctttgctattatgaatagtgaggactgcacacattttttttttttaattgaaaaaaaaggttgctctttaggagaagggtttgtatacttgtaattattgagacttactcctggagtgatcatgtcttgtttgtttcaactgttctggttcatacctgtgttttggcgtaatgattaataggtatcttttcactgttataagtgtccaagtttggatgataaactaagtgtccaccctattgataacattttttcttttattctatattaatagtcccctgttctcatctgtatttctctagacactgatacatttttgtcaggaaagatgaaaatttaaaacctgaattttagatcatattaaaacttaattaaaatgctatattaaaaactaatatatgcattatatatttaaattggagaggatcaacttcttactgatttctatactgaagtttaagttcagtgtgcttcagtacatgctatgcattgactcaattctcttgctactttttcggttgagccttttatgcagactttatgtcgtaactcattcataatcagaagcaagaacactgaagtattatgaccgtatttagttaaatttgatcatacagatgtaatgattatatgtgtttatttctacagaaattcaaataagaaaaattaaaaaaaaaaatttgcagtgcttcggacctcactttgaaaaatactgattcaggctgggtgggctcacgcctgtaatcccagcactttgggaggctgaggtgggcggatcacctgaagtcaggagtttgagaccatcctggccaacatggcaaaaccctgtctctactaaaaatagaaaaaatagccaggtatggtggcgggtacctgtaatcccagctacttgggaggctgaggcaggagaatcacttgaccccaggaggtggaggttgtagtgagccaagttcacgccattgtactccagcctgggctataagagcgaaactccgtttcaaaaaaaaaaaaaagaaagaaagaaaaatactgatttagtaaatgacttgatttccaaaaaggtcattagcaataagttgttttgtttctgaccagtctggccaacatggcaaaaccccgtctctaccaaaaattagccaggcgtggtggcggccacctgtaatcctagctactgtggaggcagaggcaggagaatcgcttgaacctgggaggtggaggttgcaatgagccaagatcatgccattgtactccagcctgggcaacaagtgaaacttcgtctcaaaagaaagaaagaaagaaaaatactgatttggtaaatgattcgatttcccaaaaggtccttagcaataagttagttttgtttctacttgttatcatacctttgacttatctagaacttgttatacacagaaaatacagaatgttcccatgtttatatacaggtttttcctaagttataaagggtgtagatagggcacagacataaagaagtcagagcaaagaagagttaaattaaaaaaaaaaagcaaaaaaaaaaaacagatgtgagttttgtttgttttgtctttgagacaagtgttccattaagtctttggtaatattttaacctatggaaatttgtatggtttgtcttttcagaggctaagaatattgtacacaaagattcttgatgttcttgaggaaatccctaaaaatgcagcatatagaaagtatacagaacagattacaaatgagaagctggctatggttaaagcggtaagtagctaagtcagttttgttgtcttggatttgtggtatccagtgtaacatttaaccaaaaaagtttagttccttattttttatatattcgacacacttttcttctattctccttccttgaatgctcttttcccatcattcctcccttttattcagcaaactcttgtttattgagtgttttctatatgcaggcctctgttacatactggagtttgagactaggatcagatccttccttgaagtaacattgtagctgttccttttacctctcttcactatttagtcctttattgatcttttgctttttatcttggatatatcaatcttgatctcctttttctaatcttagagaacaataaaagcaaaacaaaaaagggcatttttttttcaaagaaacctgtcaaaaagactagactgttattaagtagcagttaataaaagtctagactgctgattcataccaaactatattgtactattgttaaattttcacactagcaatcattaaatggactttatgtaattatctaaaatagtgcttagaaactctgaaggtaatttatatacatgcataagtgatcctagtcacatatatttcttcttattagattaccagactatatagttcaaagagaattcctatctttcgttaggtatgcaacaaaacaatgcagtttgtattatatcgtattttgtattgtattatatgatgggtctcactctgttacccagtctagagtgcagtggcacgatcacagctcactgcagccttgacctgccagtctcaagcaatcctcctacctcagcctcccaagtagctgagaccacaggcactcaccatcatgcccagctaatttttaaaattttttgtagaggcggagtttcactgtgttgccctagctgatctcaagctcctggcttcaagtgaccttcctgccttagccttccaaagtgctgggatcacaggcatgagctacctgcacccggtgcctcacctattttatcatcatctttcaaatagcctcaaatgtttttagcttgttcctatcttaaaaataaaaaaaactgtatgcttgtattttcctttacttattgtcctatttttgttttctcccatagccagtttcaaccaaagaagagtttactctcatacttctttacttactggttccaaaatccttttctctgctatttaaactgccttataactaattgatctgtttgtacttccattatacttcattacatgctccaccatacagccaataatagactgatttttttttcaatatgtaaatcttgtgatggtacagttgtcccttggtatccatgagggattggttccaggattcccatggatgccaaaatacaaggatgctcaagtcccttatataaaatggcatagtatttgcatataacctatgcacatcctcttgtatactttaaatcatctctaggttacttataatactacaatgtaatgctgtgtaagtagttatactgtattttaaaaattgctgtattgttatttttattgtgtttttttgaatattttccatctgtggttggttgaatccattcttagttgaatccacagatgcagatcctgagggccaactgtgctgtcttgcttaaaatcttactgtggttttctgttcagtgtttctcaaaggctgagtttaaggatttatgttgagctggttgtatgaagcttgcttagctacctttatctgcatgattttgatgtgtggccatgtttgggaaccactggcctaacagggtaaaaacatggtatagaaggccttctaagttctggctcttggttattttctcaatctgatcctgttgcttcctgttttatactctatacttaagcagtaccaaactgctggcagttctgtggattccttgcatttttatttttgtgttcatttgtattttctcatttcctggaatgcctttacgttgtttggtagttcttactttttcttcataaatcatcacttcttctgtgaaaccttttcttactttcttaagtagagtttgacaactttgttacctcctttccattgtaccttcatgctgtattatgtctccaccagccataagctacttgttaatgatattggattcaactttgtatccttagactctagcatggtacctggaacataaggttccttagaaatgtgtctttatcccaaaggctagatataaccccaaacacttaacagttgtatctctgattcctgtttttggtaaaattatcacagatttttaaccctgcatacagccacacacaaaatctttagtgaatattgccattattataaaatatctatttactaagcctaaggtggaaataaaagtaactttttttttcagattattactagggagatagtactattttggtgaaaagcgttgtttgtgtccctgtccaagattttcatcttagttctaatacttatttgtggagtgacttggcatattgctagttttctcggtctcaatttcatcatctataacgtgggtataataatacccacctcgaacactttttgttagaaccgaatgaggtaatgcacgtaaaagcttaacatagtcccaagtatatagtgagcattcagtacatggtaccttatcaagtttaatagcattatgccattggtgactaaaaatcacattattcactatcggtaagacaaattttgaactgttcacctaacacaggctttttctgaaatgaaagtgtcgttgaactttccttgccttctttaccttcactctcctgagtctcttataacagtgaccagcttccctgttttgtttttgatttttggtctctcatatgagttaattccctgttaaataatctgtcttaaacatgcttattactttttccccttttctccccctttcagctgttttttatgtattcacttctttaaccaagaaacatttattgaatgccatgtatggttctaggcatggaaacttgtgcctagttggcacaaaacagataaaaatcctttccttcttggagattacatgttagtgatgggagaccaaaagaaaaaaaaaaagtaaaaactgagtaaagacgtacatagtgtgttagaaaatagtaagtgcagtgaaggaaaataaaacaaggaaaatgtgtgccatggtggggataggggatgttacactatgtattaatttcgtatggctgctgtaatattcccacaaacttggtggcttaaaacaatgtaagtttattttattagacttctggaggccagaagttggaaatcaacatcagggacccaaatcaagatggtgttgtcagggctgtgcttcctttggaggatattgggtagaatctgttcttgcctctttcagcttctggtggcttttggcatttattggcttgtggtctcatcactgcaatttctgcctttgtggttacattaccttttccttttctgtgtgtaatatccctctgcctctctcttataaggacacttataattgcagttagggactatatggataattcaggaaaatctccccatgtcagcatccttaacttgatcatatatgtgaagtctttgctgtataaagtaacactcacagtttctagaaattaatacatgtatatcttttgtggtatttttcagcctatcataatgcaaattatcagtagttaatcaataagaaggtgttatttgagcaaagatttgaaaagtggtgaagaaacaagtgatgcagataccctgggccatccagcaagataccctgaggcagtaacatatcacgtcttgtgttgaaaagcaaaatgtattattttctccctctttattccatttattggccagaaaaacaccctgaaaagacaaagccttatttacatatgtgggtatatttacagagcatgatttctggctcaaaaagctcagtttactagaaaataactaaatgtcattgaatgttctaggtactatatttattaacattttgttcttaaaaacttctattaaataattatatacattacaaatgtgtagaaaaaaaggacttttccagaacaacaaaacccttgcctcttccccttcaatttactacttgtaaagttaatctctatttggacttctttttgcctgtttttgaattttatataaatgaaatcattagtatgtactgtcttatacatactgtactctggcttgtgcttaatactgtggttaagagaatcacctatattgttgcatacagtttattcattttcattgctgtgaagtattatatccaaatattataattaattgatccattctattacagatgatcatttgggttatttctagtttggggctataatttgtgctgctgtgaatattctcaaacatgttttttaaaaaatatattatgcatttctgtttggcattatgcctagaagtgtaatttctgggtcatagagtagcatttatttctaattctaatgctctcagaggaaatacaggaaatattaagaaagcaaagtcatattttaaaatctgttttaggaagactgaatttgacattgtatttctgtcccttgatcagcatgtcaataaacatttagcacttttcaatattaagacagaaaagcaatgaaatagcagaggtgaaatgaattttcaccaaatatttagtaaaaagagtatgatgaaagaaaagttgtatttttaagtgtttttatataggaattttaaaatatataggatattgaaacattcagttagtatgcttctttaattttttttctccctgaaattataggaaccagatgttaaaaaattagaagaccaacttcaaggcggtcaattagaagaggtgattcttcaggtaaagaaaaagttgactatttaggtgtttggtttcatagagacacacaactgacgttctagaatgaaaggaaaactaaatttccttgtttatatcaactcgtcaaatatgtaagactaatcacatatagaaaatgtggtgcttctcatgtgtatgttgattatagtatttattgttgattatagcatgaatttatgagacttctgttagaagcctggagtttgacactcttttaatttaattagcatgttctccttggcctaaccttagtttaaattggtagcacaatattactgttgttttaatagttgtatcttattttaagagtgtggcatatttttagtagggaaaaatacagacattttgaattataaaattaaaatgtacttttatttttatttttggttcttgagcatttgagcaagttaaaaaacaattgcatagtatatttgagagcttaattctacattatttcccaaatactaaccctgacaaataatattgagtagtaaaatgtaagcatgattatgaagagactgagattagaaaaattattaacattattaattacatttagaatatttaaatcttaaattattctattgggaaattttcttctcctctcactatacctgctgcttatacaagagaacaaacaccacagtttagttttatttaatctgaattttaattcttttcctttggtcatagttaggttatagaaatagataggttactgatgtaaataggctggaaatatactattttgagtattccgtagttggttttttaaagcatctatgggaaaataatgataactctttttttttttttttttttttttttaagatttgcatcttttttctccaattgctagtaaggttaaactttaaaaatatgttcttatattttataaattatgtcattaatatttttactgtgtcatttagtctgtgttatttatacatgagtgtctttttataataaaagatattaaccttaaacttttctgacattgtctgcacatactttttctagcctgcttttgcctctcaaatggggtttttcccccatatgtagaggttttcaattttttttttttttttttttttgagatggagttttgctcttgttgcccaggctggagtgcagtggcatgatctcggctcaccacaacctccgcctcccgggttcaagcaattctcctgcctcagcctcctaagtagctaggattacaggcatgtgccaccacatccagctaattttgtatttttagtagagacagggtttctccattttggtcaggctggtctcgaactcctgacctcaggtgatctgcctgcctcggcctcccaaagtgctgggattacaggcgtgagccaccctgcccagctcaaattttttttatttggtgaaattttgttgttccacacccctacaaccctcatattataggtttagaatgtcttcatcttataagtgtctgataaatattcaattgtttcatttaattttattttgttgcatcttttttcaaatgtaaccctttctaatgttttcttactgttgattgaaggacagataaaaggaaatattggataatattggagattagggaggtatatcaccaacagacatgatataccaaatcaaaagaattgttagatggctctggaaaaagaggaatatagcattcagacagctttctatgaatgtagactgtttcagttattcaaaggcctgtttacctggcctttatattcgtcaggttggctgtggtactagatacagtgttatgggaacttgccgcaaaccttatactgttgccctatacctatttctcttttctgtaccacctgatttcactttgatcatgactttatttagttgatacatcaatttttcatggaattaagttttaaggcatattaagtatttttaagtcagctgtgcagttccccatgttttcatggtcagtattaagggtaaattaattttagtatttttttaactcagtatatgtagtatattatttaaatataatcataaaaatattgagatattttacattcttttttatatgaagtcatcaaaatctggtatgtattttacactttgcagcacatctgaatttggactagctgcatttcaagtccccagtagccatgtatgggtagtggctaacatattagacagtcccatttctagatggatggtatgatggtgtgtcagaaaggaggaaataggcatcaggggccaggtgcagctgggtccaggttcctgagatagggctgattctcaaggatgaatgaggcctaggtgacctcctcatgccctataatggctgggggagattgagaaagcattggatgttcgtgagacccagggcaaccttaggaaatattttatcagtatttaaattattttctccttttggcattagtaatacctctacccctgatttccattcatctgctctttaactcattgttttttatagttgcttgtaaacatagattgacttttgggaccgctgtcatagatggggtattatcttttaactgtgtaataataattaccttgaatataatctgagcgcttattctgtgtttgaatttcttttctaacatcctgacaggtgtttaatagtattcatcttataagttggctagagttgtcataaatattgtttgttgtagaaaaaatatgaaataaaaagctacctaaaatgtgtgtgttaaatataagttgtgtttgaaaggaaaaattaaatgaaacataatttgattaaggaatttactcagttagtaaatattaattatacatgtattgtgttctacattccatagatcactgttttataaactctgggtctcaagtgactgtgggtcatggaatcagttagttggatagtgattagcttaaaaaaacacaatagaaaaaagaatatatcactgccagtaaagataataatttaaaaagttttagttatatgtttgtattgtggaactcaaaataaaacatattttcttactgtgggccatggtaaaataaagtttgaaagccactgacatagatgaaaagacatacttctgatgctcaaaaaacttgtgaaatattattaagataaaaaacctcaccagctaaacttttaaacactatagcctatttcaatcaaatagaagataacaaaagatatcctttcttactcctgattatgtagatgtgagaattaaggtaatttaattacttaatattcaacatttgatggtggaatagattatgagatattaaatgaaagtagtaactaatagttaaatttcagttgttctgataaatatctgttgaagagtaaaatccaatgatcttttaaaaaatttgtattaacaggctgaacatgaactaaatctggcaagaaaaatgagggaatggaaactatgggagccattagtggaagagcctcctgccgatcagtggaaatggccaatataattattaagtgactttggtgtgttcatgggaaactgatgtaattaaatattctgttatattaagagcgtgttcttattactgacattttgtaatcaagaaaagtgatatagaaaatatgtaggagactgttaaaattggtgattatggtaatatggtcatgtgaatcaatttttgatttataaagtactcacacaagttgtttcaaagatgatatttctgtgaacagagaggccatgggaagatttgaaaattattaaagaaaaattcctacagattttcaatgcagagaccataatcaaaaagtaaactttctttagtagtatgttcaatacatcatttaattttttaagttatcctgaagaaggaaaggtccttaattattatagtctaaacaaatttatagattactgtttgaagtaaataatacgagtgaatattttcaaatgtgataaaatagcacaagtggctggtgataaaatttgaaattatggttaacctcagctgtgatcttatgtatgtaaagtgaaatttaaatagataattataggttgattacaaaatccatagtgtcattttattttagtcattattgaattataccatttactctgttttcttatagtcttaattttattatattttgttgttactgtattatatttgaaaaccttcaaattagaatacattgtacagttaaagaaattgacttggtacttaaaagaaagatttcccattgcatacaggttattggagaaattttccttttgttgcatttgtggaagttagttttctggcccgtggcctttaattttcttaatcaacctaattacatcaggatagaggtagagtttctgtaaaagaagagacattaagagttcctgaaatttatatctggcatacggataggcttatattcaaaacatcttagtcatacgaccataaattaaaagtggagtcactaaatagtttgcagtacgtttctaatataagtgtaggtgggtatcaaaacaagacaaatgctgttcagggaaagaagttggcaagcttaaggttaaacaaaaataaaattacatgtgttttcgccttcctagctccctgtcattcctaaatacttggttaaatttaacgtggtatctctttccttcatagatagtactatactcttgtggggttttgtgtatacgtgtgtgtgtgtgtgtgtgtgtgtgtgtgtgtgtgtgtgtgtgtgcacgcgcatgcgcacatttgctcagaatgagaaaaaaatggtatttttccttctttccagtatatttctcccctcatagagctgtaacatgaatactaaataaatattaaataaggtggattcttagaggttagagtgcaagaaggctccttctggtggggaagtgttagagggggagttagaagcccagggtttctcattctcatggttctagtgttgttaactcaatgactacattgaggcaagtttggcctgtttctcagaatggcctatttctaatgctgcaaaagaaatagaatatgatttataacaacattttcagttctaaacatttcttgaatatataatatatttattaaaacatgatgctgaagtgtgtttgcatgggtactttcaaggtaattttctagccaaccattatttttcaggtcctttggacaacacagaaacaaagatggcttgctgtgtttttgtcatattttcagtcccgtatctgccatgattcttgggcatcttttatgtttcaccaacagtgttactgaacttttttgctaaaaggggaccttactggtgtttgcattagaaatgctagttgcagaataatagtcattgtaaaaataatattataacaataatagctaatgtttgttgagactttaatatgaatgtcaggcactatcataagtacctgactaatttcactcattaaacctgcactacaaccctaagagtgatactacaaattatcttcattttccagataagaaaccagaaccctacgtgagtagttttcccctgcaattatgcaacttggggccttggggacactgaaaccaagagatgatttaataacaaatccaaggtcacatagctagtaagatgtgaagctgaagtttgaacccaggcagtctggttctagaactgatgctcctgttatattattatttatgaatatgcttgggatgttgtgacttcttcctgtgctgtatgggctgtaccaaatgaaactagatcctgctctctttaccttttctgtcaaaattatctgtaaagaacaaatatgagcagaagtagtaaacgatttcattttctgcaaagagctgcatataggttataggcagattatgttaatgggataggtatctaaaaggtattgcaatttggtcattggttctttctcctgtctcaattgctcacagaactttacacctgatcgtttttactccttcagtcttttcccagttgcttcctataaacatccaggttaagtctcctgatcactttgcaaatgattcttttattcagagatcttcagtgttttgagtggctactaaactaattttaataattttcagaatggcctatttcagttctcccatgggtttcattctagttaatcatcatactgcagatacttcaaaagaaagagaagctaatcaatttgagctttgctaagaaagaagaaatggcaacaaagttgatgccccctttctcccacactgggacttagtgcagacgattccaatttcttggcattctttcctttgggatgaaaatggcttatatttaggataactataggataatttatcattccacttggaatgattttgagtgaaaataattacataaggataacagatgtacaccatgactgtcctgggcaaacaagatataggggggcaccctactggagtaaggctcaggtctcaaggttgccatctttcccacaccagtaggatcaactagtctgtcattggaatagaatgaattgatgccagcagtagtagtcatcatgtgcaatcaggcctcaagttttattgtatcctttcactctccctcattctcccctccccctccttttccctcagaattgggggatggaagaaaagagagcttatattttattgtcaattttctaatcacattcagaggagcgaagctaattaagccaataacaatgtttatgaatgtatcttttttaaaagggagatgacaatatataggaaaattcccacatgtaggctaatagcagctttttctttttcctcccatcctctatgattatgtaaacatacagaagtctaacaccctacacaagtgtattgtggggtatgggattaagtaccaaattgctgaacatatcactagtattttggatttgctgagtgcagtcttcccattaaaactaagtgttcagtagggaggcgtggtggctcacacctataatcccactactttgggaggccgaggtgggtggatcacttgaggtcaaaagttcgaggccagcctggccaatatggtgaaaccccgtctctactaaaaacaaaaacaaaaactaagtgttcagtgagattgtagcctatgctacaacaatagtaatgccaattgttttagagaaaagtaaatgagaggctaccagttgtgtttagaggaggtcgacgttttattttagacaaaattcacaggaaatcacagtgggaatgtgataaggggtttgaatgattgatggggacaggaagaattcatttgagagactagagatgagtcagtattctagatcgtgaagtaaaatagtgagtcatgtagtgacttagcatgggttatccttaaatcccagtgtcttaagtgtattttttattcatactgcatgtctaaggagggttggcaaggagtgctcatagacccacaaggaatccaggctgagtgtggcaccatcaacatatatttccatgaccatagtggtggtggggaattggaacatggtaaattacacataggaataaaaaaaaagaaacaaccaaggttaaatttttttttgactgtgccacaaaatttatgaattgaacttgccatgcatcactaataattttcaaattggtctttaggtttacattagcagctaattttttgtggtacacttaaatgtaatttatgattggcatctgtatataattaaatgaaaagcattgcaaagatttctattttggtatttctcatgatcttcaatttttttttaggtgaatctattaggttttctaaagataactatttttttttttttacaaaatattggcattttaatctctctataactggagggtgaattatttttcaccagagtaaaacaggtccaaagtcccttatctaaattcctaatttcaaaaatctctgaaaacaaagttttttcataactcatttggcaacaaaccccacctgaattacatgaggctatttgtggtatttatcgcacttcaatgtgaatatgaatatattttgccacagatgtatcaatatatttgattctaaactgcttcctcagaccctcttaatgtgttacataatgtaaagtatatgcccatatttcctttcaaaaatctgaaaaattgtgaatatcaaacacatctgtcttaaaaggtttcagaaaagggacaatagacctatatttccattctcttaacaagttcacaaagtggtattatgatccaaatttaatctaaataatttccaaaacaaaaattttcaggtccttagttttctaaattattttaatattaaaaatattcattattcattttaacctgtagtaacaacaggagatactttgaaatgcttgattttatcaagccactaggtggcatctttgtaaaaataaaagcacatcaaaagaaatgtttattacataaataaatgctgagatgaataaaggtagatgtttcatgagaaatacgaagtcgtttggtggaataaatcctgagaaaatgcatagatttatcatgaaaaggaaaatggaaaatggtattgtaaaattactctttcacttttggaattgagaagctttttcctattggttgttttcattaagtttgaatataaatttattatgtaaccaaactacatttgtgtgtatgtgcgtgtatgtgtgcgtggacaggattttgacatgctaataacttttccatgctccacagactacccaaggaagcctaactaagttaggttcctatttaagattaaattgtataaagtcatcctcacagcaaactacaaaaaaaaatgaatagtggctatcaagtcacatttaacactgtgagacacttaagttctctcctaccagtttttcttcccccatctcctgactctattcctaaacctactgtttgcataccgtctctaacattgagaacagtgaatgacaaattttaaagaggagacccagcaaagtgaatgtttaaaaccagtggaatgtttattagtagcagaatgtaagataaattatgattttggagatgggagtgtatgagtgtttgtaaaatcttatctgcacacctccacacctggtctacccatccaagaaagcctaattctagtggttacctctatgcccatttttcccctttacttttcatgaatgtgtggaaatgattaaaatgaatttacttttactgatcattattaaaacaaagccaattttatctgaatatatatttcactattctagtaaaaatatattttaaaatgggatgactgaaaaaaatggcattggatattacaaagttattggggagatgagagtgcaatttcagcagaacagtataaagaaataaatgaagacaatgaacatttatgaataagggaatggacctgtattaattttattaatccttttaacatatcaaatcaaattaaacagtactgtaatggttaaaaaatctgggacctggagttagattgcttaggtttaatcctggttccctcattaaactttgtgtgccttagttttctcatttacaaaatgggtctaatagcagtttctccctaataaaatcgttgtaaggattaaattagaaatctatgtacggtgcctcatgacaatgaatacttcataaatgttagctgctattatgagatagcaacatgtagtttgttactaaatttccaagaggaacatacttgacttgacctccaatactatcctgtggttctttaaaagttttcttattcattgataggccgggcgcggtggctcactcctgtaatccccaacacttttgaaggcggattgcttgaggctaggagttccagatcagcctggccaacatggtgaaaccccatctctactaaaaataccaaaattagccgggggtggtggcgggcgcctgtaatctcagctactcaggaggctgaggcaggagaatcgcgggagccagggaggtagaggttgcattgagccgagatcgaaccactgcacttcaacctgggcgacagagcaagactctgtatacactagaaaaaaaaaaaaaaaaaagaatttgttgttagacaaaatttagtttattaactaatttagtgattaacaaaagttcttctaagcagaattatttgatagctactatctcccttttctctttggctgccaggaagctgagagccaagttgttagtttaacaaaagcaagtaggcacctgacagtttctcgcctctgacttcatcgtgatgatttctctgactcggattttttttatatctgtaaaattaaactgctgtcagtgtttggtttagagagctgtgccgtttcacaagtgtaaaagatcttggagagaagttagtgtcctgattcacttggatctaggtagccagttggtaacagcctccgcctctggctcctccccttctccctgccgcgtccctcctccccgccccttcgcctctggccccgccccttctccctgccgcttccctcctccacgcccgctcgcctctgactcctccccttctccctgacgcgtccctcttcctgtctcttcgcctctggctcctcccctttctcctgccatgtttcttctccccgccccctcgcctctggctcctcccccttttccctatcgcgttcctcctttgcagcccccatccccctcctctggctcctcttcttccctaccgcgatcctccttccagaccccggcccccagcccgcctctagctccttcccttatttcctgccgcgctcctccttcccgacaccgcccctccgcctctggctactcctcttctctcctgccgcactcctccttcccggccccacctccccgcctctggctcatccccttctcttctgccgccctcctccttcccggccccgcccccagtctttggctcctccccctaccctgccgcgctcctccttcccggcccctccccgctgccctcttctggctcctcccccccacccgcctctggctcctctccttcccacccctgccgtgctccggcaggaagaggtggtgccagggccgttgctaggatacgaccaacagctgagaacgcggcgagtatggaagctgcgtcttaggagcctgggaaagcacttcgacgagaatagtttggtttcgtacacaggtaggagaacagattttgactgcggcctcctggtccgacgcttagatccagcctagagccggtgacagccgcgctggactctgggttctgtgtgctgggcagtgattcccacctgagcgcctggggctgcctagtcggtcaggaatgttccgactttactttaaaaaccgtgcgaagcatctcatctttctcggctccttttttggcttcccctctctgatttgggacttgaaccagcagcatcaagctaggaggtacacctcacctcacaccctgggtgcttgtcacggtaattgcatagaagatgtgtgtataacccacacctggcactagagactcttagccttccgtggccaccattctcatattaagtcgagagattttagactttcctcacctggcactctcactccttcctctccacccttggtctttgcctcttaacaaacctaaaaattcaacagatctatttggtagaaggcaatactggatccctgcctcactaattatactacattctaaatgtgttaagctttaaatggtagggaatgaaatgtaggtgaaaagggagacttttttgtatgcaaacatgatagaggttgctttttaaacaataagatttaaacattttcatttgaatagataatacataaaaaaatagttcgaatagtaaaaagaatgaagagtgaaaatcctccatctacccatttctccccatctccaggccaccttccacaggtgttttagacatacgcaaatatgtagttacacctgtaacattgtgcatactcttctgtgattggcttttacacttaagactgtgtgtccagttgttttctatcaatatttacagatctgtctcatttatgcatttatggatgaatttatgtatttatgtttcattgtgagaaggtgtttcgaagcatgtcaggaaatttggaaactctcataagcaaaaagattgataaatgtcactacctaacaatctaaaacttttatatagtaagagaaaaacaacatcaaacatacaatgggaaatataagggcaacacacaacaaagggatatttaattattaggactcataaaacaatatgaggatgtaaggaaacagtcaaggggaacttcttggggctataatagaaaacagtttgatggaatttaacaaaattaagatctgtatgccctttgacttgtccattctaattctgggaactcattttcagtatacttacacatatatacagagatagatgtataaaatgtttgttgcagcactatttttaatagtaaaaaactagaggggtctgcatggcggggcctcggagccaagacgaggttgagtagactcgttttgaattttctcccctctgctccggcggacttcccatgtcgccttgtggggctatcggcggcggcaggactgggggagtcagaggtctggcagcgctgtctgcgcagacctaccggacgctacctcccaacccccctttcttcctcctgcctcctcctcctcccgtcacctcctgacccgccggagctccgagcaactgccggcctccgcccccagccgcagccggtcactggcggcgccttccgcgccaagcttgggggccttttcggggtcctacatggcacggcttccgacccccggcccgggacggggctcgcaggccccagaggggcaggctggagaaggaggaggttaggtgtcttcaggagggttgctgagcccaaggacgcgccatcgccgcggagaaggagccggaccccttgggcggagcgcccaatgtgtggtccctcacgccgtcccgcaccttgctttttagggttctttttccgctttctgagcccttttataccttacgtttagaaggggaaaatcatcctcccacaccttctccccgactttttgccttttttgtcttgaagttacccaaaggtctgtgtattgttctcagtggtcccaagaattactcgaatatagttgtttttctgagggaggatggatggagataactatcctgatcccagtgtcactttttaaggcattcgcttcaagagacaagcagtttagaatcaggcagaactggattgcaaaatttatgggcagaccggtatgtgtgaaggtgaagacaaagctttccttttttacgttgtttaaagatgtcctactgtaaggtagacgcctaatatttaaatgaacgcctaatatttaaatagagaatgagaagagatttaaacaattggaagaaaaaataatttttattagagagcaatgacaataaaagtaggactcttttcagtttactcacctttgtaactccgaatccgggccctggaaccagaattcctgggttcaaatcctgcctctgctacttgattaacctttttgtgccacacttttatcaactataagaattaactgcgccatcggaagcactcagtatatgttaattattatcatcaaatagttactaattccagtttaactagaagctttgccagcgtgaatagataagggagaatagccacattgagtggaggaataaaattagaaaacctctgtgctgaagtcccaggagatcacttattaggcttgagcttgctaatggaagtggtgatcgtttaaccatgtggttattgtagtggtgaagatttacacattaaataagtcttgggcatctgaagcttgaaacactttcttaatgaaatcttgccgttgaatctgtacttactgataatatgtcattggttaaaatatatttataaaatgtataattgaccagcaggttaatacatttttatcattaatttgaaatttatcaaaatgagaatatacagtacctgacggtcagtggagtttgatcttaatttgatttgaaaattatgatcaggaaaataaataacctgaatatatgcttaataatataagactttgagtttgcaaaacagaaatcctgacttgactaaaatacacttttcatttgacggagacctttagttaaggaaagattagttttagcattcaacataactaaatacccagcattatgttttacggtttttttcaacaatgatttatgtgtcgtgtttggtgttgcctccaagcagtacctaggatagctgatgcttttactttgagtctttttctttagttggaacattaattgcaagcttttggttggtaatcattttttatgggatgtatttactatatggtcctcacggagacacattgttatctggagaaccacagtttggaaaatacatttctctttattataaagttttttgttttatatatataatgccacagtgtgataggatacaaagactatgcattagggctttggagtcttaattgttctttgtgtttttctttttttccaatttgattatggatccgaacctaatgcactctgtgatcttaagcaagtttcttgacagttccagttttccta

SEQ ID NO: 466 - DNA, 1550 bp, Homo sapiens
tggagctaagctgtttccagggtgacagagtggcgacctcggtggtcgattgagcaggtctgagaattgttcccaaagggttgtgcgtcaccgagtcgttggcgctgtcatggcgggtgtgctgaagaagaccactggccttgtgggattggctgtgtgcaatactcctcacgagaggctaagaatattgtacacaaagattcttgatgttcttgaggaaatccctaaaaatgcagcatatagaaagtatacagaacagattacaaatgagaagctggctatggttaaagcggaaccagatgttaaaaaattagaagaccaacttcaaggcggtcaattagaagaggtgattcttcaggctgaacatgaactaaatctggcaagaaaaatgagggaatggaaactatgggagccattagtggaagagcctcctgccgatcagtggaaatggccaatataattattaagtgactttggtgtgttcatgggaaactgatgtaattaaatattctgttatattaagagcgtgttcttattactgacattttgtaatcaagaaaagtgatatagaaaatatgtaggagactgttaaaattggtgattatggtaatatggtcatgtgaatcaatttttgatttataaagtactcacacaagttgtttcaaagatgatatttctgtgaacagagaggccatgggaagatttgaaaattattaaagaaaaattcctacagattttcaatgcagagaccataatcaaaaagtaaactttctttagtagtatgttcaatacatcatttaattttttaagttatcctgaagaaggaaaggtccttaattattatagtctaaacaaatttatagattactgtttgaagtaaataatacgagtgaatattttcaaatgtgataaaatagcacaagtggctggtgataaaatttgaaattatggttaacctcagctgtgatcttatgtatgtaaagtgaaatttaaatagataattataggttgattacaaaatccatagtgtcattttattttagtcattattgaattataccatttactctgttttcttatagtcttaattttattatattttgttgttactgtattatatttgaaaaccttcaaattagaatacattgtacagttaaagaaattgacttggtacttaaaagaaagatttcccattgcatacaggttattggagaaattttccttttgttgcatttgtggaagttagttttctggcccgtggcctttaattttcttaatcaacctaattacatcaggatagaggtagagtttctgtaaaagaagagacattaagagttcctgaaatttatatctggcatacggataggcttatattcaaaacatcttagtcatacgaccataaattaaaagtggagtcactaaatagtttgcagtacgtttctaatataagtgtaggtgggtatcaaaacaagacaaatgctgttcagggaaagaagttggcaagcttaaggttaaacaaaaataaaattacatgtgttttcgccttccta

SEQ ID NO: 467 - protein, 114 aa, Homo sapiens
MAGVLKKTTGLVGLAVCNTFRLRILYTKILDVLEEIPKNAAYRKYTEQITNEKLAMVKAEPDVKKLEDQLQGGQLEEVILQAEHELNLARKMREWKLWEPLVEEPPADQWKWPI

SEQ ID NO: 468 - DNA, 1548 bp, Homo sapiens
tggagctaagctgtttccagggtgacagagtggcgacctcggtggtcgattgagcaggtctgagaattgttcccaaagggttgtgcgtcaccgagtcgttggcgctgtcatggcgggtgtgctgaagaagaccactggccttgtgggattggctgtgtgcaatactcctcacgaggctaagaatattgtacacaaagattcttgatgttcttgaggaaatccctaaaaatgcagcatatagaaagtatacagaacagattacaaatgagaagctggctatggttaaagcggaaccagatgttaaaaaattagaagaccaacttcaaggcggtcaattagaagaggtgattcttcaggctgaacatgaactaaatctggcaagaaaaatgagggaatggaaactatgggagccattagtggaagagcctcctgccgatcagtggaaatggccaatataattattaagtgactttggtgtgttcatgggaaactgatgtaattaaatattctgttatattaagagcgtgttcttattactgacattttgtaatcaagaaaagtgatatagaaaatatgtaggagactgttaaaattggtgattatggtaatatggtcatgtgaatcaatttttgatttataaagtactcacacaagttgtttcaaagatgatatttctgtgaacagagaggccatgggaagatttgaaaattattaaagaaaaattcctacagattttcaatgcagagaccataatcaaaaagtaaactttctttagtagtatgttcaatacatcatttaattttttaagttatcctgaagaaggaaaggtccttaattattatagtctaaacaaatttatagattactgtttgaagtaaataatacgagtgaatattttcaaatgtgataaaatagcacaagtggctggtgataaaatttgaaattatggttaacctcagctgtgatcttatgtatgtaaagtgaaatttaaatagataattataggttgattacaaaatccatagtgtcattttattttagtcattattgaattataccatttactctgttttcttatagtcttaattttattatattttgttgttactgtattatatttgaaaaccttcaaattagaatacattgtacagttaaagaaattgacttggtacttaaaagaaagatttcccattgcatacaggttattggagaaattttccttttgttgcatttgtggaagttagttttctggcccgtggcctttaattttcttaatcaacctaattacatcaggatagaggtagagtttctgtaaaagaagagacattaagagttcctgaaatttatatctggcatacggataggcttatattcaaaacatcttagtcatacgaccataaattaaaagtggagtcactaaatagtttgcagtacgtttctaatataagtgtaggtgggtatcaaaacaagacaaatgctgttcagggaaagaagttggcaagcttaaggttaaacaaaaataaaattacatgtgttttcgccttccta

SEQ ID NO: 469 - protein, 59 aa, Homo sapiens
MVKAEPDVKKLEDQLQGGQLEEVILQAEHELNLARKMREWKLWEPLVEEPPADQWKWPI

SEQ ID NO: 470 - DNA, 1347 bp, Homo sapiens
tggagctaagctgtttccagggtgacagagtggcgacctcggtggtcgattgagcaggtctgagaattgttcccaaagggttgtgcgtcaccgagtcgttggcgctgtcatggcgggtgtgctgaagaagaccactggccttgtgggattggctgtgtgcaatactcctcacgagaggctaagaatattgtacacaaagattcttgatgttcttgaggaaatccctaaaaatgcagcatatagaaagtatacagaacagattacaaatgagaagctggctatggttaaagcggaaccagatgttaaaaaattagaagaccaacttcaaggcggtcaattagaagaggtgattcttcaggctgaacatgaactaaatctggcaagaaaaatgagggaatggaaactatgggagccattagtggaagagcctcctgccgatcagtggaaatggccaatataattattaagtgactttggtgtgttcatgggaaactgatgtaattaaatattctgttatattaagagcgtgttcttattactgacattttgtaatcaagaaaataaactttctttagtagtatgttcaatacatcatttaattttttaagttatcctgaagaaggaaaggtccttaattattatagtctaaacaaatttatagattactgtttgaagtaaataatacgagtgaatattttcaaatgtgataaaatagcacaagtggctggtgataaaatttgaaattatggttaacctcagctgtgatcttatgtatgtaaagtgaaatttaaatagataattataggttgattacaaaatccatagtgtcattttattttagtcattattgaattataccatttactctgttttcttatagtcttaattttattatattttgttgttactgtattatatttgaaaaccttcaaattagaatacattgtacagttaaagaaattgacttggtacttaaaagaaagatttcccattgcatacaggttattggagaaattttccttttgttgcatttgtggaagttagttttctggcccgtggcctttaattttcttaatcaacctaattacatcaggatagaggtagagtttctgtaaaagaagagacattaagagttcctgaaatttatatctggcatacggataggcttatattcaaaacatcttagtcatacgaccataaattaaaagtggagtcactaaatagtttgcagtacgtttctaatataagtgtaggtgggtatcaaaacaagacaaatgctgttcagggaaagaagttggcaagcttaaggttaaacaaaaataaaattacatgtgttttcgccttcct

SEQ ID NO: 471 - protein, 114 aa, Homo sapiens; identical to SEQ ID NO: 467

SEQ ID NO: 472 - DNA, 1759 bp, Homo sapiens
tggagctaagctgtttccagggtgacagagtggcgacctcggtggtcgattgagcaggtctgagaattgttcccaaagggttgtgcgtcaccgagtcgttggcgctgtcatggcgggtgtgctgaagaagaccactggccttgtgggattggctgtgtgcaatactcctcacgagaaattcaaataagaaaaattaaaaaaaaaaatttgcagtgcttcggacctcactttgaaaaatactgattcaggctgggtgggctcacgcctgtaatcccagcactttgggaggctgaggtgggcggatcacctgaagtcaggagtttgagaccatcctggccaacatggcaaaaccctgtctctactaaaaatagaaaaaatagccagaggctaagaatattgtacacaaagattcttgatgttcttgaggaaatccctaaaaatgcagcatatagaaagtatacagaacagattacaaatgagaagctggctatggttaaagcggaaccagatgttaaaaaattagaagaccaacttcaaggcggtcaattagaagaggtgattcttcaggctgaacatgaactaaatctggcaagaaaaatgagggaatggaaactatgggagccattagtggaagagcctcctgccgatcagtggaaatggccaatataattattaagtgactttggtgtgttcatgggaaactgatgtaattaaatattctgttatattaagagcgtgttcttattactgacattttgtaatcaagaaaagtgatatagaaaatatgtaggagactgttaaaattggtgattatggtaatatggtcatgtgaatcaatttttgatttataaagtactcacacaagttgtttcaaagatgatatttctgtgaacagagaggccatgggaagatttgaaaattattaaagaaaaattcctacagattttcaatgcagagaccataatcaaaaagtaaactttctttagtagtatgttcaatacatcatttaattttttaagttatcctgaagaaggaaaggtccttaattattatagtctaaacaaatttatagattactgtttgaagtaaataatacgagtgaatattttcaaatgtgataaaatagcacaagtggctggtgataaaatttgaaattatggttaacctcagctgtgatcttatgtatgtaaagtgaaatttaaatagataattataggttgattacaaaatccatagtgtcattttattttagtcattattgaattataccatttactctgttttcttatagtcttaattttattatattttgttgttactgtattatatttgaaaaccttcaaattagaatacattgtacagttaaagaaattgacttggtacttaaaagaaagatttcccattgcatacaggttattggagaaattttccttttgttgcatttgtggaagttagttttctggcccgtggcctttaattttcttaatcaacctaattacatcaggatagaggtagagtttctgtaaaagaagagacattaagagttcctgaaatttatatctggcatacggataggcttatattcaaaacatcttagtcatacgaccataaattaaaagtggagtcactaaatagtttgcagtacgtttctaatataagtgtaggtgggtatcaaaacaagacaaatgctgttcagggaaagaagttggcaagcttaaggttaaacaaaaataaaattacatgtgttttcgccttccta

SEQ ID NO: 473 - protein, 141 aa, Homo sapiens
FRLGGLTPVIPALWEAEVGGSPEVRSLRPSWPTWQNPVSTKNRKNSQRLRILYTKILDVLEEIPKNAAYRKYTEQITNEKLAMVKAEPDVKKLEDQLQGGQLEEVILQAEHELNLARKMREWKLWEPLVEEPPADQWKWPI

SEQ ID NO: 474 - DNA, 1213 bp, Homo sapiens
gtttttgaacagaccactggccttgtgggattggctgtgtgcaatactcctcacgagaggctaagaatattgtacacaaagattcttgatgttcttgaggaaatccctaaaaatgcagcatatagaaagtatacagaacagattacaaatgagaagctggctatggttaaagcggaaccagatgttaaaaaattagaagaccaacttcaaggcggtcaattagaagaggtgattcttcaggctgaacatgaactaaatctggcaagaaaaatgagggaatggaaactatgggagccattagtggaagagcctcctgccgatcagtggaaatggccaatataattattaagtgactttggtgtgttcatgggaaactgatgtaattaaatattctgttatattaagagcgtgttcttattactgacattttgtaatcaagaaaagtgatatagaaaatatgtaggagactgttaaaattggtgattatggtaatatggtcatgtgaatcaatttttgatttataaagtactcacacaagttgtttcaaagatgatatttctgtgaacagagaggccatgggaagatttgaaaattattaaagaaaaattcctacagattttcaatgcagagaccataatcaaaaattatcctgaagaaggaaaggtccttaattattatagtctaaacaaatttatagattactgtttgaagtttattgaattataccatttactctgttttcttatagtcttaattttattatattttgttgttactgtattatatttgaaaaccttcaaattagaatacattgtacagttaaagaaattgacttggtacttaaaagaaagatttcccattgcatacaggttattggagaaattttccttttgttgcatttgtggaagttagttttctggcccgtggcctttaattttcttaatcaacctaattacatcaggatagaggtagagtttctgtaaaagaagagacattaagagttcctgaaatttatatctggcatacggataggcttatattcaaaacatcttagtcatacgaccataaattaaaagtggagtcactaaatagtttgcagtacgtttctaatataagtgtaggtgggtatcaaaacaagacaaatgctgttcagggaaagaagttggcaagcttaaggttaaacaaaaataaaattacatgtgttttcgccttc

SEQ ID NO: 475 - protein, 59 aa, Homo sapiens; identical to SEQ ID NO: 469

SEQ ID NO: 476 - DNA, 1420 bp, Homo sapiens
gtttttgaacagaccactggccttgtgggattggctgtgtgcaatactcctcacgagaggctaagaatattgtacacaaagattcttgatgttcttgaggaaatccctaaaaatgcagcatatagaaagtatacagaacagattacaaatgagaagctggctatggttaaagcggaaccagatgttaaaaaattagaagaccaacttcaaggcggtcaattagaagaggctgaacatgaactaaatctggcaagaaaaatgagggaatggaaactatgggagccattagtggaagagcctcctgccgatcagtggaaatggccaatataattattaagtgactttggtgtgttcatgggaaactgatgtaattaaatattctgttatattaagagcgtgttcttattactgacattttgtaatcaagaaaagtgatatagaaaatatgtaggagactgttaaaattggtgattatggtaatatggtcatgtgaatcaatttttgatttataaagtactcacacaagttgtttcaaagatgatatttctgtgaacagagaggccatgggaagatttgaaaattattaaagaaaaattcctacagattttcaatgcagagaccataatcaaaaagtaaactttctttagtagtatgttcaatacatcatttaattttttaagttatcctgaagaaggaaaggtccttaattattatagtctaaacaaatttatagattactgtttgaagtaaataatacgagtgaatattttcaaatgtgataaaatagcacaagtggctggtgataaaatttgaaattatggttaacctcagctgtgatcttatgtatgtaaagtgaaatttaaatagataattataggttgattacaaaatccatagtgtcattttattttagtcattattgaattataccatttactctgttttcttatagtcttaattttattatattttgttgttactgtattatatttgaaaaccttcaaattagaatacattgtacagttaaagaaattgacttggtacttaaaagaaagatttcccattgcatacaggttattggagaaattttccttttgttgcatttgtggaagttagttttctggcccgtggcctttaattttcttaatcaacctaattacatcaggatagaggtagagtttctgtaaaagaagagacattaagagttcctgaaatttatatctggcatacggataggcttatattcaaaacatcttagtcatacgaccataaattaaaagtggagtcactaaatagtttgcagtacgtttctaatataagtgtaggtgggtatcaaaacaagacaaatgctgttcagggaaagaagttggcaagcttaaggttaaacaaaaataaaattacatgtgttttcgccttccta

SEQ ID NO: 477 - protein, 55 aa, Homo sapiens
MVKAEPDVKKLEDQLQGGQLEEAEHELNLARKMREWKLWEPLVEEPPADQWKWPI

SEQ ID NO: 478 - DNA, 1217 bp, Homo sapiens
gtttttgaacagaccactggccttgtgggattggctgtgtgcaatactcctcacgagaggctaagaatattgtacacaaagattcttgatgttcttgaggaaatccctaaaaatgcagcatatagaaagtatacagaacagattacaaatgagaagctggctatggttaaagcggaaccagatgttaaaaaattagaagaccaacttcaaggcggtcaattagaagaggctgaacatgaactaaatctggcaagaaaaatgagggaatggaaactatgggagccattagtggaagagcctcctgccgatcagtggaaatggccaatataattattaagtgactttggtgtgttcatgggaaactgatgtaattaaatattctgttatattaagagcgtgttcttattactgacattttgtaatcaagaaaataaactttctttagtagtatgttcaatacatcatttaattttttaagttatcctgaagaaggaaaggtccttaattattatagtctaaacaaatttatagattactgtttgaagtaaataatacgagtgaatattttcaaatgtgataaaatagcacaagtggctggtgataaaatttgaaattatggttaacctcagctgtgatcttatgtatgtaaagtgaaatttaaatagataattataggttgattacaaaatccatagtgtcattttattttagtcattattgaattataccatttactctgttttcttatagtcttaattttattatattttgttgttactgtattatatttgaaaaccttcaaattagaatacattgtacagttaaagaaattgacttggtacttaaaagaaagatttcccattgcatacaggttattggagaaattttccttttgttgcatttgtggaagttagttttctggcccgtggcctttaattttcttaatcaacctaattacatcaggatagaggtagagtttctgtaaaagaagagacattaagagttcctgaaatttatatctggcatacggataggcttatattcaaaacatcttagtcatacgaccataaattaaaagtggagtcactaaatagtttgcagtacgtttctaatataagtgtaggtgggtatcaaaacaagacaaatgctgttcagggaaagaagttggcaagcttaaggttaaacaaaaataaaattacatgtgttttcgccttcct

SEQ ID NO: 479 - protein, 55 aa, Homo sapiens; identical to SEQ ID NO: 477

SEQ ID NO: 480 - DNA, 108623 bp, Mus musculus
  misc_feature (1)...(108623): n = A,T,C or G
gttccactcactatcactcctagtgaccctcttggaaaaattgttgcttcctgatcccgcaactctaggttctgctaacctagaagttttggttccagagaagggagtgctcctaccaggagccacaacaaacattccattgaactggaagctcagatttccccctggtcattttgggctgctaatgcccttaaatcaacaggctaagaaaggaataacagtgttaggaggggtgatagatccagattaccatggggaagttggattgcctctccacaatggaggtaagcaggattaagtctggagagcaggggatctgttagggagtctcttactattaccatgtcctgtgaatgaagtcaatgggaaactacaacagcctaatccaagcaaattgacaaaggacacagacccatcaggaatgaagatatgggtcaatcctctaggaaaagagtggagacctgctgaggtgcttgccaagggtaaaggaactacacaatgggtagtagaggaaggtagttataaataccagctaagaccatgtaaccagttgcagaaacaaggattataaagtaatataaatgcttctgtcttattttgctaagaatacatttgtctttcttccaatttctttaacatcaattggtatttaagttgaaacaataaaagaaagttcccaagtgacattgccccattgtaaacttacaaatgcgtttgtgattataggaggaatagttatatcatgttaggcgtattcatgaccttgttattgtttcatgtggacataagatattatttgtgtcaagttgacaaggggtggaatgtagtggctattcctggttgtcaacttgactgtatctggaatgaactataatccagaattggaaggcttaccagtaatcctaatctggaggctgagagatacaagtttctgtcctggatcttggcatggagatatcttgaggcatagtggctatgaattccagaagattaaaacagggagatctccgagttcaggtcatctgggattaaatgtgtggtggcacacacctttaatctgggctacaccttttgctggaggcctacataaaaagacattggaagaagaaagattcactctctctcttcttcacctacttgccttgtgggactgagcaactgctagatccttggattttcattcacagctactgctgactattgttgggaattggactagagacagcaggaggctagcatagtcctctcagagcctcaatacagcagctgactgaaacagttgaagagactcacagccaaatgttagatggagcttggatgtcttattgaagagtttgtagaaggactgagggacctggagtggctaggcactccacagttggaccaacaggatcaagtcacttgtactcttgggagctctcagaaaatgaaccaccaactaaagtgtataccagcgggacttaaacccccatacatatgtagcagatgtcctgcttcgaaggtacctggaggagatggggcaattatcatgatataaagtgaataaataaattaatggaaaaacattctcaggccacaagtagtgtttctagagtggaacctagaacttgctgattctgaattcttcttttcttccactgttacctgcctatacatgctatgatggtttgatgatggtaggtgtaattacaaatattagacagttggtgtatggttgcagttatacaccttaatacaccttgagtaagtattcaatatgttagagttgtaaattgcctttgagtaaggatgaattataatcattatttcctaatttaaaaaattggaatgaatcaaacaaatactaatctttaaaatgtcagtgccttatagttatttacctaactatatcatgcaatcatatattgactatattgcaacatttcataagtgtataacataactcaatcaagagttcttaagttaggctgggttgctgaaaaatgacatgaattttcagctcaaattcatttagtttaaaaaggattctatgaccttataaaaccagaaaaatcaccaaagtagacttttgtgtgtgtgaatttcttcaagaagttgttcaagaaaagagaaacaaacatacgcatgagagaccactcctctccaccctcccctcccctctatctgtctcttttctctataagacataaaaacctaaaatggtcttgacttaggttacataaccgacttctctgtggctgagggtgatcagcgatccagtgttctgactggccagatgtgggtcaaatggtcactctgatgatttatggaaaagggtatagtcactagcatcccaggcaaactcttatgcaacaagtgatgagaaacagtcctccaaagaatgagacaggttacaactgtctcatcataaagaacttagtatctgctaaatataagaagtatagctgctcgttatgtgccacaagctctttactatttaagtgcatgtgtttctgcaaagttcctgttgacacatacccccaagtggcttggatatgtgtccacaacaaaaagtgactaggatcggagaatggaatccacgtgaatgggattagcccccttgtaaaagcctagaggaagtccttggtcttctcttctgtgtgagggctcagtaacaagatgtcatctacaaagtgaagaggcatttctagacaccaaatcaaagagtagactgatttatactgaactttccagcttccagaaaggtgagaaacaaaatatctgcttataaatgacttgacctaaaatgccttagatagggctgtgcaaaggggctaagacaggtttcctgttttgaatcagcaagttttgttcctcaatgaattcctcagagacctgtaaagtgaacatctattcgtataggagacattcaagtaatgcataaacgaaaacattgagattatataacaaataattaaatagatcaaattagccagaaatctccctaggacaattgttatgctgtcaattacgtttcctccctaagacagagaaaaggttgaatcaaaagggtcgctttctctgtacctgccatgctctctgggtaactgactctaagacagtttgctgtgtatatgagtaagtggcctcgaatggacaccagtggaagaaaggagccaggagtgaacagatgtgggcagaacgaactgtcgatgataaagcagccctgaaggacagtctcagctgttactgggtggtggctatgctagtatgggtacaagactatctttagtacaatgtgttggcctttaaacattggccacatcctactgagtaacagaaactttgaaaaattctggtttggggggagcagcaagcaaaactgcttgctatgaagccgatcggagttctataaaggtggaaggagagaagcaactccacaaagttgtcctctgcctccaccacttgtcttggcatgtgcctgcaagcacacatttgatggtgggggtacacagcacacagggcggggtaaagtccaatatactgaggatcctggcttcagtccccaacacttcaaaaaaaaaaaacctaaaattatttttattattctttaaaattactcattttatttctttttgtttttgaaaagaacagtttagaaaaatttgcactttggtatcatccgtgtagttctactgcaccatcaaaacccaagtgactatacctagattctccatccctaaaatacatgcacaggataagtgtgcagatcatgatgatgaatctgagttaaataacatgttacagagagcctgtcattatgtgacttgtactataattcattccagttgagttggcctgagatttacaaagcactctgcatttgcaatgtgagacccagagggttttcccagcaccgcctcccacactgccttgggctagaacctgtacaggtgaatctaactcctcgaccttcacttcctcactgtaaaacaggaagtataatgatgtcagtgggacaacaggctgttccaccttttggtttgtttttgttgttgttgttttgctgaggtgaggtctcactgtgtaacccaagtttgcctggggctcactgggtagttgaagctggataaaagaaaaacaaacaaacaaaaaaaacctaaaggtcttcctgtattagcttcctaagtgcttgtaatttaggcatgtgacaccccaatcagaaggaacgctctgggaagcacaagaccctgccagctgtgtaagtgtgaactcactggcagagttattcagtgttattattaccaaagcagggttttcacatttgtaaacagccttgatgttttaaagcggaactaagcaccctgtatcctataccttaagtatctactgtgcttcttcaagacctgccttcagcctcgtggtgccccacccccagagtctctggaagagcacgtcagctccagggtgtgaccttgtttgtactttgctgctttatcactatcaagactctttttgtctaccatgtctaactctttttgggacctcctctgccctacaggcctctgtgccttcaggtttctccagtgaggtcaagacactatacacatgcctgttgatgctccagtgaggtcagggctctatacacatgcctgttgatgcttacaggttttgtatttttttatttccatttttatgccagctaaagatcgtttttataccctagtaggatagttatgttccccttatacagttcatagataaatgggagtagtgggatttaaaagctgacttgaaaagagaactcgaggggttaattagatgtccatgctgttgcaggataaactcaagcagctttgttaggctccctaccttaagtctgattgtcctcaactgtcccttgcatattcaggagtaagtatcaaatataagtagcaacttctctttttcacttagtattcttaagttgttgtccaccacctaacaactttgctctaataaatgatcacctactacgtagagtgtagtgtgcacaacatcctggactctcatctttaagcaagatagacttggagcctggataatagaggggaaaaatgaaggtaaatatttgaacataatttgaggcttttataaagcagactagaagtagggctagaagaagcaatcaaagtcttacagaaactcaaaggaggacccttacctctgtttgtggtgatgcaaagagatttcaaagaagaggagggggaggcgggcataaaagtctggatcttggccagcaaagataggggaagacatacaaaatgcctgggccagaaatacagtgctgcagggctggagtgaccaacatgcagatgggaaccttgaccattgcaactggctttaggctcaaggacccgtagggagtaaacggagagggatgaaatgactgacctctgtggtgaagtgtacaggtggattagggccaggagtccttgagggaggaaagagttgggagccagaagagatggacaaaagacttctttcctgtagttgcttgtgggcttcgggagggctggtgcagctaaacgtgtgcctgacaggggagcctgtgggaggctatgaaggaaatgcagggcagggacactaggaaaggggataaatgagggtggcaagaagtagcaaatttattttagtcatgttaattggaactgtgattggcttatccagatggagatactcaaatctcaatatggagtggaaaacaagcctgaagggagaagagatggatggaagcctgggagcagcagactcgagttctacgctttccctcagaaatcctccctgcccttggtagaacacgtgtgtttaaggagtgggagaagataagacccggagctctcagagacacaacagccagaaacgtaggcttgctcatacagaatcagcaaaggtgaaggaagagagagaaggccagggtaggagcaactccttaaacaatgccgagaggtcaactgaatgaacacaatctaagcaaagacctcctggtgcctatagaatcctactggcttctgttaagatgtctgatagatgagctatgtggtattttaatagcatcgtattctgcatcatcaggtaggagctggtgctaatattttactcccagcactttccaacaataaatgtgtgaataagtaaacaggtatatgaatgaaattgtcgatggtgagggggtaaagagtagtttcagtagagaggtgggcataaaaatcaaactccaatgtctaaaatacatgatggacacacatatacatgtatacatacatacacaatacattcttttgtaagaaagaaaaaaaaacccaagtgtttcaattcttaaagttgatggctttaattgtaatggttttttaaaaaaatatgaactactactgttttctttagttgctagttcaggagaagattctgctaagaacacagcttgtttattttggattgttggccagtgagacttcagggagattaaaattacaagaaaaggccctgacagctatctatgtaagcaaggttaaaacaacattattcgcagtcagctgcggtcctaggctttgcaaagccatgctgttggaatgctcagagatttggggacctggagatctcggggcagccaggtgagattaatctggagaagctttagaaaggagataattttaagctgttttgaaaggagactattctagtcagttggcaaagagtcttagagcacaggattaggtattttaatttgattacttgcgataatttggagctaccccagtgttgtgaagagaccacgtaagtgcttcctggaagatgagtcatctccacagttcctacctctgatgtaccatgtaactacctggagagcccagaaacgcactgttacccaggttgtaccctaggtcagtgcatctagggaggtacccaggcatgagtggtattttgtgtttggtcttctctttgttgttaagttcttagggtgattctgatagccaaaaatggcataagtttctctgagtgtagggcaaactgtaagcaggtatagaacaggccagaattagaaaggttagcaagatggcggaaactggggagaccagcctagccttgtgtacagagataaaagactgaaaggaaactattctggagggagccttgctcaggctgggcgatgcttgtcagttgcaatttttcacaaagctatcctctaagaacacagtagctcttatgatggatcacttggaaaatgagcacataggatgtgatttttatttttattttatttttttaacatttgggggctcttgctgttagaaaaattcctctgtttctgtaagagcacatttggtcaaaggagacacaccatcatataaagttttactaatacacttaaatattcttattttatttttgtgtactttatgggtattttatctacattttatgtaggagcatcacgtgcattctgggtgctctcagagaccagaaaagtgtgtcaactcacctggaactggagttacagacgattgtgagctgccatgtgggtgctgggaatccaactcaggtcccatgaaatagcagcaagaattgctcttaatcactgagctgtctttccaatctcagcatatttatatttgagggaggaaaataaaagctaactgataaatgttgggattttttttaattctgattttttttggttgagttacagctaggatatagtgaaattacgatccatttagactttagagttgagattaaccttgaaggaagaggaaagtcaggccatcaacaacactgaagagaaggaagaggaaagtcaggccatcaacaacactgaagagaaagatgcaatgtcattttcaaccctaactgtctccttccctggaatgaagctttgtaacaggtgcgggaatggataggtggtgtttcaggaatgacattctctcagaaagatgagctggcaagcaagggcaggggtttccatgttcaagtcagatcatttccaatggactctggcatgtcccacttttacagtttagaagaagggcagaatgtctcaaggtgggctattatttataataagaagtactgcttcatggtataaccggtacaggagtgtttgataaaacagacactgacagaaaacttcactggcaaaaactcctagagaagaagtgactgaagacagccattgaagcaaaatcatttttctgatcttcaggatgagctcgggacagtgatcagcctctataacgttcagatgcacggggacaagagtgttggcaagggctggtcctagaggtctgcttgctgtgatttgacagagattctctacttcctcctcaaacctccttcagccaatttcctcctgtttgtagggacggagtagagtgtgacaggctagtacactgtttccactggacctttgagagaataaaggtacaatatagggagcagcatatccagaaatggcagtcacttcctgcccctctacagagcagctacaatactggctagaaaagtctgtggtgaagtgggaattgaaagggcaaccttctaaaggtttacaggtctggggtagagtgctgtaggaaggagccactgagtatccagaaaagtaagaaaaccccgaagagtccacaccaccgtgagaggtcaaaccatgatactctctgcctatgtcttacttctcacctttgggcaccgagcccactcggtctcatttcacaaggtgaacttggctataggggaccacaatacctacccaaagttactccgtgctcctcggcacattccacttttcttaattgcttccaatttccttttctcaggtttgctgttccaggaaaaagggttctaaattaacgctctacaaagtccccctacatgttggtttgcaaaattaatgatcctcatggcagagcaaattaatctttgatgcttggttgacgctaaagacaaaactcactggggccctcttaagacacagaatcagagtcgtcccccacccccgccccttttcccttccgtgccagctacatccacaaagtaggcagtgcattacatctcagaagcccatctctgaatcttgtcgtcagtctgtgcaggggctgtgcaaggtgctcagaagctaggagaggctacgcagtggaagccaccagatagatggtcacaggagaagttccacttgcactttctacagctactgaggagacgtgttgctccactgaaagaacactacttgcttcaattttagggagactatgacagcatctgcgagagcccacagcacaggtctgagggcttgcagagagatctcagaaaggactggaagctctcgcactgctactgtagttctagccagaagcgtttgctacattgcaatgctcaattccttttagcttaaaaaaaaaaaaaaaaaattaaagctacacgcctgtcaaaaggacactttctgagagggcacccatcagcaatcatcccactccgcgcagggtcgcggctggaggcacggtactccgtcctcctcctcccaggtctgggaaagccagatgtttgggagggtctggctaagcccgctccacgatcccgcccgagccctggcactatgaaagaagctagtgtcctttcatttgtcgggtgtgaaccatagcctcgggttgggcctttgggagaaaattcagtcccccttcaagtccacctccgagtcagggctgtaagaagagtggcgggcgcgggctccaggactctcgcgtctcctttgtgctataagccgctctcggccggttcccgctcctctcccacagaacgtggaggacgcgcgctgggccagggcgaccctaagggacccgcccgcagggccctctggtggtagcacctggcggccaggccacaaccgaggggcggggccgggctgggcgggggttggcgggggagggggggaatcttcttgcgcacgagtccgcgcgctcgccgcgtccggcgcacgcgcgaggccgggaggagcgcgccccggcggcgacggcgggagcggagcggctgagagaggctggccgcgcgggccggcgggcagcggcagcgcccggagccgggcgaagggcgaggccggcggggacggcggaagtcgcccgcccgaccgcgagcccctgagtcggtagatggggctgcgcggcgcccgcgactgatgagtggagcggcggcgcggaggcggccgaggtgcgagccggtgagtggcggccccacgcggtgcggtaacggccggccccggagccccaagcccggcggcgccacgcgggccccgctccctgccacctgggcgcgggagccgtggcgtgtccctcgcgcgcccctcgccccacgcgtcccccgcgggccgnnnnnnnnnnnnnnnnnnnnnnnnnnnnnnnnnnnnnnnnnnnnnnnnnnnnnnnnnnnnnnnnnnnnnnnnnnnnnnnnnnnnnnnnnnnnnnnnnnnnnngccggccgcctccctctgcggcgcgggcgcctcggcgtggacccgggcgggcgagcgagcgggctggcgctgggactgacacctttgggggctcagagatcccggggaggaggcttgctgcaactcctgctgccacttccgagccacgaggttccagttgtttggctaaagtggctgtgggcgagcacacgcctctgcgggggcggtcgccgctcagcgcgtgctctccgagccaggacacatttgcctgaaagcagaaaggtgcctgccttctcttcccccacttctattttggccggacggcaggccggaggggagtagatgcaagatcggacagcgcggtgacagcttgtggattggttggggtgtctttggttatttttcttgctggggggactctttttttttttttaacactttattgggagtttattctcaaggtaccagttcctgggatcgcagctcgagaaaacattcattaagctccccttttctggggtgagtatttgtgtaggtggggagaagggtgaggaagagactcaaggctgtaggcaaggctcagaaaattctccgcattactcaaaaagcagccggttaaggtcaggctagccatgcttttactcttttcctacgcctctgggaattcttggaattttactttagccctcctgaatggggttccttgtcatatagctgacagcattcggggtgcgttaaattggtcttcacttggaatatgagttagcagccatttcttcccatgtggtgtttcaggtcattatttcttttttggaaacttacatacgtctcatgtgtactaaaactatctcagccttggttaagggtaaattttggtacactggtcaaacaatgcaccagcctttggctgtgtagttatgataaactactaggcctgattgtagttttgtggttagaggccttattgctctgtaaacaaataactttgggggttgtttcattttgaggtcatttgtttcttaaagctttcatatatttaaattattaaattattgtttaaatacatacattgctctataaggctcatgtttcttttattccaaattagggttacataatgcaaaaatggttacactttgagttgctctattttgtcctatggagactacaggctatgtaggagcgcgggcttatggtgtgtgtgtgtgtgtgtgtgtgtgtgtgtgtgttcttgtaattattgcagtgaatctcatttccaccttggaatattgaaacacacacacacacaaagttttgaggtaaaaatatcaagctgttagagttaagtttgatagctctgtacaagacaatccttttttctcctcttcaggaaaactgttggattttataatttttttaaaaaaaatatttgagggagcaatttgctttttttcctaagctcattttttttttccccctgaagctgaaattgtgtcagaaggctacccaggctgcttctctcctttccctttaaatttgagattgaaaacaaaaaagacagtcacaagaccctgggtacctgttttataatgttttaaaattgtgttgcttgtttgactatataccatacctatatgagctttacctctgaataatggaagattatcagaagacaacagatgttttaattaaatgctttgcacattttggacatctgagctttatcagaagtgggtgacatccgcaaatcatttctgagagagtgagttgcaaacaatacagagctcaagctagtcagacagttaaaacactaataaaattaatacagagaaaggtaggaagacctgattgtattgtttatgtcatgtacagtcaatgcggattactagtgagaagggaacttttgtaaattgtaagttgggtatgtagtaaagctgataaattctcattttccatgtatttcttttgatatgtaactaaatttgtatcagaactgatcttcaagtaaatgtagttacaaaggatatgctgatatttagggatggtcaagcagatttgaaaagtactcatctatttgagataactgtcatccccagaaaaatctatcgagaaaaattattgtagttttgttttactgttagtttttttccttccaaaatagtgctgtgttcataaacatgggatctgaaatcatgatgctctcgctactctcgtgtggggtactagtatttgattacatttttgtctaattataggcaccagctttacctagagtatttttggttggagtcaaagccagggcagtgattagcccagacgtggctgtcatttatttgtgaccacttgggggagcctttgcagttcatctcaacagatccctgctctgcgtgctctggctgctaatcgtcctgggcgctttgccaaactgctggagcggctgctaaggaggctgcattgagaaccgagtctggagctcagtgtgtgtgatgccttctcctctaactcacactccactccactcaccaaatacctctcctcatagacttagtaacagtgtactttttgggctactgctagttccatgggctaactaaccatgaaatcttggattcatgagtgcttccagagagctgattttactggcattaatcttaggagcagtgcaggcttgatgtacacagatggtagttgtgttgaagggtctggggagatcatcactcttgtatgaaatatactaactccaaacctttttagagcagattaggctccttttaaaaacttttagaggaagagatagcaaagcacctcttttagttaaatctgtgttcatgtttgtgcagagaaaaggtggtcttctgttaaaaacctatactctttgaccgtttgattattcttctgtagtataataaagtcagatttatacattttcttttctgacaatatttaaccttgttctggccatttcagaatgtgagctcacttaaacaaagtaaaatgcattttagcaagtcagagagaaggtaacttatggcctcccttaattatgatagaataactcaaagacctttctcaaattttctgcatggtacattcatccacataatgatgaacaatttggagtagttcctatcttctaaattgcttctttttttctttaaaagaaactttaagacaattttacttttgtcctgaaattcatctttcctttcctttaaaaaaaaaaaaaaaagatgtattttgtatgtgtgtgggtgtgcctgagtgtatgcctgtgtgccacatacacgtgttgcccatggcggttaggagaagccattggagccaatgaaagcatgcttacaggtggttgtgaggtcccgcatatgggtgctgagaactgcacctcagtcctggaagagaagtgagcgctttgaatgctcagccccgcttgttggtttgtttgtttgtttgtttttcagtgtaacataccagaagagacatattctgcttagttaaaaatgttcatttgttgctagcttccactgatacttgagtattgttttaaatacctggggatggtaatttcaaaaggcctcccctttgaagttatcacagatttaaagtagaatgaaaattgaaggagaagacaacacagtgagtaggttttgtttgttttgtggttttgttttgtttcactttttagcttattttcagacttttccccactctttgctttcttgtgcatgtcactcagcttgtcatattccgccttttcttttagactccctgttgtgggttccttccccttcctcctacagctcctgttgttgctctactctggctacagaggagcactttctgttcctcttagtagaaatatgcccaccggcagcttctgtattgttacagtccctgctcagacgaccagagacagcagtcagtactggttgccctttgcttcagtttggcagactggcttacgctaccggaacttggtggtacttattgtaaccgtgtgcattcccagtagacaccccatgataagatctatgctcagtcattccaaaagcagttttatctttaccctttaatttaatcttcagttccatatatctgaaaagcattctactagggatatacaaaagaattacacttaatgagaagagcttacgtttgtttaagaacgaaatatatatgaaagaatcagtatattatgaaataataaaaatgatgataataaagaaactgtggaaatacttggatttctactgaagacaaaagacttccaggctggagagatggcttagcagttaagagcaccaactgctcttccagagatcctgagttcaattcccagaatccacatggtggctcacaaccatctgtaattggatctgatgctctcttctggtgtgtctgaagagagaaatagtgtactcacatacataaaataaatcttttaaaaaagaaaaggaaaaaaaaaacacttccttaatatgtaaaggatatttactaaccaacaaacaaaagattttaacaccaagtaggaaaagccatggatagaatctaaaaataggaaatccaaattattttatgcatatgttaagactttcaagctcatatataatacaagtataaaccaaaactgagtattgggtgtggcaacacatgtctgtaaatttagcactcaggaaaccaaggcaactaaaactatacagtgagaccctgctttaaaaactaactaaaacaaaaaatcctactatgtaccattttcatctatcagattcacagatcaaagatgttctgccaatggttttaaagaggatggaacttatccagttttctcgcattgttacggaaatacaaagtactaaaattagatgcagttgaattctaaaaaacattaaggtgactgctggaaattaaggaaaggctagaaacatgaacaaatcgacatagaggttgaagaactaacatgcaacgtatttatctgaacactaactactttctggcttcactcatgaagctaaagaaactggccttctcttttactctgcaaaaaccaggcagtcaccttctcttttatcctgatgcctagaagactgagtggaaggaacaaaacctattacttttataaaaatcagaaagtaatttggtgcctttggaagaaatcttaatacaaatgttatgtcacttgcaaatgtacttaagacatttttggcagtgatggtgcacgcctttaatgaggcagaggcaggcagatttctgagttggaggccagcctggtctactgagtgagttccaggacagccagggctacacagagaaaccctgtctcaaaaaccaaaacagaaactaaaataaaaccagaaacaacaacaacaaacaagtgggcagcaaaacagtttgaagaaagttttgttcactgcattgcgtgcagttggatgttttgtgttaccttgttgtgtagcacagagatgttagctgggtagagagatgttagggaaaggtgggtggacagacagctggaagtttgtgagagtgggaggagaatgccttggttatgtgctctgtgctcaggaaaagaagtgatgacaggcttagagacttgggagacttcagagggccttcatcttggaggaggagtattggctgtgggaaatgtaagtacgtttagttaaatgtttaaagagtatttgcttcatgaggttttgtaggtacttttgctgcagagtgactggtatagtgtgctctttgtgtaagtacccgacctttgtagttaccctatggtaaaggatttgaatcctagcttgtttatattgataaaagcccctaagagccacagcttgcatataaatgaatacatcctgtgaaaaagtccgtttactaccaaatcattaagagtgtttttgaggttctgtgttatttagattacttaacattagcactcagtctgccctctcccactttaggcaggtccacactgcagcaggcgtcttactcccccccccccccactcccccacttctgagctttgctcatgatcatttctttttctcagtctctaattaatagtaagggttcaggctttccttcctcaagaaactgtcattggttgacctcatctaccgtttttcttttcattcaagacaaactgtaccacataacttgtgtaaaatttgttatgtgaatgatggtttctgtgtcttcattcttaggaaccttggatcttctcctcccacttgcctggtagggttcaggagctatgctgagtgctcactatacatgatttcatttactaattgcaggtttaacagcagattttaaaaatctaaataaaatccttttggggtctcttagttttttcttggctgttgaaacaaattgccacacttactgacttaaacaaaaatcagtaaatttctcaccatcctgaaagccagatgcctgtaatcaatagtattgggcccagatcaggatatcaccaggctgcctgttcggggacctagagagttgttttagttgctttttcccagcttctcacatgcgttgcttagcttgtggctgcattattctcacctgaaggccacctttcaaagctcacagctctgtcctcccatttctgtattttttctgtccccccacttccatcttcctcaaaagatccttatttaacttgatttcactcttacgggttttcttgataaggtagtgttcggttcccagaggttagggcggattccttcgggaacaccttcgttcagcctctcagaagagtatgtatttagcttggtttagaaaaggaagaatggctaagaaagccttcctaccccattctccttccatatagtagtttttcttaacaagggataattttgctgacactctatcctcaggcgtatttcattgtcacagatgagaggtgttgctattggtgactggattctaagtgaagggtgctgcaaagagtgcccaggacagccctggaaagaaagcaacagtcacccacaatgtcagtggcatgggttgataaacactagtctcagggcatctactgactggatgtggtgacgcatgcctggaatttcaggtctgaggcttgctaagctgtataacaattagtccatccagggctgtttagtgactctgtgtgcgtgcgtgcgtgcgtgcgtgcgtgcgtgtgtgtgtgtgtgtgtgtgtttattgatttgagttacaaaaaaatgattcatcagtaacttaactaataagtaagtgttggtacttaaaacataaatgttattgtgttgattttaggaatgtatcttgccaggacttctggctccttactcctgtggtacattatcactgagaggttggcttggtagtggaggtgatcctgaggtggggactccacagttgtttgcctgtcttgcccacccttgattatagcagttaatcttgttttgtcccttagtgtctttgggcctttccaagctattgaacttgatacctgcaataccatagtctgtatcaaatacaataagatatacataaagtagtgtgttttgaaatcttattttcagatccctcctattttcatagcttctaacctagtgagatgactatggctgatgtcatacttctttagacattcttgcatgtttcaggaaattttgtttaatcttgtcctaattgactttatattgctataataatacgaccaaaagcaatttgggaaggaaagggttcattttaggcttatagcttatattccatcatctgacatagtcccacagaaaccacggaggagagctgctgacacagcgtgttccctttggcttgctcaccagctttcttaggctcgacttacctgcctagagatgggtgggccaggccttcctgtgtcaattaatagttaagaaagagacatacagccagggcacagtacagttgaagctattcttcagttgtggtgccttctacataggtgatttaaggtgactttaagtttgtgtcaagttgacaactgaatctaactataacaatactaaaatcatagaatttataaactatagaatattgctatgactgatcatcttatgatttattagcatctgcttcgtacttcattttttgctaagaacatttatttttattaaatataataaatatttaaattttaaaaataatttaaaaaaaatttttttttgagacagggtttctctgtgtagccctggctgtcctggaactcactttgtagaccaggctggcctcgaactcagaaatccccctgcctctgcctcctgagtgctgggattaaaggcgtgcgccaacacgcccagcaatttttaaatttttaaaaatttaaaatttaattttaagcttaaatttaagttagaaactttaaagttttcaatttaagtattttttaaaatattatttttttcttttcccacatttttttctcaacacgataagggtgttggttctgggttgtagcctcagcttttccgttgttcttttataatgttcagatgatggagctctgttcagtttagaacagtacgtttactgtgagaaagtttcacagtgtcgttggagaatgggtctttctctgtaaccccaaactggtgttgacggagtgatcatcctgccccagtgcatggattataggtgtgcactgccatactggctatgattttaattggttaatataaataaactataacgttttaggtgttcagtaaatgtaattcaggaactgctttctcttattgtatggtacagtgtgggatgcacagaatctaatacctaatagatttttagttaatttcccttttttgattcatagtttttttttcttcctacaatataggtttaagtaaatactttgaaaataatttttattttaaattatgatctgttgactagttactatctattttcatctgacctttcaatgtatttacaatgatcaatcaaatattgactgagaaagtgcagtaggtgagctgagttccttctagcatgaaggttttataactcacacagtccccagttcttgtatttttctgctaaaagtctgtagagtacaagcagtattcaatgaggtggcatcttgttttgaataaagcaatatatatatacttctaatagatccatagtagttcattatcatataatgggtacttttagcatttcagaggagtatggttatcttcaactgaatttattatgtatggctacatgcacacattgttttgtggacgcttcaactttttttttttttttttttaaggaaaactgttcatcttttagtcctctagctgccactttggtcttttttcttagagtaattgagtaaagttgaagttacctattttggaaataatcattcttatttttatactaatatatttaaatagtttttattttcttttttaaaaccagtactcgtttggaatgagaataaatgaaaaaaattcaaccatttaagatgtttgaatttttggggggcaatctagttttagcaagctttcataaattgtcgggtttgagttcttgaaaacgtcaaagcagattcttctttttttttttttatgatggaatttgactttgtaggtaaataaggctaaggagattgaagttgtgaataaactcataaaagttcttaggatattttaatggtctcccagtgagagttttaaaagaacatatcttcaacagtttatgctacttaatttagaaagtcacaataatatacaattaattgcttaagcacttagtcactgcttgcttgagagaaactttcgagttatgtgaaaattttcttacattctctttaaagttcctgactcagtctactgtctcacagacagtacagctgcaatgtcaggggacgcttttagcagccttctctcctgttgagcctgctgtggcctagcaggctaggcttccgctcagtttcatgccagtgccggtcggtaagaaggcggcagtgaagctcttacttggagggctctcctccgttttctttctcttcttatctccactccagtgttttctagtcctactctgctaattttgcttcttatcttctatctaaatctgtgctttcttttcttatatgttcccagaagaatctatttatactttgttacttttcagtacaaattttcactgaaaataaatctgaatatgaatattctggaaacttcaaatatatataatacaagattccagtgtgtagtttgaggaaataaactgttttctccagccaaacatcattccgtgaacataggctatgcttataatttctaaaaaaaaaaaaaaaaatccattaggaaagcttagcaaataagtaacattgttaccaagaataacattgtaagttataaaattattcaggacagaatggttgtttttcagtcaacttgacacaagttagaatcacctaggaagaggggacctaagttgcagagctgcctccatcagattggcctgcagtcaagtcagtaggcatttcttattagtgattgacttgggagggcccagcccactgggagtggtgctgctcttgggcacatggtgctggattgtacaaggaaacaaactgaagagaccatgggaagcaagcaggttatcagcattcctccacagcttctgcttcatttcctgccttcagttcttacctcaacttcccttagcgatggagatggattgtgacctggaagttgtaaaatgaaataaatctttcttccacaagttaattttggccagttttttttatcactacaagcagaaagtcaatctagaacggccagctagtaaaatatctgcctctaagcctgctgatccctgggaccctcaaggtggaacaaaagatctgataagttgtcctctgatgtccacgtatccagccctaataaataaataaaattttaattatttagaaataacattaaaaaaaaaaaagaaagttccctatgggtagaaacttgttctctgtttggttgcattaatcttgagataagtttgaagacataaaactgattgcacccaattagaaggtggccatgaattggttagaaattgacaagggtgggaaaggccttccatggaatgagtaacatggatgagtttaggaatgaggtgtgcagtgtgcagacaggatggaaaagatcagggagattcggacagctctgggtgttacagaaggagtcgggctgcatagaggaaagcctagatggtcagaagagaaatgcaaacactcccaaagacagaaaagcagaggttttctccagttaactgtttccaagtgagttgtgtgatagccttttgcggtcagaaagaagctgctagctgcaggttaaaggtgaactgaggaggccgagagacagtggtgagagtcggcggtcaggagtaaattgaggggtgccgggaacccaccataacaaaccaaatggcttgggggacacattgtaaacttttccaggggttcttatgcggtctgtctctgagttctcaggcttgagatctccccaagaacttgtcttttaattcaggtaagccctgatctggtttttagttattttaggtcatgtgtatgtgttgggggaacagatgcagggcctcacacacgctgggtatacaccctctgcccctgtcctccttaaaataataaatcttatattccctaagtgttagtactgttagctgtatatgattgtttcattaaaaaaaatgaaggagttcatgtgagaccatttagttaggtataaaatgctaagtaggatttcatctatcgctgcacgacacaacacactgccaatctcagggaaaggacagtgactgtgatgcatgaactgtatgggggttgccacgtaaggtagagaagaaccacagaaatcacaaaaattagaaaattaaggtaccaagctgatcttgttcagttatatttataatcctggctctcaggagggggagaagcaggaggattgcaagttttagggtatcctgggaatagggaattctagggtagcctgtgctataatttagaaagaggtctgcttcagtccctttgcctttccccctctagtctcccgaaaataaagatattaatggtagtaaggatatgataatattgatcacagaatattaaaaacaagatttaacagccatagaaataacgtgtattccagtatttgataataaggtggtttttagcattgatcagctttgatgtctttttcttgattgcatgaaagtacaacatagcaaatgtattttacagtcgtattatatctttaatgccaaattatcgtcaggtatttactaagtgaacatgaaattttacttttagattaaagaaacatcaatgcttattagctcaatgcatttgcattcctgcccctaagacagggccagcaagcatgggcctctgtgtgtagatggctgctgtggttgcaaggcttgctcctattatgtattttacttcctctttcaaggaatgccctcccttttaatgacttttaatggtaatcagagacagcatagcatgagtctgagaggtgaagttgtggcaaaatggtaaacgctgagaccttcaggactgcccttaaggctgtggaaagaactctaaaaacatgggttcgaaatatataacttctcaactatgtaaaatataaggatgcaattatgaagggcttcactctttccagtgatggccgactaggccatcttttgatacatatgcagctggagacaagagctccggggtactggttagttcatattgttgttccacctatagggttgcagttccctttagctccttgggtactttttctagctcctccattgggggccctgtgatccatccaatagctgaccatgagcatccacctctgtgtttgctaggccccggcatagtctcacaagagatagctatatctgggtcctttcagcaaaatcttgctagtgtatgcaatggtgtcagcgtttggaagctgattatgggatggatccacggatatggcaatcactagatggtccatcatttcgtcacagctccaaattttgtctctgtaactccttccatgggtgttttgttcccaattatgccccagtacaggggaacgccagggcaaaaaagggggagtgagtgggtgggtaggggagtaggggggtgggtatgggggacttttgggatagcattggaaatgtaaatgaggaaaatacctaataaaaaaaaattttttttaaatcctaccaattacaagaaaaaaaaaaaagaaagaaaggcttcacaaatccaaaggaacaaaagcagctgcactgtgagccaacttgttggaaaggtactaaggaaggagataaagagatttaaagagtgttgatgactggagatcccacccagccaaggttgtttgtttgtttgtttgtttgtttgtttgtttttctagacagggtttctctgtatagccctggctgtcctggaactcactttgtagaccaggctggcctcgaacacagaaatctgcctgtttctgcctcccaagtgctgggattaaaggcatgcaccaccatgcctggttagccaaggttttttgtttatgcttacctagacagacagattcctgagttctgggtcagcccaggacagaacgaggttagccccaggtgtagtagaaagtgtaagttctggatgggggcccacccaactggtttatcaatgtctgtgcataacagaggcaggcagatctctgagtgctttttgcattgttaaaagaaaatttgtgattgttctttccttggaactaaggggctggggtgctgggatgctgattcatgggataatcaaaagggaacctggggtaaataactggattgatatgtaaaataaaataaaagactggggttttgatctgcaagtgctgagttatccggagaattttttagagtagctgaaagaactgcttggagaactgtctggagcagagaatagcatgaggaagctgtctagagagagagagctgcctggtgatctcagagaaagcagaggagagatggaaagctgtctccagcagaagacaggccaccagtttagactcaagatttgacctcaagtcctttgttcctaggcacctcttcttcccaagtccttggcaagtatgtatgcagaatttgttgttcagacacgtgtggactcaagttaagcaggtgttttctttcaatagccatttcctgtctgcttcttatatgcattgattatatttttatcttccattttcatccaggcaagtttggcctcctctcaaatctaaaccatgtgattctttgctaagcctgtagaaactgagacctttgataattattcagtgttattcctcagaccatcccggtctgtactgcaaactctggtggttattgtttgactcttaacacctccctagggctttcttaagctgtgaggaacattgatgtgacagccactgcttcaaagcagcagcatctctaccttcccttacctaatgagcacactgtgagcatttgtaagcctgttttaatgcttgagatattttagctaaaagctttgcacacactgctcttaggagcccaagaattccagggtaatcagtggtgttgctctgaccctagtgctttgagggagaatttaaccatcccagtcccattacttattcatttatgttggtttttttttttttttttttttttttttttgagacagagtcttactttgtggttttggcttgctgggagcttaccatgtagacaggctggccttgaactcacagatcacagagccttgccagcctctacctcctgagtgcagagattaaaggtatgtgccaccaaacccagacccattacttatttataaaatatttactttaaatgaaaatttaaaagaaattgttatatgaagtgatagtttgaataagaatggccctcataggctaatatatttgaatgctcagtcaccaaggagaggaactgtttgagaaggattaggaggtgtggccttattggaatagatatgcccttgttggaaaaaaatctgcctctagaggtgggctttgaggtttcagaagccaatgctagacatccaagtgtctgtctttccctgcctgcttcctgcagatcaggatgtaaagcttagctcagctcagctatttctccaggactatgtctgtcttctataaggtccccaccatgacggtcattgatcaatcctctgaaactgtaagcatgcccccaggtaaatgttttcttctgtaaattgccttggttatggtgtctcttcatagcaatagagcagttaactaagacacatgataaacaaaatgacacatgctttcaatcccagtattccagaggcagaggcaggtggatatctcagttcaaggccagcctgagctacataaaaagaaaataaagtttctctccctacccttttttcataagatgaatcattgctacagtttcagagtcgctacactagtgatgtttcctaccagtcagtgacgagcgtttttggccagatccttggtggagaatcacccttaaagctacatgggcccttggcacagcataatgctccagcacatttccaaggccctctcagcagaggagtggcactgttatgtttaaaaataaactgtgtgtcttagaaaacatctgtgtcttcaactttacacagcaggtattgactgtctgtcctataaaggaaaaatatttgtatttacacattctcaagggaggcccagagaaaatcttgggacaagcttgtgtgtgcctctgagggctacagtgcaagattacccagcattccctgctctcctcttcagcagcctgccttcctattgtcttttcagttaggcattttgaactttgtgctcttgcttggctgggtttttattcaaggtaattccatgtagcctgattaggggcacattcctccagatgtttactaagggtttttacagtaacttctctgctcagtttgaactttgaatcctttactggagaccatgagtaaatccccatacggaagaatagggcagaaccacaggaagaaattggattttgtacttgatggtgaactagtagaccagtggacttcccaggggggaagcacatttgtgtacaggaacactcacttagagggtgataatagagattatcttattcattttaaggttagtaataacacatatcacagactggataaattaaggaaaagaggctatttggctcacagttctggaaggtttcatggccacatctgccgttggccttcatgttggtagagtgtcaggaagcatgtctgtcctttttccctccctcttctaagatttaatcctaatgcactccaaagccttggcctatcaatactgtagtcaggttacatttccttctcctatctctcaatagagactaagcaccaatgtgagtttcaggtgagagaactcatactcaaaccatagcaggatgtggaggtcactgttaattatccactcacagggtctgaggtcccctgagagacccagctctggggcctgctgtgggtattctggtttcattagttgaagtgggagggcctgagccctgagtggcaccattccctggctggaatcatggcctgtgaaagtgggggaagggagctgagtaaccgcaggcactcattgttcttcctccttgacacacacacaccaccttgctagactgtgccttcgaactgtgagccagagcaggcctcnnnnnnnnnnnnnnnnnnnngttttagattttgacatgagaggagggaataagttataaactaaagtagtgacagtggaatagcaaaagggaaatatgcaaaattctgaatttccaaggtctttgtgatggagagcatatgagggtgactagttacacttgctagctttaattaagagggaatgcagggagggaggtggcacagaacagatttgggtgttaccatggtgaggtttataaacttggtgctgttggaacattttatgggaaataccgagtgcgaatcctagaagacacagctttcacagacatgagacactgaaaagtccccgagtgccagctgtggatcaaggcagtgtcttgagtgtcagagggaacagggccgtgagcgagcgactgagtggacacagatgtgagcaaaggtaggtaggtctaggtgagtgtgttgataagagacaggttgggtgctcttagggtagagggagtattgggtttacttcctggggaggtgacaactacacaaagtgctgaagaaaataaagattcatgggactgctgggcagtggtgttgcacgctgttaatcctagtgctccaggctaagccaggcggatctctgtgaggctgaggccagtttggcaaagtgcaagacagccagagctacacagagaaaccctgtgtttgaaaagaaaagaaaacaaaacaaaacaaaagaaagaaggacagggaaggaagaagggaggtggaatctttaagtgatttcaagtgggatagtaggacgtggaaaagatgctaagtaagtgaaagacacaaagtgggtggggcacatttacaggagaggaggttagtggacaagaggcaaggaactatcagaaatgaactcagagaggttcaagcaggtgccatggcaggctgtgggccagagtgtggtgtgtctatagggggacagttttaataaaaagcagtaggatggatctgtgctatgttttaagtgacagtattagctactctgtagagaatattgctgataactaaattgaaataggggaatttgtcaacgaccactgcagcaaaggtggtagtggcttaaagttagtgccacagatgtggacaagcagggaggcaggtgatttttctccagtcatttctgttctgactgaattgaactggaaaatgtaactcgggggtaaagcacttggctaatatgtgccaggctgtgagtttgatcttcattgctgcaaaacaaagttgtcgcaggatctctctgaagtctacttatttttctttcttttttttctttcttttttttttttttttttttttttttgttgtttgtttgtttttggtttttggtttttcaagacagggtttctctgtatggccctggctgtcctggaactcactccatagaccaggctggcctcgaactcagaaatccgcctgcctctgcctcccaagtgctgggattaaaggcgtgcaccaccgcgcctggcatatttttctaagtaaacatgtaaactgtgtgctgcttggaaacagtctactgataagattcatctaatagttttgagatactcattttcaatgacgcaaatgtttaaaaagtaataaagtgtggcattgatcctatagcctgtttcttttttttagtgctcattagatttataaaaattctttcagacagtattgatttaatagtaatactttatatttttttgtactaagtttcgacctgttttgttagttagaactcatatcaaaactttttcaaagaaggttgactgcagggcaaaagaacattaggaatagcaatgtttagtcaagttctgttttgtttgtttggcttgctttaatgtaggtttaactttctttccgagagctgtatctcacatgggtcagtgtaaatgatatgtttgaacatagaatggacatggacaacatggaggaagggtcatggcttggtataccagtagaagcattttagagaagaaaaaacatgaggtttttgatttatttacttatttatttttccccaagtgtatagatatcttgtttgcatggatgtctctgcccatggaggccagaagaggatgtcagatcctctggaactgaagttacagacagttgtgaccagccatatgggtgctgggaattgaacaagggtcctctgcaagagcagataatgctgagccatctctccagcccgagtcaagttataaagagaatggacagataatgacatcataatatacatgaaagtttggctctataataggaggactcagcttggtaaggtgggtgaatagttttaaaaatgataaaaacacagtctttgtgactcccaggtggagtgcattaagaggcagttgaagagctctgtcctgtaactggggtttcgaaatcatcatattgatgctacttgaagccccagaaataaataaggtcccttgagaagaatgcactttttagggacactggcagcagtgtcttagttaggtttctcctgctgtggtaaaataccatgaccacaaggaacgtggggaggaaagggtttctttgacacgtaggttataatctatggtcaggagaagccagggcttctgaggctttgactgttttgctcttcctagcttcttcatcctgctttcttctatgctcaggcccacctgcccaggaatggcactgcacacaaagggcgctaccatatccattatcagtcatgaaagtgcccccctcccccaggcttctgaagaggctgatcatacagaggcgttttctcagttgaggttccctcttcccagatatgtccagggttctgtcaagttgataggcacagcacaggcagtgatagcctgtgatttcaatagagtatgtgattagtttgtcaggctgctcctgatttcattgaagaaatttgaagagagcagtagcagattggagtcctaaagagacagtgcccagtgcaggctcactagaggctcctacaagctagagcaaggtggaggagaacagttaaaagggaaatgaaccaaaatagtcacaaataatataaaataccttggcgtgaccaactaaggaagtgaaagatctgtatgataagaacttaaagtctctgaagaaagaaattaaagaagatttcagaagatggcttccatgctcatggatttgcaggatcaatatagtaaaaatggctatcttgccaaaagcaatctacagattcaatgcaatccccatccaaattccaactcaattcttctacgaattagaaagggcaatctgcaaattcatctggaataacaaaaaacctaggatagcaaaaactcttctcaatgataaaagaatctctggtggaatcaccatgcccgacctaaagctgtactatagagcaattgtaataaaaactgcatggtactggtatagcgacagacaagtagaccaatggaatagaattgaagacccagaaatgaacccacacacctatggtcacttgatctttgacaagggagcaaaaaccatccagtggaaaaaagacagcattttcaacaaatggtgctggcacaactggtggttatcatgaagaagaatgcaaattgatccattcctatctccttgtactaaggtcaaatctaaatggatcaaagaacttcacataaaaccagagacactgaaacttatagaggagaaagtggggaaaagcctcgaagatatgggcacaggggaaaaattcctgaatagaacagcaatggcttgtgctgtaagatcgagaattgacaaatgggacctcataaaattacaaagcttctgtaaggcaaaagacaccgtcaataagacaaaaaggccatcaacagattgggaaagaatctttactaaatcagataggggcctaatatccaatatatataaagaactcaagaaggtagactccagaaaatcaaataaccccttaaaagatggggctcagagctaaacaaagaattctcacttgaggaataccgaatggctgagaagcacctgaaaaaatgttcaacatccttaatcatcagggaaatgcaaatcaaaacaaccctgagattccacctcacaccagtcagaatggctaagatcaaaaattcaggtgacaccagatgctggcgaggatgtggagaaagaggaacattcctccattgttggtgggattgcaagcttgtacaaccactctagaaatcagtctgaaggttcctcagaaaattggacatagtactaccggaggatcctgcaatacctctcctggacatatatccagaagatgttccaactggtaataaggacacatgctccactatgttcatagcagccttacttataagagccagaagctggaaagaacccagatgtccctcaacagaggaatggatacagaaaatgtggtacatttacacaatggagtactactcagctattaaaaagaatgaatttatgaaattcctaggcaaatggatggacctggagggcatcatcctgagtgaggtaacccaatcacaaaagaactcacatgatatgtactcactgataagtggatattcgcccagaaacttagaatacccaagatacaagatacaatctgcaaaacacatgaaactcaagaagaacgaagaccaaagtgtggacactttgccccttcttagaattgggaacaatacacccatggaaggagttacagagacaaaatttggagctgagacaaaaggatggaccatctagagactgccatgcctggggatccatcccataatcggcctccaaatgctgacaccattgcatacactagcaagattttgctgaaaggacccagatatagttttctcttgtgagactatgccagggcctagcaaacacagaagtggatgatcacagtcaactattggatggatcacagggcccccaatggaggaggtagagaaagtacccaaggagctaaaggggtctgcaacctataggtggaataacaatatgaactaaccagtaccctggagctcttgactctagctgcatatgtatcaaaagatggtctagtcggccatcactggaaagagaggcccattggtcttgtaaactttatatgcctcagtacaggggaacgccagggccaagaagtgggagtgggtgggtaggggagtggggggggagggtatgggggacttttgggatagcattggaaatgtaaatgaagaaaatacctaataaaaaataaaataaaaataaacaaaccttaatttttaaaaaagggaataaaattcaaattagaaaaatgaaaaagtaattattcgtggctgaggaagatgctgtcttttatgcatgtagaagtataaaacagaggaaatcctggagttacatgtgagaagtaacccaggggtcatggtcccatagtgaaaaggcgggcatgtataatcactgcacagaaagcaaccttgtgaagcaagaaagctgaattttctcatgatgtttgaggaaactaagaaatgctgaagcattcaattccataggtagagataaatgtcagggaaacatgggcagttagcctcttcccctttttcttttcacaaaagttaatcttttacaacaggaatgtgaaattgggcagcaacagttacagtctacagagtagatggagaatattgaaaaacctgtggaaagaatgggaaaggctgctgaaagaagaggggagcaagactattcggtcatagattggatgtgtgcctgcaggcatgtcacctagtcagtttaagctgctgtttataagcccatgtgtgtggaggaaacttggttaaaagagacttgtgaaacatctgcagcatctgaaaagctatcagtatgcttttaaagtttatgaaagccacaagttaaatttttacttcatgttctacgtatttttgaaaggatgacaccccagtacagcttgttactgctagagatgagggctggcaaggacgtgcagttgtctgcatagggaaatgtgcaacaaggaaagaaatatcatatagttgagttgtcggtgtgctctctcgctgctttgaacagattgtaaattgcttaagttcttagaaccagagactctttcaggtaaatgggcttaaaacctaaaagaacctgtttattttgaatctgatataatctgagtttttgccaacataagaattctttggctccctaaatttccaaactttgtaaatatttagtaaagctattattatgtgtgagatttcacctggagacatagaataaaagtgttttgtttgtttgctgtaatatttaactgttgtgacgttcatgtgaggatcctctgtgttctgccatagttcttactgagcatctgtgctcagcagaggtgggtaagtagggaactttggggaaaataacttgtttcccattgtttgatggagtacttcatattactcttcctcaatgctgtttatagggagtggtataagcaaaagtaagcaacagactgaacattgaggccagagtaaaatgttcttaagtttatgggcttattctgttatcgtataaaatctgtcattttagtatagcatatcatccccagctgtgaactttgtctgactgtagggcgagtggtttctgagatttggttccttattggatgattattgctagtgtgtcagttaaagtgaatgcttgcgattgacactagataagtgtggctgtaaacacaaatagtttcatgagggcttaagtggaaagtttctccttgtgttaagttttatatttacaaatgttgagaatggtcatacttttttaaagatggaaatattctttatggcatgggctttaaaaatattttatatgttacattttagttgaatgttttactaaaatatacttcatgctaaagagtactttaatgaaattggaaataaagataacattgtctttaggctttctttaaaaataaaaagttgctttttgtcatcattattgttttacacagtgttgggatgtaaccaaggtcccatacctgctaataagcctccatcactaggctacatcatcagatcaacagctactttttaattccagaagttaattgtaattaaactgcttgttatttacacatgatagctgcagttgtttgttgttgttgttgtcattgttgttgtttttagcttttaacttaaaacatgtaaatcaaaaataatcctgctcctcagtctctctttttgctgagtttgaactttttttttaaagcagagtcttttgggttttatttttatatcaggtaagtggagtggtttacattactgatgcctggctttttaaaaatctaatcattatgtgagatgaccactttgctctttttcattctgccctttgtcattctttatacccaatatacacttccaccccagcatcagtattctgggaattttgctcagattgatagttattagcatatgcatatatatatatatatatatatactaaacattacatctataccaatatataagtgtgtatatatctatacacacacacacactatatgcttttatatatatgtatattgataaactgcattcataaactgtagttagcattttcctttcctgtgttttaactttcttggcattaataattatttgcttagttttccaaatacactacttcaaattgaaatctttgctaattttctccatcaacttttaaggtacttatctaaacctgtcaactttattttcttaaagatgcccctccggagcctcttggccagtgtacacctaagctctcggggcctggttgtcccttcttgggcattattacccttaccttctgggctgaccttttagggcctggattacatatctttctcttttgttctttgcttcattgtcagagtgacagtatgactttttatagtcttaggaaatcttgtggtaggttgaatttgtgaaactttatatcagcaagtcacaaaattatataactgctttacacttgataaggcaaaggatttcagctgtaagtttttaaaggcattattctccgtctcctgtctttatatgttgtcagtgagcaactctgattcctaaatcttggcatgtacttcttttctccctctctggcttatcccagtgcctggaactttcacaagttttttagtctgttttgctaggtgcttagtgttgcatttttcagcaacttcctagttgtcagttctagaatacacccaggctctcattgtttcctcgccccattttgtgttccctctttctttctagaactccatcttctctagatgcccatgaatcagttccccaagtttctgtgtttctaccactgtgcttttctacctagcgtgtgaattttattgaatcttaggctaggacaatttgtcaaattcaagcacaacaaaattgctgagtttctactagaaaacgcttactgttaaatttaattgtactttgtgtaaggcatctttgaagagttccctctagcttattgcaaatgctgatagtattgtgaactcagactaatcccaaagagacattatattctagctttgatatgtgtcagttggttatccaataatttgttttcaagtagagcttatagctagtaatagaaagaaaaatagtgcatagtaagtactaataatctctcatggcatcgtgcatctgctcactgatcatttgctgattaattaattgtgctgcgtaagacactatatgagaacctgtcagagggtaaattcttgttctttgagagatgtaacatgaaggaggcaaacagaatcttcagggaacggatacagtagtgccccttatccatctggtttcattctaagtccctgggagagaggtgcccagacctcaagttctaggaaaactattacatatttctttttttgcctctttgtggctctttgttcttaccatagatcttagcaaccttatcacagaatgcatgctttccttgggaaaccaaaatgatcacttttcatgtaaaatacttcatagcttctatcattttccctgccatttgggaccattattacattaaagaaggatggaacacatgcatatttggcctggctctgtgtgtgtgtgtgtctgtgtgtgtctgtgtgtctgtgtgtgcgaacgcacgcatgtgtgtatattcatccgggaagtatatatagtgagtacagtaaacaaacacttcatgtctctgatagaagtgaacagaatggtgcaagaattcagtactcaacagtgtcggttttattttgaaggcaattttttccctgaggattttccattgggtagcttcagcatggttgattatagggaactaagaccacaaataaagaggaatgctgttgtaagtgatgaaagccatactttctctttgtccgtgcaggtattttttatttaaaacagttggggaaataggaactccatttcagaatatggattcggtttggaccatggcttcatttaataatcactattctggactaaatatgactctacagctacccaaacgtgatagtttaaggaaataagccctagggtatggggcttcatgggtaggatcaatgcctttatgaaggtgaccccagatagctctcagcctcgttgtacattatgagagcaatgaaaagtcagcagactgcaacttcaaaaagatgccaccactaaatcacactggtacctttatgtcatcactccaccacgtaactgtaggaaacaaacaaaaggctgtggtatgggatctcccttttatcagcagttgtatattctgtggtttcagttacttgggatcaattgccatctgaaaacaatagcatactccagtgacagaccatattttattgttataattgttgtattattaatcactctcaatttgttactgtgcctaatttataagctgcatcatagatgtgtgtttgtagaatttatagatctcagtactgtctgttttgagcatatgctaagcatcttgtaatgtacaccctatggacaagggggcttctgtactttagctgtttaagctggggaaacaatttttatagtagacttttttgagttatgtacagctacctgtgagttggggtggttttagtgcatgctaggaaggcattataaggaacacaaaaacctattactttgctgctgaaagtagtgaatttgctgggaaatacagagaaagcctactgttttgttagcttaaggttaaagactgttggtgtgtgtgtgtgtgtgtgtgagagagagagagagagagagagagagagagagagagagagagagagagtgaacagaaattttactgataaatcctagaaaggagagctgaggtgtgtttttctacacagggagacccaagagggtttggcaaaagtgaagctaagggacttggatttgcaaacctacacacacgccaacaggctcaaggtgtctgagtgtgacctttgtccacgtcactggctgatcattacactgaagagacctctgcagagtctcaagggggccaggtgtgtgtgtgtgtgtcctacctgtctcctcttggcagattaagacagattactggaaaaataaactaaccccagttactgcagtatattaagagttcggtgctcctgcaaaactgccaggatgagtgcaaaactaacaagaacctagaataatctaagttataatccgtaagacagtcgtagaaatgaactaggcatggggttaggtctgacaggggcattgaactgtctgttttaatatactgaaaaaaaagtaaagagtcaacaaagagaggccagaagaaccagaactgaaccagaacagctcaaaaccaagtcaggtaggtaattatcattggaatgcctgaagaaaatacttaagctctgacttgaaaaacagggaagggtttgatagaattttaatcaaaactgtccctcacagagccctgtgttgaggcagaggtcttcattgagtggcactgttttgggagattctggattctttaggaggtagggtgtggttggaggatgtaggtcattggagggcatgtctttgaaagttgcaccagctcttcaatcctttgagtgtctctggattctttctgccaagagacaaacacactccttttgcattggtagtcactctttcaggccaaagtaatgaagccaacagactaactgaaccctcaaaaactgtaagaccaaagaagtgattcctttcagggacttatttattttagtcacagcaaaatttcccaagataaacaggatattagtaccagagaagttaggttgttagcgtcatcatgtagtgttttactcctttagaactgttttatgggagaaagtcagagtgtagagacagtctagaatgctataatctgaacatagtggacaattctgggtagagctcagaagccagagtacagataaaaatacaggtaagaaaggctgcctcataagattacagaaatgggctaaaacccattcatattacttgctgaaacaaatactttgtattttatccatgttctaagactttgaatgaagtaggatttaaaagtgatagactaattaaaatttggaggaaatttcaggacaaagtagtagtctgttgcatcatgatttctgccttcttttgttaaccttagagtaagaattgaagcaggaagctcagcttaaagatcagaaaaacttttaggtttggcagaaaagccattgtaaggtttcagctaaggaggtcaccatttcttaaacaaccagcttaaaaagaagtaaaataattgaacgatgtgtgaaaaaagatttgtgactgacttctcaggaattggccagaacgattagggtgtgaaggtttcaaactcatttaaaaagttgaggagaaagctctaattgttcttgttcgtacagggtcacctggggaggtgcttttatgggtttagctgcccaggcattgcaaacccgatgcagttcttgtccagaagcacccaaccactgcacagactggcaacagaccttggcattgttgatgctggtgtactcagtgcagactgcaagagttacaggaggcttccatccagacttcaaagacagacctgggaggtcagacagtgtgtagtaaagttggaatgctataggcagcccagagagggtagtatgtgaagttgtggagatgtttaagctgcagtggagttctcaagatgttttagatgctgaaacatggaagttctagcaaaagcctcagataacaagtggcaccagccagaagagaagcggtgtggactgcaagcaagcttagccatagagactgggcctcccataccacttagagctcatgcatgagtcatgctggacatagatcccaggaagagtctgcctactggactttagtcttctttggtctgatcattcccagctcgtcttccagtctccctttttgtaataggagttcacagttcagagtttgtcttgagtctcaaaagagactttcaaacattttagcattgtttgaactgtcgggactttgagggacagactgttggtgatgaactaaatgcattttgcattatgagatggagagccaagaatagaatgctgtggtgtgaataggaaatgtctcccttgggctcatgtgtttgaaagcttgctcctaagttggtggtagtgtgtaaaaatttagtataaattttaggaggttggacctagctagggaagtaggtcactgcttttgaaggtggttcctggtcttagccagtctcttattttctgtccaccatgaggacaggagatagatacctcttctgccacatgcaaccatgggccctcttagaccgtgaataaaattaatacttccctttaaactatttcccccagggattttggtcatagctttgcaaaagcaactaaatggcttttattctaatactcagcagcggagcaagactctttctccatgtgtcctccacgtcttcacattctcaccctccctcctctccaccaccttttggtgatctcttgttctccagtcctcaggaaacctttggcaatggtgttgacatggttatacaattcctaaagcttaaaattctaaaggaaagaagggtcttttgtctttatttggaaaaactctttccaagaggttagggcaaacctcattaaatcttgttttctgtgttgtctcactgcttgaacgtgaatctggttgtaggaaatatatgtcacaagggaatatataaagctctatctttttacttcagacttagaaaaggagatctggaagacatcctttaaaatcgatcatacacatactttataaaatgcagtgtactgaaataccggtggacccctacttaagacctgtactggcctgtggatagcatatttgtagtatagatctgaatggcattatgaacattttgaagaacttagtaatttcttatagtgctaaacatatagcagtgttactnnnnnnnnnnnnnnnnnnnncttttgcattggtagtcactctttcaggccaaagtaatgaagccaacagactaactgaacccctcaaaaactgtaagaccaaagaagtgattcctttcagggacttatttattttagtcacagcaaaatttcccaagataaacaggatattagtaccagagaagttaggttgttagcgtcatcatgtagtgttttactcctttagaactgttttatgggagaaagtcagagtgtagagacagtctagaatgctataatctgaacatagtggacaattctgggtagagctcagaagccagagtacagataaaaatacaggtaagaaaggctgcctcataagattacagaaatgggctaaaacccattcatattacttgctgaaacaaatactttgtattttatccatgttctaagactttgaatgaagtaggatttaaaagtgatagactaattaaaatttggaggaaatttcaggacaaagtagtagtctgttgcatcatgatttctgccttcttttgttaaccttagagtaagaattgaagcaggaagctcagcttaaagatcagaaaaacttttaggtttggcagaaaagccattgtaaggtttcagctaaggaggtcaccatttcttaaacaaccagcttaaaaagaagtaaaataattgaacgatgtgtgaaaaaagatttgtgactgacttctccacgtcttcacattctcaccctccctcctctccaccaccttttggtgatctcttgttctccagtcctcaggaaacctttggcaatggtgttgacatggttatacaattcctaaagcttaaaattctaaaggaaagaagggtcttttgtctttatttggaaaaactctttccaagaggttagggcaaacctcattaaatcttgttttctgtgttgtctcactgcttgaacgtgagtctggttgtaggaaatatatgtcacaagggaatatataaagctctatctttttacttcagacttagaaaaggagatctggaagacatcctttaaaatcgatcatacacatactttataaaatgcagtgtactgaaataccggtggacccctacttaagacctgtactggcctgtggatagcatatttgtagtatagatctgaatggcattatgaacattttgaagaacttagtaatttcttatagtgctaaacatatagcagtgttactctttcattatctacttggcagacatacagtttaagttcacaagtagaagtataaataaacatgaaaagttagagacaaaaatgagagaacagtcagggaaaaataagagcttgttgtatggatgggtattaatggttatttaaaggtcctggtaaccaatacagtgaattgtttaaggaaagaaaagtaagggcatatgtgggaagatctactataaaagtaaatatcaggacacggccacagactcctaaattcaaacagctttaataagcaagcaggaatatatttcagaagaaagtataataaatatcataaaacacaacgataataaatatagatctggatgggattagtggtttttttttaagaaatattttcagtttatcaaataagaacaaaaatcttacgacataaagtattttgtatgtaatagagcttatctaaaacagttacctggtgtcttagtcagggtttctattcctgcacaaacatcatgaccaagaagcaaattggggaggaaagggtttattcggcttacattttccacattgctgttaatcaccaaaggatgtcgggactggaactcaagcaggtcagaaagcaggagctgaagcagaggccatggagggatgttctttactggcttgcctcacctggcttgctcagcctgctctcttatagaaccaagactaccagcccagagatggtcccacccacaaggggcctttcccacttgattactaattgagaaaatgccttacagttggatctcatggaggcatttccccaactgaagctcctttctctgtgaaaactccagctgtgtcaagttgacacaaaactagccagtacacctgggatagttaaaggaaacaggccagtgtaggcaaagggcaggggcaggacactgacacttagcaaagtaagacacagcatgaggggtgaatagggagctgggtgtgacgccacatgcttgtgaccccagcatgcagacagaggctgaggaatcaagggttgaagaccatctttgagtagatagcaatttttggttacagctgtttaaaacaaacaaaaagcacccccgccccaaacccatcgaaaagaaagagaaaatggaagggtacatcttttcatacaggataacatcctgtgtaccaagtgacatatcaaccagctttatgaaaggattacaggagagacaaggaaatgacatcaatgtacagtaatagcaaggggctttaataaaccacgtggaatacaaagtagatcaactgggcagtgaggggctagaagatctaaacttaatcactagatagatcctattagatgtatggtaggttttgataattatagttagagaatatgcagtgagtgctggaatatatcagaattttaaagtaagcaagcttgtaaatagtgtagagcagtggaggcttatgtacactggggaaagagatgcaagcttcggggcaggaagcatcaaaaaggggccatccttctgttttatctgaaagatgaatatgttcactatcttaatattcttatagtcttgcaatatatatcaaagtatatactttgtatatgtagcacacttaaaatttagagacctttaaaagataaatgactgcaaagcatattgtaagttggtattatttcttcaaaataccaatttataaccatactgataaaaaatagtctctgatatagaaatcttacgaccagaaattttacctatagagtactcataaaaccacacaacaatcacaataacataaatagttggaaacaacgtaaatgtttcatagaaattggttaaatagtatgtttagataatcttcatattaaagtattgttacttcatgcatgcaaaaatcttcagcatctctacagatgaagtatccgggctgaagaggggtcctgtggtttcagagcatcagttgctcttgcagaggaatgagtttccagcacctaacctatggtggcccacaacgacccataactctcaaatccaaggatccaacgctgccttctgtcctcaacaggcaccagccacttatgtggtgcacatatgtggtgcataggaagacagtcacacatatacagtaaatgcatcttttagaaaatgaagtctatgtgttgctttaggatgcatggtgattagggaagtctacagtgttgctgtacctcaaccacatatgatgtacatagagaagcagagctgccgtggtggcgagactgacttccgtgttcttagaagagagagaaggacctgaaagggagcagcagtccacaccttaaatggccacgaaagctgcttagtactcactgctggcaagacttacgtgaattgctatgaggattttttgtttgtttgttctgtttttttaatctttatccatttaattgtgaatattcttaatttttgctacagttaatttaatgtactaacatgttttcttatataaagaataattaatgattaaccatatctacaaggaaaaactattactaaacatattggtaaatctgactaaaatagttaaatgatgaaaattaaagatggtgatatctagatgtttccagactcagttgatatacaagattttatttatagtataaaaataattttatgactatacaatttttaaaattccctaaatgaactcaaagttgttaatctgttacaaggaagaaaatgaagagaaagtagatcttcagttcagaattgttccataaagttacttagttggggtcactggtagaagagaaccgttatgttctggtgcatagagataactcggctgaatctcaaggcaaaatgttaggaaaaggattaagattgttgcacacaaaatcagtcaaaactaaaacttaagaaattcttttcacagtaacacaaggcacattaacatcaggaagaagtctatgagaagacctcaaagcttcacacgaaatcggtaagttaatgagagagtaagcctaacagcttgcggttccttagaacaggaagcatggcgactgccatgaggtgtacactgtggaagattgtgtatgtctgcctcatctttgtctctctttagggaaacatgtaggtttttcttcaataacaaaatatttgtagaagataacagtagaaaacatttctgtaaaagctattctgcttcagtgatataaacagttaaacacaccacttctgccataaccgtgtaaataattcacgggagtaaatatatagtttgaaaactatggttaagatacattgaaatgctattttttttttttttttggactgaaaatacactattgagaatctttgatataccaaactgaatcctaattcttggcaattcagctaggagcaagacaggcatgatttctgcacttctcagaatttaacaggaaactgttttgaataaagtcacagtattatatgtgtttggctgaattgtaaagtactatggatggatgaagagaaagagagagagagagagagagagagagagagagagaagactaattctaattgtagcagccagtgaggttgaaaatttgcttccgcaagatgagtatgaattagctgtgcaaaggtgatcaaagtggtcttatacaaatggtggtaaagaggagaggatttgtctcaagactaaggaaggattgggtggttaaagctataaaggtggctgtatgtagattgaatccagcaatgtattaaaaggcttaaaagccttaaaatttacatttaaattacttccttatgggtcattaccatagtttggatctgtaatgaccctcccaaaagttcccaacacatgatgctgttgggaggtagcaaaacctttaagaagtagggcctcataggagatttttattgaggcatgcgctcaaaagttctggtaggtaccttggtctctttctcttgccctggctatgaagtaaacagctctgccctgccatgggcttctgctatggtgtgccattactggcccaaggcaatgagtcaatcagtccaatgtggaaacttcaaaactgtgagtcaaatagccattttctcttttaagtagcttgtctcaagtatttttgacagtaagaggaagctatcagttatagctaggctgcattgatggtctagtcaagatatgactatagccaggtagaagggaacaaatggatagattgctgaaataattgaagggtgggattggctcattcttttgtctaagtttctgcttctacagtctccaagcttggatgtgtttgttagtctcatgctttctccctagctatttgttttctcctcttcctcctccccctcttcttcctcttcctcctttttaactcagatactttgctggtcttctaataggaatcttgaaaggaataaaaacagtaaaaatgttgtcaatctatgttgtcatctttttgtgtattgaatttcatttaggaacttagtttaaatatttttatgttgctgtaatgatgctacatactttctagtgtcttgtggttgacagctcaggaaacctcatatatttttaaatgtaacttttagttttctacattttctattttagtatattttgtaacttaaatcctattggaatatccacttttcctttcttaagaatttgaaaagtattgtcgtattcttttatattagtgattcttagtacaaaatttgtcttcaatatatttgaaatgacttatgtagtataattttatgatttcctcatatctgaacgtcttactttacctttaagtggctatcactctatttagggaaagtattgatttttctgtattgctctgatgtatagtcactctggaaattctcaaaatgaagtagccgttgattggcatattttaattacagtgtgattgcctgatttctatttgggttttcctttactcatgtattcactaatttcttatctggcttttatctcatcagaaatgcagcaagttttggaaaaccttacagagctgccctcatctacaggagcagaggagatagacctaattttcctcaaggggattatggagaatcctattgtgaagtcacttgctaaggtatactagtttattcataagattattgaatggctttgaaaatgcttttatggaaatcttttagtggtccccgttttggaattgagttgatatacctttctgcatagttagcaaatgacacttgtcccatgagatgcaaagataaggtttactgcctttttattctacctgtggagacaaataactctcagcttttgtcccattaccttaaagtttagatttttcttgcataatcctgatattttaaatgtattttcttaatcaacttgggagcaaaattactcactttttacaaccatattcatggttttgtttgatttcacttacaacttcctgatatttgctttgagcatagaggaagctcagtgtgtttcttgcctgtttcacacctgctgccccatgctcagagtggctctcagtgtttttgcttccagtgagccaggctgatggtccccagtggctctgctatgggggatccaccttctcctctttgctttgtactgctagagtgctgctctcacctatgtggggttgtttggttttgctttcatttttcatctctttttgtgttttaaggcttctaaaaccataccttatctactggtaaaaatgaattaatgtggctcattcttcacatgatgaggtcatgtggtaaaagtcattttcataatatatatacttaatattgctgtgttttgatgatatccaggagagtgtgtacttcagcattcagcttgccctatggcttactgtcttgaggtcagcttaggcctgttgaagtaaggagggtatttaggcccacctataaagggtttgccttgggctcctgttgtcagcaggccttttactcttcccttgatcttacattgttgattgccactttttattgtccttaatctcacatttaaatcttttaggtagatttagaaattttaataacatgtaagacattttacagcacgcttgtagtttccaaaggtctttaacatacattagagtaaatgacagagataagggttaggacaggtattctaaccttgccttttaacttccctgctctatttaggtcaacattgggtgctagtgtttatgtgtatttattctcaacaacttctgtaagtgaaaaatgggttggtttgtgtcacctatgatgggctctcaggggattatcaggtcactactcttagcagttgaagtggttagtttactgttgtacatattaggagcagctatactctctttgattaaaaatactgggcagataacacaggagggtgaagtgctgtgccagtgtgagaacctgaattcaaatcctcagatcccacctaaagcctctgtgtgtgtgtgtgtgtgtgtgtgtgtgtgtgtgtgtaaggcacatgtgtgtgttcattcccagtgcttctgtggagagataggcaataaagtcataaatcctcaaagcttgttggcctatggccctggcataagaagcagcaaaaaccagagagactctgttccaagcaaggtgaaaggccaggactggtatcctaggtggttcctgcacttcctctatggcatagtgggtgtatcgctctctttcttgtctgtttatctctttcacacacagtataggtccacaaaagatgaaaaaacagaatcaataatatccaacattcaagaagacttttaataaataaaactagtggtaaatactcctacacgtaaagacttgccaggtgagaagggagcttctgagaaggtcagttacagcatctggtactatcataacaagtaagaaattgaaaagaaacacaaatctaattgacatgttaactctcaaatacagtatttgaaatcatctcatttgatggatataaatattaggagactaaatacagaaggaaagaattgccaattttgcaaatagatgaacagaaaaatcccaggtgaaactcaaagtcaaatcaaaatatagaacagagatgtgagatacacacaagatctaatatgtgtgtactttttatcccagacaaagatagggagaaagtagaaatggctttaatgtgctaagtacttgaaaatagatgagtgttagattaaacccaggataaatgggttactgaggtgcctgttgaacacagcaaagtgtattgtggctaccaggttctcccagcatctgtcagcatcacaggtatgtgtcacagaaccattccagctggcataccttgacacttatcctaagcctctgacccccgagctcccttctcttctgcctgcatttcatttatataactcagccattttggctacatgggctcttggtctctgtctcctggcctcctacctctcttggctgctggtcctttctcttgtccttgctctctcttttcctctctcagtctcccaccccagtccctcccctcatggccctggccaggctcctggcccagttcagtctggacccttccaggtgcctgtggctgttttctccctcatacctacaatattccttctactcaacaggaccttgcagcagtcatgtccttgtttttttttcatatattgagtgacataaactgaacaattcaagaagtgagaaataagaaaacatatctaagtcttaaagcttaaatgcaaagtaaaatctttaaagcaaacagaggagggaagaaagacagtaagaaaaaatgggtaataataaaacaagaattttgaaatttctaatgaggatttgagattaccttttaatgtaacaaagggaagcatcagccaccttgcatccctttccagaaaaaacatcctgcatatactaaataagatacttttttgcagaccaaaaaagttaatcttcatttagtctaaaaatgtttgagagaaagaaagttctgacggaatggcagaggaaaagaactatttgtgaataagtataaaatgttcttttaagatgatgtacgaagggggctggcgagatggctcaggggttaagagcaccgactgctcttccgaaggtcctgagttcaaatcccagcaaccacatggtggctcacaaccatccgcaatgaaatctgatgccctcttctggagtgtctgaagacagctatagtgtacttacatataataaataaataaataaatcttaaaaaaaaaaaaaaaaaagatgatgtatggtcgccgggcgtggtagcgcacgcctttaatcccagcacttgggagaaagaggcaggtggatttctgagtttgaggccagcctggtctacagaatgagttccaggacagccaggactacacagagaaaccctgtctcaggggaaaaacaaaagataatgtacggtcgtaagcatttaaaccatactgcacatgtgtgtgtgtgtgtgtgtgtgactatgatgggctccaagttgggatggacataggtggactggcccgcacctggaaaccagagtcaaagtcatctccagaaatccccaaatagtaagagattaaataccatgccttcgttggggtttctattgctctaaatactaaccagaagtgactggggagaaagggttatttattgtatcttctactttaggcagcagtccatccctgaaggaggtcaggataggactggaggcaagaactgaagcaggagtcggggaggactgctttgctggtttgttcctcctggctttctcagcctgctttcttaacccgggcccacttgccaaggggtaatgccatgcagtgtgggccgagccctccctatcaatcattcgtcaaggaaatgccccacaagctgactgttggccactattcctgggcaagtggaaacctgtgcagaaagttctttcctacacctctgttttatagagtactgtctgctttcctctaggattttctgtttcaggttccttttttttttaaattcacaaacacattttattctttgagattataacgtaattacatcattctttttatcctcctagcccctcatatatgcctactcgctctaattcaaattcatggcctctcttttctaaaaaaaattatatgttgttatattcccaaaaaaatccacacagcctactcagtctatacagtactacttgtatgcatatattttgggctgcccatttgatatgggataataaattggtgtgcattctcctggggaagacagtttctcccactctcagcatcccttaactgcctgcaattctttatttaagctcaaatcagataactgttacttttatcaagtcttagaatgctttctgactatattaatgtatgtctataaagccaatgctcagttcctcacagatatctcaaacagtatgtgctgtgtggttccatctttgtagcatatacatgtgcactgtttcaggctttagactgagtctcggatctaagttttgtgaggtgctagctaggcttccctcttttgcgtgtggacacttggcctccccagcagcatttggagaagaggctgtctgttgttctttgcatggtttttgcccttaatgtcaaataccaaatggctgtagtgatgagaactcatgttggttttttgtgttattccagggctctgtgtggatatggtgtgccatgtagttatattgctgtagctctacagtgtattttaaagtctggaatagcaatcttccagcattgctattgctcaggattattttggctatatggggtactttctgattccctgcaagttttagtcaattttttttttttctgtgaagactgttttgggtgtttggtatttcattgaatctgtttatggcttttggtagaatggttttcttcacattaattcttccattccatgagcatgggttctctttccatcttctagtgtctttcttcagagatgtgaagtttatattatagaggccattaaccttcctggttagctttattcctaggtattttattggtctttctgagattgtaaatgggagtatatctatggctatgctatcctcttcattgtgtttggttttggtgtagaaaagctaatggtttttataactttacttttaccctgccatattgttgaaattattaattgttgccagaagttttctggtggaattttggggatttgttttatatatagtgttattcatatgcaaagaggataatttggcctctcattttcatatttgtaaccctttaatttctttctcttacccaggctgttgcttcaggcactatatattgaaaaggagtggggctaatgtttgctgaaggtttgtcatatgtagattttcctatgctgaggcatgtttcctccagtcctactctctaggactttctgtctttaaagcatcttgtatgttgtcagaggccttttctgcttctattagatggtccttttttataggttctgttataggtctattggtctctctggtttaactttgatattttggataaatcaagaaatttcagtttaaaatcagatttttcaacttaatggagtacaggtttttagagtattcccatatattgtatatatgtgtcttgggtgaatgttgtaataagtccccattaattgctgattttgttagtttagatcatttcttcctttgttttggttagttggggcagggtctctaatcatgattattttctctcagaatcaacttttatattaattctttattttctttatttctatttcattaatttctgctttaatttttattatttcttacaatatgctatgtttgggcttagtttgaatttctttcttggtttcttctttgacccattcatcattcagtaatgagttacctcatctccatcagtttatatactgactagagctttgtttgctgtcagttttaagtttcattccataatggttggataagaaagatatgtggaattatttttatttttcagtgtttgttacggtttgttttatgccccagcacataatgtggttctgagtaggttgtatagtctttggaatttaggtggaacatcctgtagatagctgttgatttcatttgatgtagggtatttaattctaaggttcctctttattttttattcaaaggcctatctcctggagaaagtgtggtgttaaaatgacctaaaattattgggcttgtgttaatctgtgcctttaactccataatcaggtatgccagagtttgttgcatggatgttgggcactgtgatattttctttaagtaatgatcccgtgattaggattcagtacccttttttcctgctcagttttagtttgaaatcttattttgtcagatattaggatgacagtgcttactcgcttcttgattccctttgtttggaataacttttctgtccattcacattaaagtggtgccttgtctttaaaactaagtttcctatagataatatgtgaagttattttttaaatgtgtttgttaattgtggtcatcatgttgctggtttgtttattttgatgttaaaggactaacaagtttgagagacgctctgtcttgtttttttgttgtttgtttttatttttttatttgatctgggaatgtggacttctctcttatgtgtttggtgtgataatctcactgtccttaaattgggtccgtgctggagatgccaagttaagctgttggatcagttgtttatttggaccagggaaagatggctcccacagcccagaattggagctaggctgtgactgcagagagggagggcagcaggcagaaggaaagactggagaggacaggagcttctctccagtcagaggtggctctcagagaaagcagctttgaaggccacagatctagaaggagaccctgagtgtagaggtggtggggtaggaaagctcaggagatgaaagggaggaagccagtgccccagcagaggtggctcagggacagtgaaggttcctgggcagtctggaatgaggcttgtggggtgccagatggtgggaggttggggaagggcagagaaagggaagggtgaacttaaccatgtctcctaattacttttctgttgccttgaagacaccatgaccaaagcaacttagagaagagagagtagattggaatttatagttacagtgggtgaatccgtggctatcatagcagagagcatggcagcaggcaggtaggtgaggtactgaagcagcagcctgagagcttacatcagatccacagacatgagaggcagagagagagagagagagagagagagagagagagagagagagagagagagagagagagagcgctagctaactgggaattagatggacttttgaaacctcaaagttcaccctcagtgatgcacctcttccagcaaggctatacctcctctaacccttccaaaacagttcctccaactggggcccaaacatttaactatatgaacgcatatatttatgcgttctgatggagaccaccacaccaggacagaacacctgaacaaagaggattattggggtcctggaaatagaactaggattgtggcatatacagcgtcttttaaaatccagttttctcttctgacatgccaggctaactgatccatgagcgtacagagctttctagtttccatttcccatctccctatagagtgctagaattataaacttgtgcaacatccaagggagatgttgatagtgtgtgaagaaaatgcccactatacctttatctcaaaatgtccatcaactgaagactgctcccctgcagagactgctccctctgagcctagttaaccctgcctctgtaattcagccgctcgccatagacgctgcctcccttttcagctggggagcaaaccctgactcagggtgtacattcagagcaactcctttcctctacaggttgcttttggtcatggcgtttcatcacaacagtgttaaccttaactaatacaccatctaatgatgttaaaacttgtaagctgatttactaaggatcctttattttttttaacaatgttttatagatttataagttttctgtggtttttgaaatttattcaaatgttttatttttggtgcttttatgaatgttttcttaagtttaattttcagatttttttcctagcatatagaaacagtgatctaacctgcaaccttattaagcttgttggtttaatagtttttactgtacctccttgggattttctgaatatgagaccatgacatgtgtgaataaaaatagctttggctcctttccccttccattctgaaaatcttgtattccttgatttactgcactgactagaacatcccagcacagtaccctgaatggaagagtgctactgctttgctggacctcagtgggcatcatctagtctcactgacagatgtaatagattgcgggcctgtgttgtgtatgattctgtatcgcaacctcaagacacctgtgttctgtataaagttaatgtcacgtttctctgtgtgaatagactgtagtatttttctaggtcaggtttctggtagattttttaatatggcctttctgttattaattatgctattaagtataatccttctgtgtctcatacatatttatatatctttaggacatttttttaagaaaaatcctttaattttgtaggagttggttaaatccaaaaatttgctcacgtgtctttgactagaaagtgtgtgaggatgccttttccctgtatgtgcgccagctcggtcagtaccatgtatgtatagttttagtttgtacttctctttttcttgtaattgtgtatctgttcatttctttagaagttttagttttccttcctgtgaattattttgttcatattcttaattagttggtcagtttgtgaaaggcctttatataaagagaaattagcctttttaccagtaaaaggcttgtgtcttgacgttgctcagtctttatcagaagtgctttaatatttaattacataaaattagacattttttgcatgtgatttgaagctccttgatcttgtgtcacatgtagaaagttatttccaattctaatatattaagatacctatgtgtttttccctgaataccaaagtgtttaaagcaaccttgcttctcttaaaaattaaaaatggcaagtaccctttagtagtggtgactggcatctgtgtggctaattctgcagctcccttggttagcagtggtgctgagacgctgggatgtagcctaacaacatttcagctccgtctggatagcgaggtgacctctgaaaagacggctcttcctgaggaattgccattgcagctagtatgctcctcctttgtgtggatccaggctcttgttttctgtcacacatgcaaagccggatagaaatggaactccccctgccttgtttccactctcgggcagtcttattctgcgggcttggtacacttgtctgctatttgggagtttagatacttggataaaagagaaacaatttttaccccagctaaattcatttcccatatatgtaccttttctataaaatatttaataaggaatggctgcatacttagccctgttgtaagaaaataaaatcaaagtttaggtatgagccttgctttttaatggcaaaggcaaggtcacagacactaacactggtaccttactcatgctattatttttagtaactatatttaaaaaaatttctgtctgcaagtatgcaaggacagtacttgaataaaagagccagaagttgtataagaaattctcagctcatttttctaaggtgcacatggtgactaggatctatagaacaactcagacatacccaaaagttccttcatatcatagactgcatttatggaaataaagactctcaatataaaatacagaaaatctcaaggagagttttagtgacattgtggctagtcattttaagaatgctaggccacagttttgtcagatcccagacctctccatcatcggctgtggcctatgcttccctgctaatgacaggtgagatgcatttttattaagctatcctggttttcagtactgccttttctgaaagaaaaactcatttgcccctttaattttcttttcttttccttttcctttttaatacagggtctatgtactattctggcccttgctgcttacctggaatttgctgtgtagaccaggctggcctcaaactcacagcgatccatgggggtgtgttctacgagcacctgctcttaactggtttcctgtgaccctgttagtttgatgaactaagttcaagtgggcacttagcttctgaaaattaccgaataagttttggtgttaaagtaattaagaggtcccaagctttttacaatgcctcagaattttaataactatgttataacattgggcctgtatttctgttctcggagaaataaaattgatcttttaaaaacatttgatggactctgatgtctccagctcgtgtcagactcactgtgtagctgagaatggcttggactcctggtcctcttgctttcccctcccaagtgtttctatcacagatgtgccaccatgcctggctgtgaaattgatcttgaatatattttagaaatcgtttctccatattaaagagactagccataatttcactaaagcccttgagaatttacgtactttatactgagagtctttatttccagaaacccagtctatgatctgaaggaacttttgggtatgtttggggtgtcttccagttgtaccctctagagacactcccttgtctgcctttaagggaaatatccaagtcagctctgtactgaaggcctgaattgaagcagtttacaaacagccttagacatggtaatcacgtgacttacacaggtaacacttaaaacttttgacttggtgcctgaacacaggtatctgtgtcctagagaaatggggtctttacagctcttctaagaagaaaagcatttaagtcagggccgaggtgggattctgaggccgtggagcaccagacacccatgggaagggatatactgaacaaacggcccagctgccctgctagagcatgcttcttaaagcagaagtcagcagaagtttccaagcttcggaaaactgaaggggtctccagccacacattgttgtattttctctagtctttgcaaatttttttcttaaccagattcaaatagaattgtgtatttaaatcacagtaagtcttttgacttccctcatgtttaatcaagtctgctgctttatcagtgtttgataactttcaagatgttttctcctgaagtctatcttaaaatctcttccatttaagagcttactttgctgggtgtgctggttcacacaagtgtccccactactcacgatccccaggcagaaagagttcttgagcccagagttcacagccagtctgggcaacatagaaaagggaatttacttgtctctcttggggaaaaaaatcactctggtaaataaatcacattgaaaaaaaaaacataatgcaaacaaaatgaccatcatttacaagttacaagttacagatattctgtttggattctcgggggtctatactgcctggtgatacatacaactgcctggtgatacatacaacatgagaaacatcacagcaggatgatactggacatgaggatttctgttcagcacttacagaaatggtttacaaagcatcagtgtgatctgtcatcctacgtggttttatgaattaagtcttagtaattagctgttctctttctttagaattagtgaacaactatttgtcaaaagaaaatgtgaaggatggaggctgtgtaaccttcctgggtttgaattagaattccactttactcctaaaccagtattctaaaatgtctgagtcagaaatagtgtgggcacatagaaagaaaagactgtgggtttggtttttctttgtttcgttttgttttgttttatcaaggaacatacattgagggagctatcctcctaatcaaagtatgagatctaagacctgctcaagaactacctcctctgaattgatgtttcattgctaggtattaaactcaatatgcattaagaaaggatattaccactgctccgtatccctagcctagattcttaaatatgaaaaatagtagcttcaggtatctgtatgatgctttttgtttttctttggtgtgtgtgtgtgtgtgtgtgtgtgtgtgagtgtgtgtgtgttcatctgtatgtctagattttgttttcaagatggaacttctttgtagagcaggcactggcttcaaacaaccaacctgccctcgtagattccccaggactgggattaaagagatatgcctgattcacttcctctttaaatcatttaaaaatatttacatgaataatgattatatttttattcttttttatacttaatcatttgctttaataaaacataacactatgcagagttcaagcctctattagatacctagttggaaagtagaggatatcgcatgatctttagataacatttgtcctattcattttttaagtagttattataaaaatgagtatttcacagtttagagactaaagttgtcatattttatagtttatttataaaatctatctgttgcctgtgattaaaatattaaatatggctttagtaaattaaacctctaatttttattcttatatttgtgtgtacgtgtagacataccccagtgcttgtgtgggggtcagaggacatgtttcaggagtcagttcactcctgctctgttggtcccagcgataaaccttaggttgtcaggcttggcagccagtacctttaccccagctaaccaccttgcctaccctctaatatctttcagaactaagaaattataaaccagggtaatatcagcaagattcctttaatcccctcttatcttttcaggctcatgagagacttgaagattcaaagttagaagctgtgagtgacaataacttggaattagtgaatgaaattcttgaagatatcactcctctgattagtgtggatgaaaatgtggcagagctagttgggatactcaaggagcctcacttccaggtaacctgccccatgccctcttcccacggcttcctcctcagaagctaacttccacgctgaagtcattcagtgctatttggggcttgtttttaagttctaacttaggtattttaatatcctgaggctaaaggaacgtcaacacacacacatggctatgttcagcccagaaatacacagtatttgccacagaaagaaataactttggcttttccttggtatcatcagttaaccctgactcaccttcagacatcctcctaggaaaagctctcctcgctgtgacaccaccactgcctgggttggtttgtttggcttttttttttttttttaattactgggtgaggggcacccaccatggcagatatatatcaccatggcagatagatatcaccatggcagatagatatcaccatggcagatagatatcaccatggcagatagatatcaccatggcagatagatatcaccatggcagatatcaccatggtagatatatggaggtcaagacccctgggagtctgttctcccttttaccgtgtgggtccctgagactgaactcaggtcatcagggtttgtggcaggagcttttaccctctgaaccatctcggtggccattttcgtcatcaatatcactgtttctcattccgcttttattctagtatggaacattttaaaaattgtttcaggatcagggtgaattcagtgaaacccatgatgaaaagatgacaggaaaggtttgtctagcgatagggactgtcacatagtgttcttcattctatagagtcaaaaaaacaactgacctgtgagtaagttaagcagtttcacaaagaaaagggcacttcagagcagagacaatggggagtttttattttcaccctgtaataagagtgtgtggcagtagagaggaggaggaggaggaggaggaggaggaggaggaggaggaggaggaggaggaggaggaggaggaaagtaacaagtgagtggaatccggaggagtacgtcagccatgcgtgctcactcactgtgacagacattgcatcttagcagaaaaagaaagtgacactgttttctctgcactctttgtcctcaaaattagatagtaatactcttttgctttttaaaaccactttatgatagaggctaagtaattgagtttatgtaaggcagtgtgaagtgttatcttgagggccaggacactacacatatgaattaacagtctgtgtgggatccccttgccaagagccccacgtcctgattcgagctgcttggtcttctgatgtggtattcacttttacaagttctcactagaggattaatgactgactcagttctgaaacacattacgttgaacttgaatgcaccttaaatgatgatgcaaaatgagtatcggaaaatgtagaatacctgattccctacctattgggactgaaatgggtaccttgattacaggctgcgacatcttatcctttctttgaaattctctcccctgggaagtaatcgagtgtactgttattgttttgtttcacagatgctgtcttatgggggtgggcacggtgcttgtttctttgttgcgatgggtctgcttacatagcacaagccggcctcagcctgcagcgtgtgtcaccatagcaggacaacactatactaatgttaattttcttacaaccagttacctctagatcagtggttctcaacctttgggtctcactcctttagaggtttaatgattctttcagggttctacaaccaccagaaaacaaacaaacaaacatgaatttatgttatgattcataacactagcaaaattgcagttataaagtgttaatgaaaataattttatagttggggtcaccacaacatgaggaactggattaaagcgtcacaacattaggaaagttgagaactacttctgtacataaacacaaattaataatccttgcctaaatcaatattttcaatagagattacaaaatagcatttccaaattgtgtcattttatatatgtgagctggcattgttctgtgaaccctgagtttatctccagctggccttctgcctgtaatatttcctactgggaaggtggcaaaatgatcagtactattctttaccagcttttatgaaaacatcatcttcaattagtaacaagtgagccttttagtccttttctttgctaaataattttatgtacctgggttggttggatggttgatttttttttttttcctctaaatgtggagtttcaattctatagaatagttagtccttttggcattcaaattatcctgactttaaccaggggtgagcagcctttttgtatacaaatatggagctcctgaaaaattcttgaccagagagataaaattatattaatagtgtttcatgtagtcacaggagcaaaaactctacctcaaaatagaagcccaggttagagctttgagtagcttccaacatttataggaaaaactctcatacagatttctaagttcttttcctttctgagttttttgatgtgtgtatgtatgtttccatgtatgtttcacctgtgttcatatatgcaaaatctaatgagcaaagtctgatgtgtgttttcctcagctactcccctcccttcctccttcccttcctcactccctccctcccttctcctctttgtctcttttttgagacagtttatcactggttggccagccaggccagagctatcctcttgtgcccacttcccagagctgggacccaggcatgcactactctacgcagcttcttacgtgcacgctaggaatcttgcacagtactcaggttgggatcaagcacacatttctctgccattttcccaaggctggttttacaatatctttgtaaatgactttatgaaattttcagaaattgccaactaagctgaaacccagattgtttatttcttgaatgtgttgatacttgccaccctcttctggtttcatttattatgttttaacttgtattctgcatacttagaaattttttaacttagtgttattgcaagtagtgaattaaaacttaactcctttaggataaggaatttttaaaatatttactataaaaatgatattcctggacaactaccttaaaatcatccacaatagcatacattccagacattatatctggaaccatttctcattctttttcccttcctttagtttatcttttatagactaaatcctcaattggtaatatgcaaattcctactagtgatggaagtcgctgatatttttctcgtaggtattttagcataccttttgaacatgtccaaagtatatcatactgctaatataccaacataataaaaattagagtctttaatcagtcagttttttttttttttttggtaccttatagatagggattagtggtaaagacagaagaggatgatgaccctgctgataggaaatttgtcacctccctctgccaggttttgaaacccaggtttggtttccagtgaacataacactttaaaataaaaatatgtgactaaattctactagtctcttcaaatctgaaaacctgaatatgatattatgataataaaatgatttcattttactttttcaaaaaggattatatatgtatttgacataattcatgttgggaatttaataatgtgtccttagaaacttttagtactctacagtgataatgaactaataaattatttttagcaacttgttccaccagtagctaataatcactgggtgttttgactccttacagtcgctcctggaggcccatgatattgtggcatcaaagtgttatgattcgcctccttccagcccagaaatgaatattccttctctcaataatcaattgccagtagatgccatccgtattctcggtattcacaaaaaagctggagagccattggtgagtagacaagtgattgctgtcttagatctgagttgtagcgctgcccaggctgctcctgatacactgtgggaaccacccctgctccttccatcagtcttgttggccttcatagaaatacacagcagacaatctgtccatcttgtagcctaggaaatgtaatcaaaatgaaaccttaaactgacttagaagctataaatagaccagtgggaaacaggaaaacagttttatttcttcacagccttttagaaattgtctgtttgtttagtaataataacaccaaaccaagaaatttgtttttaaattttaaagtatataaatttaataaacttaaatatatttaaattttaaaatttaaagcatatatgtaagtaagttatactgaagtattaaaaagtacaaagtagtgaagttaattacttcctcttaaactttttacttgtggttcctaaaaagagtgatgtggcaaccaggacaagtcagcacgttctactgctccctttgtctgtggaatacaactagattttaagggctaacccttaaaatggctggtctctctgagatcacaactgcactttattgagattggacaggaaaagacatgggaacagagttcaccagcctggtttcagaattattttgcttgtattcgttgatgtttgcatgtttgtttgttttttcaattttctatagggtgtaacatttagagttgaaaataatgatctggtaatcgcccgaatccttcatggaggaatgatagatcgacaaggtctgcttcacgtgggagatatcattaaggaagtcaatggtcatgaggttggaaacaatccaaaggaattacaagaattattgaaaaatattagtggaagtgtcaccctaaaaattttaccaagttacagagatactattactcctcagcaggttagtaataatttcctagatgatattaagaatatttttttagtcacttacttagataggtgcttaattgttactattttgctaaagagtttgtcttggtaaagtttttaatttttatgtaatgttatattagtactataaaggaaataataagacatttatttttgaacattatgaaccctggtatttgggcagcctgcagagaggtgtcagaataatcataaagcctttttaaaaacttactgttgttgaaaacatttttcacatcacttgtttttcaaacattacgctagggcctttgagatggtatagtctagattacctccaggttaatgctttgaaatatgttaaatggcagacagtatcttatacgttaggttaaagatgatcttggacactcagttttcactcatttcacatttattttgggtaaaatgaataaatgaacaggaaaatgtgctaatgatagagatttttctatctcttgtaatgatcatgatataatcctagttcttgggagattgaaacagaaggaccccaaatttgaaccttagcctgggatatgtactgaaacccccttccccctcattgaacattagcctgggatacatactaagacccctccccaccccataaaagaaaagatggagatggatagcattctgggtttgagctattccttagaagataggacatactacttaatcatgattctcttctacagataaattagatctaagaaaatagtaaacattgtttgaagtaaaggtagattttactgttttagtttcattcttgttgctatgacagttaaaactaaccatattaccttactttacaaaggcagcattcaataatacaagagaagacattagaatttagactatccctgtacttctggggctgccatcacattatttgtgtatttccatttgtgataaaatgagacctgtttgaatctgattgtgttggaagaatatttgttattttattagctattaattagaaatgggaatttccctctgtggtcccaaccaaaagtctacaattaagtcacttgtgtattagttactttctcactctgtaacaacgtgcctgataaaagcaactgaaggaaggaagccatactttggctcacaatttgtcagaacagttcacgatgttgggaagatcttggcagcaagaacttagggcagctggttacagtgtgtccacagtcaggaagcagacagaggcgaatgctggttctcaggtcaccttttctttttgtgtcagtccaggaccccagcccatgagataatgccattcacatttactgtagatcctctctactcagttaaactttctagaaatatcctcctagatactccacaggcatatttccaggctgatttttaatcctgtctagttgacgataatcatactgtgtaggtgtgtatagtggactttgccggtaaaaccctgtttgtttcccatgtaaatttgataaactgaatagcttacttcactatgtggatatttaactttggttcaagcataaacttttccccattctataatggggtttctggattttatctagcctttactaggaaagaggattcaagtttgaagtagaaagtagtcatatggtctctggcacatccgactctggaaaagaagaggcgccattgtgggaagcctccagctgtacttggattgggactttttttttatgagcagataatgattattttgaaatagtaagcataacccaaggctgttgtggacaaatcttggacatctaagagatgctgtgaatgagggagggcatttgccctgtacagtggactttctcactcaggagctctgtcatctaatgcaccagctccaccccagctcatccccagctactatgctgctttctgtagtctcagttacccagtcaaggaaagtctaaaagtactaagaaaattcctgagatgactcatactttaagtgtacgttattgtgtgcatggtgaggaacctgttcttcacgctttacatccacccagaacctgaatcatcccttgttcagagtactgtatgtagtacccagtccctcctatgctggtgtatcagcttgtattcgcgtaacttgtgccgtgcatcgcaaccataaagcataagcactggcagttcagctatgccaactcggaagccacagggcacttctgtaggtgtgatggtaaacagctctcagtctagcaagaaaagaaacactactctactgaagttgctaagatcaatggtaacaacagatctctcgacaaaattgtaaaagaaaagaaatatgctgcttgactgagtggtctgaagcagtaaattttggccatggtgtgtgttaagtgcatagttaacagtaggttataaagctgagtactttcttaagcttagtgacccactgtacatcttggaataggccttccatggattcctgtgcttggagcctattgtagctctgtagcttgctgtgagagtagagggaaacccgaagctctcctgccagggccgtgttttttcaaagcacagtagatcctctttgtcagaaacacgggattctggcttgcagtcccagctctcctttgaggcatatggtgtgcattttgcagtttaagaactgggaagctactttggaagtcattttttttattaggtattttcctcgtttacattttcaattctatcccaaaagtccccccatccccaccccccccatcccctacccacccactcccaccttttggccctggcgttcccctgtactggggcatataaagtttgcgtgtccaatgggcctctctttgcaatgatggccaactaggccatcttttgatacatatgcagctagagtcaagagctccggggtactggttagttcataatgttgttccacctatagggttgcagatccctttagcttcttgggtgctttctctagctcctccactgggggccctgtgatccatccaatagctgactgtgatcatccacttctgtgtttgctaggccctggcatagtctcacaagagagagctatatctgggtcctttcagcgaaatcttgctagtgtatgcaatggtgtcagcatttggaagctgattatgggatggatccctgcatatggcaatcactagatggtccatcctttcgtcacagctccaaattttgtctctgtaactccttccatgggtgttttgttcccatttctaagaaggggcaaagtgtccacactttggtcttcgttcttcttgaatttcatgcgtttagcaaattgtatcttatatcttgggtatcctaagtttctggaagtcatttatgatttaggtttcagaaaggtataaataattgtacttagaagcctgtgtcagttttttgtccctaggaaaaatggtttaggaaacaatttattttggttttagaaatttcagccacatttctgggctgttgtggcaaagtatgactgtggaaaagcagggcagggcaaagttgctcaccacaggagggctgaaaacagaaataggaaaggagcagggcagtgtgcatcctccagacatgcttcccatgaccagttctgtccaagcctggtctacaaagtgaggtccaggctagccagggctacagagagaaaccctgtctcggaaaaaaaaaaactataggaaaataagtaataactttatctcattcaacaaaataatagcaaatcaaagctaattttctgtaaaaaagtaaagttaataaagtttgtccaagttgaatttattgaaagtatgctagtatagtttcttacaagaaaatccgtatatgaactgatcatattaacgagacaggcgctttagccaactaagccacggagccacctaactgatcatattaacaacagattaagagagaataacctcaatagaggtgtgattaaattttgctcagattcacatgtctttttttaattgagggcttgtttacagttgcagagggtttgtccattatcataaaagagggcatagttccacttatggcaatgagaagtagctgagctgagcactttatattcctgatctgcaggcaaacataggcaggcagacagacaggagagagggcagaatgagggagagaaaaagagatagaaatacagatagagatagacatagatacatacatacattcatacatgcatacatacatacatacatacattcattcatacatacatacatacatacatacatacatacatagacggacagacactggcatggacttttgaaggttcaaagcctaccctcagggacatgccttcttcaacaaggccacacccctttcaaacaggccaactggaaaccagcatggaaataactagatgagcctgtggtggttattctcactcaaaccaccacagataacttctaccaatggcggagacttccacttgaattcatcttaaagaaatatccatttattgtaatttattcttagttgtgtacactaacacatgtgtactatataatgacttaaataaaataaaggatgacattgtagtagtaggttttatcaaagtgtagagattagggatttaccaaaaaaaccacaataaacaaaccaaacagctagataattttaggcatagtattgcttttaaataaaaccaaagacataatccatgaaagctataactaataccattatgaataaaagttcctacttatgaaagacaatgttaagggactgagaaaagctacatcaagaaagtctctacaaaacaatcatgtctgaacaacgagtgacactaaacgtggctaatttaactcagctgtagggtaagaacagatttgatttaaagtgtgagcaagagagatgggcaggcactgatgaaggataacaaaccttcatcagacgagtgaatggagagatacttgaggcgatgtactactagggaaactgaaaagatgcagtgtgctatgttgcagtaaatctctccaacccaaatatgctccggcaatgaaaacacaacacggcagatttaccactacactaccatctttcacatctatgagaccccttagaactttcggtttctccagccatgtgcttctacttcacttttcttcttcttcctcctcctctgtgtcctctcactcttccattttctccttctctcccccaccttctgctccaccttcccttttatctgccaaatcaacatctctcctttattttacaaattaaggtgggaagcaggtttacaggaaatcacctgagtgctgattcattctttgtttgcaaccactcaccagaacggaattaacgtcaaatataactagccccagggctatccacaactgcgctacactctattcagtggccaaaaccaactggaaacctccctagtggggatacagagcaacaaaaacagatccctcccttgcagaaacatgacttgggaggccctttgggtagacagttgatcgatccatccatccatccatccatccatccatccttcctttctttctttctttctttcttccacatcttttttaagtactaattaagttggaagaggaagttgaaagtctgactgctgtataaagcgagggcatagctgatctgaagtatggttaagatgaaggtttttttttattgtagagatgagggatagtacaggcagaggcgtctggaagagttgagggagagggagaagatgacagagagagagagagagaaagtaagtaagtggtagacagaccatgtccagtagaatggcccagggtgcaggatgagaagagccaagaggaactccaggtactgagggctcctgcagtccagcatgggtgtggcttgtagataggcaccaaggatagatagctgtttgtgagtttcttttggagctactaacttcaacatcagaagctagtctccctgacacctcaccacaaccaactctagtcccttaagaggtctcatttccatcaaagtaaaagaacccatgataaaccaaagaaactaaccatatcaatacacagttgtgcaccggtgaaagaaatgctttcaaatggctctattatagcaaatactttcaatctctagttatgatgttaatgatgttaggagtaagcaatagccagtgtaaaagtttagtatgtttgcaaactgcagaatagaaatctactaacattcagacatttctggcaacacacacacttcaggattcccagccactgtgggacagcagctgacagaaatgccacccaggatcttaacccagcttggcactgacaaactacagggccctggcagattcaatggaaaagcacaacttgctgctggaggaagagggcaagcttgttcagaattttgatgaagctgcaaacaataaagtaaactgaactgactcaacttcaagaataaaatagcagtgatttgattgctttaaaaactcatttggggttaggatgaaacagaaattcttaatactttaaatttcaagattcttgaactgaagcgttcagttaattactatctatattcagttatttgtttgctattgattaatccaaagaagccaagaagtaaaatctaaaataaaggtaaataaaacttttgactcattgaagttaaaaaaaaaagtggggggggggggaggagagaggtgctgaagcgttatctcctgccagggtttccttgaggatccaaaaagcatggtgtgacaaaatacagacacagaattgctgcaaagtaagaagtaagactataaatttaaaattaatataatttttatccttggaacccaccccaggaaattacatatctagaaataatagagtactgaatcagactcttttttttcatatcaagcaactaaaaatgtaaataagacatcatttacaatagaagttgccttaatgcctgggaataaatctaacaaactagttcaagtcctccacacaaaagaattatgaagatgttctcagtaatagagcactatggaaatgtccgttttcttcaccttaacttacagactcagaagcttgtcagtgaaaattccagcaaggttcttcttcatcttgatgaaaagaggggccaggacactggaggcacaaaagcggtcatggtatcttagttcctttccctgttgctgcacagctttaagggggaaagtgttattctggttccaaggtcaagggtacagtccaccacagtacagaagtttaaaaggaaccgaagcctgaggcagctggttggccaccctgactccacagtcaggaagcacagagcaacaacaccttgttctcagcctttgtatttttacaatccaggactccagcccagaaaatggtgccacccacagtaggtggctgttcacacctcagttaagctagtcaggatacccgccccccccccccccaattgcaagaccaggggcctatctcctaggtgattctagatttcattgaattgaagggtgagatcacaattttttttttaattttttacttatttttctctcatacaatacatcctgaccataaccatcaaaattattaatgtgcaggtttacatattatgatgtctgcataggaatggataacatgataggtggaagagagaattcaaaaagagacctgtcttagttagggttttactgctgtgaacagacatcatgaccaaggcaagtcttataaaaaacaacatttacttggggctggcttacaggttcagaggttcagtccattatcatcaaggtgggagcatggcagtgtccagacaggcttgacacaggcagagctgagagttctacatctttatccaaaggctgctagtggaagactcacttccaggcaaccagggtgaggatcttaagcacacacctacagtgactccaaccacgacacacctattccaacaaggccacacctccaaatggtgccactccctagaccaagaatatacaaaccatcaccctacacttgtatattgtattagtttataacagaatggaagaaaattgaatattcctaaagataatatctatagttgtcattgtttcatattccatacaaaatcaatcacaaacatacccttggtcagtaaacatctaaaaacactaaaaatcacagtgtgagatgttctcttttaccattcagttagcaaaattcatacatgaatctacaatgtctccttcattgataataaaagtatcattggtgtagcacattgatgggaaggaagtttagtaatatctcttagagccgaatcttgatgtgttctaaaactcagttgtttcctagaaaaattctttcatatatacagtcagaaattcattaacaagcatgtaaatcctaaaacattagtgtacatcctatggtactgtttttatttttaaatgacttacatatttcttaacttacatcgacggaattaaatctatatccagaaggcaaagcagggggttgaatacaagatctaaagtaaaggccatcttgttgggaagccaggatagtgggttgggatgaaatgagagcaagagggccaggttttgagcttatgttttgggtggcaagcccatggttcatttttacgtaatttactaaataaatgcagctcatgtatatataggagtaactcaagtgtggtttaaattgaagaatttcaagttataatttttaaatatacagttttctaggcgtgggtattcataatggacctgtgacatcattaacacaattaagataaacttagccgtcactcctgagttgtgtgagactatttgtgttcctctctcctgtttcttgtgttttctccctcactccaggcaactgcccttctgcattgtcactgttagcctgcattccgatattgtcatataagcagaattaaacatatttggatttcatatttttaatatattttgattctttgaggattttatatgtgtatatagtgtgtttttattatgttcaccccatactcctcctcctccgaagatcttcatctccccctctcctgactttgtcctctgagtacagtttgtgatgcccatttactcatgtgttgggcctggcctctgcctttctcagaaagcttcagctgtcaaaggctcacataaaggttcccgaggccctccctccatgctgggatgctggctggcttgatcttgtgcaggtcttgtgcagactagcacaactgctgtgaggacagcagttctgccatgtccagaagacactgttaggttctgcttcttcttaacctctagctcttagtctttctgcctttcatccttggtggtccctgagccttgaacggaagggatataatacagatgtcccatctgttgctgaacaatctataaacacttaatctttacattttgacctattataagtttctcctttaaccactgtgccccacacaaagaaacttctctgattgagtctgagagctgtgctaatctttggtgatagagatttgacttcattagccattttgatactatattcatttagtatatgtgctccccagccatacactaaatttgaattaacttagacccagaatgacagaagtttcatgctctcatttatatatgaaccctagagtcagatttttgatttgtgtgtctaaattgaagatcctctagaatctaggaaactagttgaatttcagttcctacctggcttctttcagcacaaatatgcttacttatgttgataagttcatacctttttattgatctagtatttcattgcatgggcataccaatttgtatatgtataaactggctggtaaacatttttgttattaccaatttgggctgatacagattaaaatacagctaggggtgtaaatacctaggtattgagagttggtcatgtggtaggtgtatgttgaaattttagagacaaacttttcagaagtgattgtagcagttcacagtcccaccagcatttgcccgagtttattttactcagtgtccatgtttgatttggtatgaccagtgtttagtttcagttgatataatagtatataatagtagctgattgcaattttaatttgcatatcactaataatattatataataataatagacatttttcatgtgcttattttccatgattttacccactcaatcaagttcacatacctttgtctgctttgtgctgttctcttacttggtttttagcaatctggtgtgctggctagttttatgacaacttgacacaagctaaaatcatctaagaggagggaaccccagttgagaaatagatcaggctgtaggcaggcaagcctgtagggcatttccttaattagtgattgactagggttaaaaggaagcccatggtaagtgtaagaggagtttctcctgagctggtggccctgggttctctaagaaagtaggtggagcaagtcagtaagccacactcacttctctgtggcttctgcatcagctcttccttccaggttcctacctggtttgagttcctgcattggcttccttcagtgggttgtatgaaagccatttaataaatcttatcctcccctagttgcttggttattcagtttcatcatcgcaatattaacccaagacacctggatacaaatgtctcatcaaaattgtgatttgcaaagattttttgtccaattttcaaatttgttgtttgtttgtttgtttgttggttggttggttttgttttgttttttcgagacagggtttctctgtgcagtcctcctggctgtcctggaactcactttgtagaccaggctggcctcgaactcagaaattcgcctgcctctgcctcccgagtgctgggattaaaggcgtgcgccaccacgcccagctcaattttcaaatttgtgattatcctttcttagtgtcctgagtgttggggttacagtcttgtacttctatgcccaactgtggaattgagtcctttttatatgtagtgtggtctacttaacaatttgaattcttcctatagtttcctgaaaataagaatataatatgtagaagttaaatttttgtgttactggtgttgctgatgcaggttctcactgtgtagcccaggatggccttgaagtcatgggtaattctcctaccttaacctctaaatgttaggattataggtgcaaattaccacaattggttgcactgtgtcttgtttactaaattgtctcgtatttgttatttctctctctctctctctctctctctctctctctctctctctctctctcacacacacacacacacacacacactttagcgtctttgacttggttagttggtttcattttgagctgtgtcgtcctgtagtccaagctggcctcccagtcactattcactatgtagttccgggtgactttgaactgtttcccaagtgctttctggactcttcttaatagacttttcttcctgttgcaggttatccgttctccttatttgcatgcctgctcatgttttgtggttgttgtttgttttgtttggtttggttttttttttttttttttgagaatttaagaaaatatattttgcattatttcttcccttcttttaataacctcctgtgtccttccctacatagacactctcaaatacatgacttccttgtcaatgatcattactattaaacaacacacatgacttactgagcccatttagtatagcttttatgtacacgtgtttagagctgaccatttggggattcagtaacatatcaggagctcttgaccctggagatggctggttggggtctgtcccccagcagccattaactttctgtagttttttgtataagggtgggaaattcccttcctttttttttttttttttttttttggtttttcgagacagggtttctttgtgtagccccgtctgtcctggaactcactctgtagaccaagttggccgagaactcggaaatccacctgcctctgcctcccaagtgctgggattaaaggcgtgagctatcactgtccagctgaaattcccttcttgtcattggcgtatggacttgtgtatcatcattatgcagttcttgtttaggcaattcatcattggtaaacagactgctctgaatcttttcagttactggttactagtagttcagaagttactagtattgtatatgaatcacttcacatgtgctcgagtactataactgctgaatccattcccagaagtggatcactaggtcagagggtttatgtgtttgtgatcttggtaattattgccaaattgtcctcacaagaggttggagcagtcttccacaagcctgttaggaaaatccctattagccaatatcctgtctgggtttctgtaaattagttaggtaggtaggtaggtaggtaggtaggtaggtaggtaggtggttagttaatatgaagaagatgttatcctagtagtgttttaattttcatttctactcacaatagtttgaacacctatgtttaaaagctgtttgtacttcactttgtctactgtctattttaagttgttggttattcagtttttctttaatggtgaggatacagaattgaaatattttaagtgttttttagtaacttaagattgataaattggcctccataaactatttttgtactgcagttcataaaatacagcaagtcaactcttcaatgattttaaagattttataaaactcctaggtcaagtgctaggctaattgatttttcagaccaattttaccaaagtttaatgtgagttttttgagaacaaggttaatgttccaaaagtcatttaatgggccaaagaattattcgttttcgtaatccttttatatctgagttggatgttgtatctcctaacagggtaactaatatttgaaatttggaagacacttgtaactttacaaagtattcttcacaatcaagagtggcgaacacccttgcgtaggtggcatgaggcttttttttcagtgggcctttctccagaagtcaggaacatactgctacctttataactactcatacagtctctcctgtcttgtgccaaatgcctgtgactttttgcttgcattatttataatttacaggcattataacaattacttagggaggaagttgctttaccaatgagtgaagtgatacaatgagccagtaggttacttagattttgttaagttataagttaaaactctggctttatttatgcaattgaaaaatatatttttagagttacgtcaatatggagaggcacccagcccacgtccgtcaggtatgataccatgtgaaaacattctctggtattcccgttgttctgtcttagcagtcaactaaatttaccttgattaaactttatcaccttgagttgtacattgcctgagccttgagctgcatgccaaactcaagttagctacctgtcacagtttagcagtcttaatattgtgtgcatgcttgctttgtagatgcttctaaatttatgtgtcaggaaaaagtggcttcctggtttgtgtagcattgattctcagactttgcaaagttgttgcaaatggcctacagcttctatcaagatcacataaaaatatcttcctatgcatctctcacactgggtggttttttaagcatgctaataatatagtgtatgtacttgtactatttgaaaattgtatttgtttctagttgaagtttgatacacatagaaaaataacattgttagtttgactaattgtatacttttctgcttattaaagtttatctgctgattaatactaaggcttttctgtagaagattaatttgaatttctataaatatgtatgaagtatgtctattttaagaaaacagttaatctaaacttgccatcaaatattaaaaattattaattagaattcaaattaaagtaaataagcagtatgttataagcactgaagatcttaaataacagtataactggcatacctttattaggaaatcaaatttaagagaaacctgtatgtttgaatttaaattggaaaatagttaggacctttctagtgttttgtctcattcgtaatttaatcttaatttaaacttaaacatataaatcacagtaaggtgatccagaaagtattttccttatttgttttagccagtgtaactgtctgattaaaatgtcctacagaggttacgttcttgatgttttaaggttgccaggtcttacctcaagttgaccgctgtttaatgttgctttcaaggtgtctgaacaatgtcggtcctgatctactggaagtacatgcctcacactgcataagttatctcagggttataactgaaaatgacatttatttaaattaaaaatgatgcagtgtttgttgggaaatcaagtgaaaagattgagaggggagccgggtagaatgcagtgattattgcacacttcctgcttgaggttagctgttgagggggtgggtgatacagctcatgggggagcacgcacctactggcatgcaaagccctggggttaaaccccacaccgcagaagaaagaaacaggagtttttaaaatgaacaaaattttaatgtagcaaaatgttgatttttctgctataccaaatcattatattaatattctaataaattattctttatttagaagaataagtttctttcctgaactacttagtgtcatttacaattaaatcacagtggtttggtttcaatatccagtgcttagtgatacacatatagtctttttcattgtgctgtgtttttaggtatttgtcaagtgtcattttgattataatccattcaatgataacctgataccctgcaaagaagcaggactaaaattttccaaaggagaaattcttcagattgtaaacagagaagacccaaattggtggcaggttagtatgattctcaaaaaattcctcaaatacttttctgttttcaatctttgatctgcccagtatctaaaagtgcaggaagcatttgttcccatgatttttcttgcatgaacaacttctgctttacgtctgccagctttgtggacagaagaccaaattgagagagaatttgtttgtgtaaataagagcaggcataacctgcctgtggcatgtcacccggtttaagaattaggtgaaacaattctttcccaaggtagtcaccttcaaatgtgttttaaggcaagaagaactttgtactcattgtcagggtttcttgaggtttacataagttgacacagtactcaaagttgaagaaaatgacaagaaacaaagaatcttttcaattctcagagctgattctggcctcactagagaacagggtaaaagaagaaagcctccaggacccagtaccaagcataaacttagctgtgactggtaactgctgttaacagcgatgagttaaatgacttctacagagagatgatgtagaggatgagagcagcctaggcacagtgtgctggtgtgtcaatgaagacatttttatcagtgagtacaccatggtgagatagctaggacgtgagctcagtaaacagttgatgaatgcaagaggtcactgaaacacttgtaggctttaaaactgtctaatcgcttcctgtggctgatcatgggccgtccaggtgctctctagtttactttctgtaaatgctcttagctttctaatcctctcactggcatttgagtctccttcttcattttgatagtcttatttaattccagttttcaggattattaaaaactgataaacaggtgttttattccacttataagaagaaagacaataacattgtgatgtgaatcattgtcatttaaaaatatccacttttgtggggttagagagcagctggttaagaggcctgccctcactgctcctgtggaggacccacagagccagcactcatggtggctgctcacattctccgggactccagctcttcttctggccctgggcaccttcacccatatgcacacacacacacatagacccaaaaacactcgagtaaaacatttttgaactacttcctttgattttaaagtttttattttttatactagataaagttttacttattttaaattcttcaccttgggatattcagattcttgttagcatgaattaaaatttatgctttgtattcccagtactggaaattcttttgatttagactcaggaaataacatcctaggactgaggtcagtagaaatggtttataaagtccttccttaacactcctttatataaaatagcgttctctttctgctctttgactatcacacacatttcctgtccttgctcactcccgcccccaacctctaaagaaaacattgtagtatttgaggagcctctacattgttgttaatgggagtctcaacatgtcattaccagtggacatacatgagtcttagatacaaattgctttctttgtttaaatgctttaacacagttccatggattgaaagagtgttttccataggaaattaacttcaactgaccagcacttggacttactaaaatattgtgtaaaactttggtcactgataaattcatttgattctaggctagccatgtgaaagagggaggaagtgctggtctgattccaagccagttcctggaagagaagagaaaggcatttgttcgccgagactgggacaattcaggtaaagaacttctcacaagtaacaggcagggaggggctgggcttaccttttgcctctggttttgttttgttttgttttttctgaaatcacaaatgaatttatttgaaatacatggagaattaatttttcctgctcatctgcttttttcctctctaatttttatgcttttctgccacctactggtagtgtatcaaaatccagtgacaaattcacccctcctaggaagggcaattctcttacctcctcacaaaacaactgggcaacttacggttgagtctcaatgtgtcgtctaaattaagtcttgtcatcctccaggacccttttgtggaactataagcaacaagaaaaagaaaaagatgatgtacctcacaaccaggaatgcaggtacgtgtaaaatccctttggaagctctaaatatatagccttatcattagttaccatgttttaatctctgaatatgaaatttaaaatgaatttaatttatattagtgccaattactggatctcatgtgaatacatgataaaatataggtctcagttggtgactatgagttgcagcaggcagaagttgttagggattgagcttgcactagtgcagaaggaatgtatggacagtactgacgtagaggatcccaccatggtaacatgcttctgaggggcagagtgcctttgtggagatgttagcattaggatgaaggcgagctagcttccataaggtcaggttcattttgaggaaatgacactgggctaggtaactcatttaatccagtggcatcttttaagggtctttctcaattcctagggttttacttggggggggagggggaaggaaggggaagaaggggagagagattaagaagagagaggtattgacattctttccatatatttaagttggcctgggattcactagttaatacaggatggcctcaaacacttaattatcttattattctatacttaagttagtagcccagcctggccccaaactctaagtccttctgcctctccctaaatctttcatcttaaagaaaggaatatcttttaaagaaaatgtaatgataatcacaagaagtcacagttgtgtttattagcttcattagaagatcattttacagttaaacacattaaatcatcaagatgtatactttaaggacatacaattcttatttgtcatttttgcttcaaaagctgaaaaaatatttttaaaaaatcaagtctaagtatgtataaggtgctgggttcaatccccagcactagaaagaaaagtgaagttaaaaacactgtcagaccagttgagtgtattacaaatttaaaacaaaaacacaaaacaaatggaaaaaaaaaaaacctttaccctaactagccatgagaggaatgtagattaaagctacactgagattctatcttaccccatacagaacagacttcattaagaaaaatcatattctgtcaggatcctggacaaaaaaagaatgcttttggcctgacagtaggaagtaaactagtccagccattatagaagtcagcctaagaggagagttacccacattacaccactgtccccactcctgagcacaccacaggaatattgcgtgtctttatcactgcaccacagttcaggagagcgaaggaagttctgtaattaatctaagtggccatcaacaggagaaataaaatatggtctatatgtaccacagaatgaagttatttcttttgcagaaaaaaagataatcatgtttaacaaacaaccaatcttagaaacacaaacttgtttttgcccacttatggaccctagattttgtagagatacacaaaatcacgtatgtacagttgacattaaaggagatgggaaatcatgtagggaagaaagaggaggaggaaggcaagggatgaaagggaaagggtagccgggcacgggaaagtgtgtgcaagtgcattgtgtgtctgcaggaaagtggccttctgtgacctggtataataaaaacaggtaaaaaggaatgtggaaactatcaggtttatttttcttgacttcaaactacctctgtgcttagtaataacacagtattaaaaaaaggacttgttgccatgataatgtaaggatgaagtgttcttactgcaggttgagtagggcagtaaggctgggtggtgtgtttcagaatcactctggttttatcattcattaactataggaaactgtatatcattaaaacttttagctcgtttttgtaactttttccttgacttgacttataatttgaggctatagcctactgaaaatacttttttatctagcattttattttatgtatacatttcagaatctccgtacttagacgtgagtgtgctgatgctagaggtggcctactctgcctatacaagtccagtagccaagcaggtgtcctgtgccctgtacttcatataaactttttgtgtaaatcacatgaactataatttgattgatataaactgtaagatcattatttttactgataagttgctaataagacgcctttagtccacaggttctcaaccgttggggtcgtgaccccttgtgggttgactgactcttttaaataagagtgtcttactcagggtttctattcctgcacaaacatcatgatcaagaatcaagttggggaggaaaggatttattctgcttacacttccacattgctgttcatcaccaaaggaagctaggactggaactcaagcaggtcaagatgcaggaaatgatgcagaggccatggagggatgtttcttactggcttgcttcccctggcttactcagcttgctttcttataaaacccaggactaccagcccagggagggcaccacccacaattggccctcccactcttgatcactgagaaaatgccttacagctgaatctcatggaggaatttcctcaagggaggctcttttctctgtgataactcccgcttgtgtcaagttgacacacaaaactagccaatacaaagaagttacctaagaacattggaaaacacagatatttacattacaattcatatcagtagcaaatatacagttatgaaattgtaatggaaatacctttatggttgagggtcaccacaacatgagtaactgtattaaagggttcacagcattaggaaggttgagtacctctgctttaacgtagagagtattgataaatgtgcataaaacgctgggattttgtagctcagtaaatgagtatctgagggcaaacgattggggacaagcatttaaagtaaggtataagataatgtctgtaccctacaaaatttgtagaaacaagcctatgtcatacgtgcacaattctagtaatagttaactatcaaggcaagaagaccactagcatacagaataccagggaatgtttttacatatacaaagtataactgaatataatttcctgttactttcacatttagagtttgatcgtcatgaaattcagatctatgaggaagtagcaaaaatgccacccttccaacggaaaacgttagttttgatcggagctcaaggtgtgggcagaaggagcttgaaaaacaggttcatagtactgaatcctgctagatttggaacaacggtgccatgtaagtcttcagtttccattgctgctcagaaagaggatgggtatatggagaaaaggattactactaatgaacactagttccagattagatttggttatgctaatgagcatggaagagtaggtagttctgggtccacacagttctgtcttaggtagtgctgcccgcttggtgctcagcagtagcttcatctgtcaactctacattgcagaagtgctgaagacaaatgcatacatttaagagttgtggcagattacattcatttgtggttttttatggaactattatccatttatttgtatttttcagccagtgtagtatatttaaaagaagacagcctacttactagatgctcaaacactcagtacaccagtggctttgtagatttcggtggtctggtttaagttaaagccctcagccctgaaggatcctaaacctgatattctgaaagcaggttcttcagaaggcagcgtttaccagacttggctaagaccgtgtgaaatgatgctggtgtggaggaggcccgtgtaggctccggctctggctctgacttttcactttgtaatcttagttctcccctagcttttgcatgttcacatagaacactgagtgatgtcagaaatggagtaactggagcgttcaggtaattgctgatgctatgatacctgctgcacatttgacctcttggagaagcctgaggaaatggcctctcaagcctctctccagagagaagagaaggatttgtttccattcctgtttttttccttggctctgttggtattttcttctgtaactattatccatgtgtttgtatttgaactcatggtaggatggaacagcatggtagcaggagcgtgtggaacaggatgctcttcactgggtggtagacagatagcagagtaagggacccaggataaggaatagccttcctaggcattgcccagtcatcagctttttctgaagggccagttcctaaagctcccccccgccttcagtgtagcaccaccacttggagcacttcatattcagaccttacaacttacacttatggactttttagtcctacaaaatcacattgcccaaagctaattttaatgtacaatgacttaagagtgtcatagtatttgtttttgtttatattagttttattttggctctgttttattttagagattttttctattatttttaattagttataactgtgtattttatattgtgtatgtgcatgtgagtgtaggtgccacagagaccagaagcataggacaccccctagccaccgccatttgaactttataggcgttgtgaactgcctggtgtgaatgctgcgaaatgaaccctgctcctatggaagatcaagtgctgttaactgcggagccatctttagttttaaaaatattttattttttactcagtagcaggctccctttcggtgttttcatggctatctgatttgggttgccacttctccctctccctgtccctgctcggtgctcatagcctctgcctcaggattctgtttccacactcttaccatatgtgttctgctccctctccacttccttctttacatcaggtttttctctttttaactatgtaccttttctagtttcatgacctctgtcctcacacattcccacagaaaacacacacacaccacaactagggtctggaaatgaggaacagacagtatttatctgtcttagcttgagctaccccatttattatcttttccagctctgtccattttcttggaaatttcacaatttcattagaaccaaataaaattgtagtgtgtgaatgtacattttcattacccattcatcagttgctaggcatctagtttgatttcatccccttgtaattgtgaatagaaaagcaataagcattgatgacagagccctttgggtacacacctatgaatgctagttctgtttgtagagccgtggtgtgtgggtgggtagatgcctcccatggaggtgtgtgtgtatgcagaggccagaggttcatggtgtgtatcttctcttattgcctccttcctggggcttctgaggcagtctttcactgcacctggagctcattgttttgaataggctgaaggccaggaaactctaaggatccagctggttaacataccgtccccaccacacttcccagacaagccccacctgtttgtttgtttgtgtgtttgtttgtttgtgggtattttccttcatctgtgacagtgtaccacatgcttgcctgacgtccacagaagccaggaaagaagaggctatcagagtccctagaactagagtcatacctggatggttttgagccatgataaggtgctgggaattgaacccagatcgcctgtagagaggctagcgcccttaattacagagccatctctccatgccctgtgcccagcttttgtgggtgctgaggaaccaaactcatgtgacaagcaccttgtcagctgaagcatctccctgtcccactttatgtttcttgcactgatggccgtatgactgcaccagtttgcaccgccaccagcagtgaataaggtttctcctcctccaaatcctcaccagcatttgctgtcattgctcttgatggtaaccactcgcacttgggtgagatagaatctcaaaatagttctattttccattattttggtgactgagaatattgaacacttgttaaaatatttattggtcacttgtatttcttcttttgagagttgtttgtctcattattacatttattgtttggcagtttaagttgggatttttggtatttaattttcacagttctttatatgtataatctgaaatgtatctggcagtgattttatcctatttttttttctgacagttccctttgttatgtggtttttttaaaaaaagattatttttaaccacttttaattttttttattttataggcttttccttctgaacattctagaatgtgcctgtatctcaaactgtgttcattctgcgctccctagccgtttcaccatttcatgtttgaagctaaggtccttggtctactttgtacccctttactgtcttctgtctagtgtgtattttaacacctttatcaaaagttaggtgttcatagctctgggggttatttctgggacagcggtatatattctcttgcctgttgtgccagtaccataatgtcctctattagagtttaaagttgagtaaaccgtgtccctccagctgggttctttctgcttagaattgttgtggccatctagagtcttttctgtctctctgtttgtgaattgtgttttccagttatatgaggaatggcgttggactttctatgggttacattgactctgtattacttccggtttgtaaccacttacagtgccgctttgctgcccaggagcagtttttccattgtttgcaccttcaattctttggttcattttggttttaaaggatttttttttctcctttgaactatttaaccttttcacagttaatatattgtcatattaacaaagctgattcaacagtaacagtaataaatctattctcagaaaacaggctagcattaacatgctttcactggcacagctatgcagaggtggtcaactttcccatctgtctgctcctgtctctctctttactttcttagttactgctttctaaacttgtgcttatttttttccttaccatcttcattcagatgaaatccgcatagcgttttctccacacacttgggtttcttggttttagcatgttcacatagctgtgcaagtatttctattgtcgcaggacttctacaaggtccttagtaacagcccctctcattcctgaatttagtaaatttttttcttagttttcccaaatatttgtcaattttgctcttttcatatttttttgtatcatacattttattaatttaatcttgttttcttttttgtttgctccttggagttaggatgaagttttctcctgttatcccgggtagaaagttaggttatccactggagatctccttttaacagacacatttatgctagaaattgctcagtaggtgctgctttttgcatcttataattttgctgtggtttatgtttttgtttgcattcatctcagagtcatttttaattctagaaatagattaatgtaatgaaacactttttctcttcaccacagaggcttagaatgtaatctgagaataagacagttgtgcaacacgagtcagttagctggagctaaaaccggcttctcacatgctgcctgcttgcagctttcttccttcctagccatatatgaaaactgtcactgagatgagatagaaactgaacctttggtcaaaaggaaaagtgaaaggaaaactagcagtcctctgctcttggtgcctccgctctgacacagactcctgtgtgttttgtcaggtctttccatgtaagccatcagtaggcctcagttagccatctaatgtttcttcttgaagcttaccacagtgctgataatttttctctgctaagacacttttctaaggcttcagagtccctcacgagtatgatggccgagctgtactctatcagaagtagagacaaagatatgctaccagcacccagaagggctcttggcagctccatcagtaatgaccactctcaaagtgtttgctatttttagttttgatttctatttttttttttttagttgacccgttttggagtacattatttaattttacacattttatttttccagattttcctgttagtgatgataattccattcactgtgtccagagaccataggcctcattaactccttagggattttttatagcctcagatataacctatctttgagcgtgtcacttgttcttgtacactgcggggaaaagtattctcctcttgttgactggactgctgccttgatatgttctgtgtagctgcccaggccttcatttcctctgtaaccttctgttctctccatcactggaagccttgaggtcttctgctcttttggtgacgtgtccatctttcttttgcttcatttctgttttgtttcatgtatttggagattctactgttaggtgcttagatgtaagtaagcatcttacttctaacgaattgacccttttgtcgttgtaattattcttcattgtttctacgatacctttcgtctccctgttggtctgctctgatgtgagtttgcagctgtgtctgggtcactgcttacagggatgtctttccatcctttactcccaacataccagtctctttaagtgtaagattccttcataaacagcatataattcgatccgtttttccaatttgttgtgccattctcttcctttgaatttgcctgtttcctctttaagtacagctctgcattattgtaaatatataaatcagtttcttacccttcaaatatgcatcaggagagttgcatcttgtctctgtgtcctattattgatactaatgttagtcattgactatggcatttggtagtgttttttttttttttcccctgcaaatctgtagtttacacttaagcaacctgttcagagatactttgaaacactgcagctgttttcagcaaacttggatccagtgatttaagcttctgtcattaactgagcactataaaagctttggaggaatatctggctactctcacttcatttgagtacacagataaggtttacttcctagtgttctgacccatggtatttctggcagctagtaaaaactgctttgttgaatgattgatctcagggaggacagactgggtttttatcaagccactggtgctctgtgttccttttcccttctttgctttcaggcatctagaagagtcaataactttctagttactttcattttcataatttgtaattttgttaagcaaattcatttttaggaattaaaaaaaaataggctagttcccatcaaaactgaggccttgattctagtttccacttacctcgcagctcctcttgatctacagcacagtggctgcactgggacaggtggggtatggcttattttattacttggtttgtgtcctttgctgctgcttgaatttctatgggctatgttgtaaggagtgagtgccaaaaggaaagagaagtgttgcataaaagatcttgcttgctggagttccatgtcttgaatgtccaaatagtatctcttcaatgcctttttttttttttttttttttttttaagaatcattgaagatttccacactacaaatttttctggccaagggcattagaatttctaattattttcttggaactgtgccccaagattttataccatagcttctgtgatctttccttaactggttccaggaaaacacactcacaaacctctctactccccaaaatactaaaatccaggaatatttcaagttccatagaattttgcatataacccatgcaaaaccttctgtggatttaagtcctgtgaattatttatgatgcctatatataatgttaagtggtttataaatagctgttaggctatattacttaaggaacaatgagaagggataaaaatctgttcatagtcagtgcagatagatttttgtttttcctgaattttcccattcatagttagctgacaagaaatacagaactcatggatgcaaagaagcagataatgtatttcctcttactgtctttctgtgaggaacaccttcagaacagtcctgggaggcaggctggctggctttcaaacatgagcacacacacatgcattagcctagaggaaaagtgttacttgttttaccagcagtgggagtacaaaccactgctattacatgctaccataggccttaagtgtaggcatacattttttacaacctacttttaataaggattcaacctctcctctagcccaccacccagcagaggtagtggaagagaaaagtcattagaatgtgggggaaagtggacctgttcagcaatagttctttgggggtgagcttgatcttctttggcagcagttcagtcccatagcaaacaccaaatacgactcagcagctgcagaccggtcctctagacaggcagacaccagggatgaaccagcagccgcagtccattcctttcagcacgcagacacccggcagctgtagttcaaccaccctggagcaaggccacagaagcagcaagctgtcacaggaacgtcacttaacagttcttcggcgagtttctctcagtgtcagagttatcacaagttaagctcaacaatgctatgtaaggtgaaccaatacatgcatgtcacatcgcagagaatagcgagtcagagcaaaccaaggctcagtgctcatttcccgctgtccatgggggttcatattaatacttcttcatcaagtgtcctttaatgtatttgctatatccaaacatcctttcacctgtgtctgcctcaggaaaatagtctttcatgtgtttgctttagcaaaacagcctttcacctgtgtgccccagccaaacataatttagcataactaactttccaaagaactagaagtttccacttcatttaagcattcttctgggaaaataaatttactatgtgggaaaggaaaacaatccattcctccctgacctatgtttcaccactcatttggctcctttttagatatacataagacgtgtttagtagatgccccaggaccaggaggattgtgttctggtaaactgccaaagatagactacatccttaatatcttagcatctatttaggattcaagtgaagtctgggagtaaagttaagattcaattaaatgcttgcacacttaaggaaagcattcaaaagtttctaatgctgattttgtgctgaaagagtcatagtggccttattaagatcaaccctgcatactgcccccaacttgcgattctaggcttccctctgggtcattactcatcagcatggctcgctgcctgaaatactcacctcttatattttcacacacttggagtgtactttctgttcaaggagagccttctcagaaaccccacctagccactgaacttaatgtagagtcttcagttacctagaggttgtggtacagcacctaaactccacttctcatttggagtaagattcggcagttcttactgtctgcttgttggagtacatgtgacaagaaaagagatctgtatgtattttgttcttctttgacctgttacctaaacaagtttctgtagtaacagaatgcctgtaagtatttgatgataaatcatgagcttttcccaccaggtcatcaacatttctatataaacataatcttataactaaacaaaaagctgaattcaaaaatagacattgaaaactacaagtaagtacatgaaaacatgttcaacatcattaatcaccaaggaaacctaaaaacctcagtgtactacttcataaccgttcagatgacattgggaaggggattacaccataatgggatggaagagttatttaagggacccagtttggaaagatggaaaactctggaaatagattgtgtgctgagttattggttgcacaacagtctggataaactttatcctattgagtggtaggtaacttcaaaatgtctaaacagtaacttttgtggatgttttaccatgatgaaatttttaatgtgatcaatagcttctatttatataagaatagaaatatattaaagtaccatatttttacaaatctgttgttcactgctgatggacacttatgttatatccctcccctgggggcttcgggtaaggctgcaatgagcttgacagttacagtgcctcttgaccagagactgggactgtgtgcttgtctctgtgaaatgctgtaatacacactggcaggggaggttgctgcattgtggtcatttgttatcatttttaagtacattatagaaaaaaggagtgttgtatcaggaaaataagctgtaaaccctgttttgttttattttgttttgttttgttttgcttttagtatccagaccttgggtttggttaacacacaaaatgtttctttgttgattctttactactaaaattgagaatcttgccagtcttaaaatttcacgtgtaggaagtgaaattgttctgtgataagcctaaggagtaagggcagccattctgctcgctcccttctgaaagtgaaaagacgcttatgtggcagtagctttcagttctctgtctgtctgtcccctcctctgcttcctccctcctttttgatgtgtccagtagagagtggagatatagtcagaaatcactggtatacattttgctatgaagagggagtctatgactgaactgggaagtgatgtgtgcatttacatattcagttcaaacatcacattgatggtttcaaagcaggctttcaccagaagatgtgatttttaagttaagttgcagacagtgaaccaagtccttgtgtaaacttggaagattttaaactctcttagatattttgtggtatgactttgaaatttcacaaacaggcaagtttcaggacttttttttttttttgagtgtagaaaccatcaaactattttgaagattgttgaaattaaatagcagaggataccatgttgtacacaatggtctcattacaaattggacctttacgtttaccttgagtttaaagttctttttgttccaaaagttgtcttggtgtcttatgcttgctacccataatttaacagtctgctgatttgtttttgggttttttacttatatcacttattttaatttcacatgcttaatgatttgctcagatattttctatttacttaacaaagtagagttcactcaacttagattcaggctaaccctaaaatactataaaaattatttttcttcctcaaagctactgttaaatttggcaaagatgtgaaaggtagaaataattcattcctagcatgaatggccagcgtgtcaggcctgaaagcattcatagatttacctactacatcaaaggattacctaccactggatttggaatttgagtattcactctgatttagaaaccataggtcagagtagagaggctaatgcatggtgcttacaaagtcaaatatttcacatttgggactatcaatcagaaagcaggacgccaaatggacgcttagggcttgaggaaaagaaaaagactagacgtcctcatttgtgggtagaattgcacttcagaaaacaggtgatcctccaacaagaataggtgacctttgctcgcttctgggtaatcactgaagaaatgcttagctggccggagagtggtggcacaagcctataatacaaacactcaagagacaggggcaagtgcatctctgagtttgaggccagcctgatctatagagtgagttccaggagagccaggctacacagagagaccctgtctcaaaataccaaaaaagaaaagaaagacatgtttaaccagaaaggagggtataatcgaatcttcaagaaaaaggagactgcatgcataaggaaaaggcagcatgaagacttctggatgagtatgcttaaagtttcaaggtgaattaaaagtcccttaaaatattcttctaaattagaaatcaacatgcattcctgttcaagggccatacatacatgtttgtaacataacgggaaggaaaacttggacaatggatagacaatcatacattgcctcttgcacgttttcaaccttacttcattctagttacttcacggaagccaagagaagacgaaaaggatggacaagcatataaatttgtgtcccgatcagagatggaagcagatattaaggctgggaagtatttggagcatggggagtacgaaggaaacctgtatggaaccaagatcgactctattctcgaggttgtccagactgggcggacttgcattttggacgtcaacccacaagtgagttgcatggattccaaagctgctgttactttctagtttcctggggagttttcgtctgtgtatttaggctgtgggaagtgtgctttatctaagtagacatgtggttctctctcaacttcattatgagtccatagctagatacataaataaatgtcaatcagacaaccaaggcttgggtaaaaccatgtgactgaacctgcagaagtgcagtatttacttgatcaagtattgaaatgttatgttgggaaatgttaaacttaactcaagggtacaagattagaatacaattaagccattcccctttcacttcccagacgcacagaccagagcatcccctcactcactctcactcctggctgtcttgctcaggttcctgtcctgtacactcagcccagctgcactttcccattcagagataggtcatatctttttagtcattccggtaggccttaagtatgtataccagaagtttctagtgttttttgttttttacataaatgaaacagttttctgtagattcttgaccttttattgattaactttgcctttgacaatttcttacatgtgaataaaatattctgactgcccctctctcctgcctctctcccatcaccatcagcttccccacctcctaccagaagtagcatttccagatccctgacttgtgcttagttttacagttcctttagtttactcagggccatctgtgtgaacattgggttagaactatttgctagagctctgtagaatcacagttcgaggcagtgactcccctactccttgaatctatcagtagtgaataatttagtagtgtggcatgaggtcctgagccctcccaccaccctgactatagaagagctcattcttgtgcagacccggtccggctatccacagctattggttttcatgattgcagtcaccatgtcttactcagaagatggcattttaaagcccttcctgctatcttctggcccttaacttctgttccttttgtctgcagtgtccccaagtctcagaggggatgggtatataaatctcctgtttcaggctgagcattcacccaccacttactctcagcacctggtacagccatgagtccatccatagtcaccactgcccactagaaaagacacttctgagtaaggccaagaacagcatttatctattggtataaataaataggttcaaaaggcaatttggttctgtgttgatttatcttttttatttatgttttttaaaatctttccatctttttctgtgtagttatttttttattattatttgtaggtgctgtgcagtatgaattttgtagtatgaatgaatattcagtaagagaatcctacagttaacagattatgtatctggctcactaaattttataccttctttaagaggacaaaagagggctggtgagatggctcagtgggtaagagcacccgactgctcttccgaaggtccgaagttcaaatcccagcaaccacatggtggctcacaaccatccagcatgaaatctgactccctcttctggagtgtctgaagacagctacagtgtacttacatataataaaaaataaataaatctaaaaaaaaaaagaggacaaaagagcaatgacacttgattttacaacaaaataaatgggttggcatactgtgtgaagttaggacagggagcgcaggcagtaagttatgtccgtaagctcaggaagaaacagatagacttcaatttatactaaggaccagcacactgcacattctaacattatataaatactctttgcacaggcactgaaagtgttaaggacttctgaattcatgccttatgtggtgtttattgctgctccagagctagagaccttgcgtgccatgcacaaggctgtggtggatgcgggaatcaccaccaagcttttgacggtaggcggctctttccatgttaacaccttttattttcccttttcttttgagagtgcttaatcccatctagtcatgcttaggaagtcactgctctctgtaaagtacaacagaaggaaaattgacttactagatgtactttaggattttaaacaatttttttttgtaatccttttgtctcttaatttaaaacagaaccgattttcttttataaaatgaaaagaaccagtgctggagcatgtacactgtggccttcccgtctcatccctgtgcactcctgcacactgtggccttcccgtctcatccctgtgcactcctgtacactgtggccttcccgtctcatccctgtgcgctcctgcgcactgtggccttcccgtctcatccctgtgcgctcctgcgcactgtggccttcccgtctcatccctgtgcgctcctgcgcactgtggccttcccgtctcatccctgtgcgctcctgcgcactgtggccttcccgtctcatccctgtgcgctcctgcacactgtggccttcccgtctcatccctgtgcactcctgggcctttcttgattccttgtttcttaatgtaactgccgtttgctcagtcttctagtcactctgttggaagtagatcgtttaaaagtttttctacctaagtatgttctcttctaaagtacctacatgttgcaagtgttctatttgttcttcgtctgtcttttctaccaaaaagcaggagccctttctgttttattgttatctactgattccgaaactttgcaaacatgagtaggatcccagttcatatgggtagagctccatgtgaaggggatacttgtgggagtgtatggcaagcttcccttgctcgtgcagaagccctcactcaggtgctccacccactcggttgttccagaccagttggtagtacttggtgggatgcagacagcaactccacagaaataaagctggagtctatggggtgtatctggcacaacttagagttttcacatcacactgttaagattctctgtctttctaaatgaagggggtaaattggctttgagttgaacagccaatacaagtgggggtccagaatttatacagaccgtataagataacacctatttggaaaggattatatagaagtcagctagaaatcaactacctgtcttgtcttagactcaccttaatagtgttaggaatttcactctacagctaccaaaacagaatgtacagaatattcataagccatggaagtagatggaaagatgcaacaggtacagatatctggtaatacctccttcggcactatataggatagatttttaagaactcgtatctgaattccaacagatatcaacgcccttatttcttaatccactttagatctgaacaaatcagtatttatcaccatgcaaacttcttttttttaaaccttcacaggactctgacttgaagaaaacagtggatgaaagtgcccgaattcagagagcatacaaccactactttgatttgatcatcgtaaatgacaatctagacaaagcctttgagaaactacaaactgccattgagaaactgaggatggagccacagtgggtcccaattagctgggtgtactgatgattcaataaggttaacaacagataaataaaactttaaaacagtgactcaacaagtcagccttctgctgggcgagcacatgcagaggtggaaggcgcctgcgcatcaaggcatttttattgtgtagattgaaataacagtgcactaggtggaatttttatatatttgtggttgggaaggtgtactaatatataatttctcttaatttttctaactttttatggataaaacctttctattcataccacataaagaaatgcgttcaagcattttgtaagttttgatttagtacccttgctttttcatcaaaggaattttcagatcattctctcaaacattgatctcacattttcactgtgataatgaatacttgaaatagttttgtaatgctgtcattcttgtaagtggttagtgaagggtcaattattctcttattagaaaaaaatagttattgaccttcctcagactccttacagaagcagaatttagatatcagtgcaacggctaagtccactactatcttaatctgctcagtgccacctcttagtccagagtatggcggctgctcattctatttgtaagataaatccacccccaccccaccccactcccatctctctctagtcaacacaatgaagagcaatagcttgcactctctatgggattattttcatttgtcgcagtgatgtgctgatgccgactaatgttgcatattagctatggagctcgggtggaagcatggtcatgcacacagagagtgccttatcctgcaaacttaacttagagaacatttacttattttcaaatataaaatttcaaacctattacttcagttttgttttttaagaatagtcagcaaaaatatgcctgtgcaaatgtttgtgatatttaaagatgtctctaagctgcaagctgtttgttaatcatcagatgtgatttctgaaacaggaagtgatttgttagggtatttgttctctgttatgtcaaaaaccaaatccattgaacagtttacaagatttggaaataattgccagctattcatatatatacacacctgatactcattatgtaatatatactatataatgttctatattcttcagatttctgttaagaagtacactttttttttagggttaggaactgcattgacacagcgcactgatttccagtcaccttggttgatgccctcctctaggatccctgaatggtacctgttcctccataaacactggcactcagtgacgcagctcgctgaacttagacagcctagtttatactgctgccagggtttctttctttcttttcttttttttttttttttttttttttgtttttcgagacagggtttctctgtattgccctggctgtcctggaactcactctgtagaccaggctgacctcgaactcagaaatccgcctgcctctgcctcccgagtgctggcgtgcgccaccactgcccggctgctgccagtttttcaccgtcagaagagtcatacttgaaagggtttggtgcttaaatattgatgagtgtctttggtgacagtcgatagacacctgacttctgattttggctttccccttatcagagttatacatccatctatatgaagattgatttagctatacatagacatgcatataaaggtacttatatatggtaagaagcaatattatacattgctttaaattactttcataataaaacacctaagttaccgtattgtaatagtggtaatctgcaggcttttacattttaattctagaatttcatagccaaaattatttttctttctttttttcttttcttttctttttttctttccttttttttttttttttttttttttttttttggtggggagggagcagcaaagtgttaacaaagtggaccatacacttaataactttgtaaactacatgtatttgctaaaactcatggattctcattgtaacatgagtcagagcacagtatttgcatgacaccttataacttagtgtttcagcacactgtaatgtaagcttgcagagaaagttcagttctgtgctcacaggaaatgttccatattccccagtgtaccttcatgctgtcttatgaagcctttctcagctgctttggaaaaattttatcagcagagcagtctatccactcagtatttctaccatctgggtccaacagaaacaatagctacatatctttctcatgttaaatataaaaatgcataatgtctagagtatcatctgtatttaacattgtttctgttataaatggtactcatgagccatcaacatagctacattagatttctcctaatggaatgatagttttgctcactataatataaatgccaatattaagaaaatacaactgtttctcagtgaaaaatcaccaaatttgaaactcaagttcccatctgagtctatagaaaccatcaggcctgacaaaaagattcttcctagatgacatgatcaaggaaatttatacttctctcatggggagagtctaacataacagactcatttataatagctttactgaagatgaaagggcatacagtggtgttcaataattggtactatgtaaaaaaatgtacacacacatgcatgagctttgggaagacacacgtgtatccataagtatactaaaagatgagtgtccatattcagcgttgagggcatggttatttctttataactaatggttacatgtattatttcattttcaaatgtgcaaatgcctgtagaaatgatgtctctgaacaagtcatttaaccttaggcaatggagtatatttactgccctacagtagagttttcaccttcagtcttacagtgcttttactgtacagtctccatttctgttttttagttaatatctgatgtcaaatacagcaaaagtgtttgtttttgtctgacttgatataattgctgaccatagctttctgaaatagatatcatcataaaccaaataggactaagccctagattccagagtctggtaatttataataagtttaaaacacttcttttaaaatgacaaattgattattaaaacttatttagaaaatagctcaagatagcagtaaaatccagtagtaggacgttgattatggccaggtactaacctggccaaaatgctgatgatgccaggcctagtagtgcaggcacctaggaggccgacggaggaggagagcaagctggagtctagcctgggtaacatagcaagaccccggctcaaaacaaaacagaacagggcccagggctattgttgtcagagtatgtacctagcacatatgagatccgggcaacacaagaaatgatcctaactccaaaacaatacttagttttatatatatcaagtatcatgattcagtgattgagcttagctgtcaaggccacagaattagttataattattttaaatgagtaaattgaaaatgtagagagtttgaaacagttctccattatacagaattacagagttgagggtcctacctccatagcaactaatctttacactaaataaggaaaaggcagttctgaagtatgtgtacataaatagttcattttgtaaaaacgtgtgtgtatggatatccatacacacacacacaaagctacatgtataatacgtagcattcttccaaaatttatgaataataaagctagatatatttgcccacatgttacagctagtattctaagatctttgattactttcagatttgtagatattctggccctatatgaggttctcttaagaggctttggctccaccttggagctgacactaattccctttctgaatattctgtttattagagaaactaagttcagaaaattgttacttactattagaatttaattttctttttaacaaaaaacagatttttgcatggaggcctcttgggaaatatttccttaaattttccagtgaaaaatttttgatatgatttagacttaaagattacagtgcctgccctcctcttgttccaagggatttgctgtgagaattcttataacatctgtaatgtatttggagttcttgggagaaatttagtattttaaataatgagattattgtatataactgaatatacacagattttttaagaatacatttgatgaaaaattcagcatcatattggtctttctgtaagtatatgtgatatacctgaagaagatgataattctctaattgtttaaggtaaggttatttttaaattgtatttttgttttagcttttaaagttatattcttttaaaaatatttatcatatttccatcttactactttgaatcctggagtaacttttgaaaaactcaaagaattaacacatccttagtggactaaaaaatgagagactagccgggtgcaagtggcacacacctttatccgagcacttgggaggcagaggaggtgggtctctgagttcaaggccagcctggtctacagatcaggttctggggtagccggaactgttgcacagagaaactccgtctttggagagaaaagtgcgatcatgatgcttttctaaggtaagcacggtgggtttgtaccacttgggcaaacactacaagaatgtcttaaaagtcatcttgtgtgataagagtaaaagtggtttctctgcttctgatgaccagcatcccactgctggctgatttaataacatttactctccctttaccttctgtatgttaagtagggctaaggtaagacttgtcttcatcttaaactctgaggaggaactgattgtgcttcgatgataaggctttgagactacttaaatgtgttctcttacccaaggttgtttctccttcagtccctgtaaagtcgcctcattctgaggtgaaatagcagatgctgagctgttctggaatccatgcccagggttaagagagctccgtgatgtggctgcagtctggaaggcagtctggtctgcctgtcagtggtcctaatctaggagccctgttaaatcctcttccaagtccctcgctgaccaggccattgaaatcctctggcatcagagtacatcagcgtagactgatcttagcactctgaaattgacagtacaacctggattttacccatagtgcgaggctctatacgcacctatctcttaattagaaaaaatgcagttaggtccaattaatgtaccccaaaatctagaaaatacctctttctcgttctgattgcttactggcttatggctagtaacctgtgctgggataacaagcagccacgggacacaggtcagaatggccatttttcccatactttgttgttggttttttttttaatcactcacataaactgaattaacacatcagtagttaaggtaaacgccacttataacttggaagctgaatgcttcttatatataaaatactgctttttatgtctcctgaaataactgttcttactcccgtggagcttaagcccaggactttgcctctacagagcatgctccattactgagcagtagtcccagctttcatttcaaaagtcagaaatcattgtttttattgtaactgagccaaaggcaaaccataaataggcaacatataaatgtgataggccatacctcagatttactagtcaaggtggcctgagaacttggaaggagtttattatgctttccctaataaaaggacagaaacttaatggcaggtatgatggctgtcaccctgagtcaccttaaaactaagtaagaaacttaaaactagaaagaggaaaggaagtgttgggaagtgttcagcagaggaggacgggacctagaggcagatggagcactttgcaagtctgctgtacacaaggccctaggcatatgccagaacctcagaaacaaaaatccccatcagctatattaagccagacgccattaccaactaagacatggttacatcttatgtaagagagctggttagttgtaacactgctagtaagcatagtccaagtgagaaatactttagtctttcaggcagaaccagtttgatgctgtcctgttaaagaacaaacatgactttccagagaaatcactctgagcacatcaaaattaatagaggaaaaactttaatgataacatgtgcctgataacatgaccacaaaagggagtggcctcagtcaaggttttcccagtgtatacaggccttaggcctatacattccgtgtgtgctgccacccttaactctccttcaggtcctgaccgcagagctggggggcagctgggagattgatatagcaacgccatgacagtgttgatctgttggctggttgttccccagggtcatctttctcactctgcagaattaatgctttccctagtaaaaggacagaaacttcatggcagatatgatggctgtcaccctgtaccacttccttgagtcaccttagagacaagtattctgatatgggaataggcttaacggccacttagtcctggtagacaggttcaacagttttaaacttgagttgtgtttgaggaacaaactaacaagcctggttagcacactgcttattttcgagttctgaggaggcattgctcccttagctaagtcctactttgtgtaacttactttctactaagcaactttattagtaaatcctttataacattaatgctatttcatggttctgttacatatctgaacatgaaatgcaaatttcactgtatgtcatcttaaaagaagtgatgctggctcctgtttcgtccataaccctgacttcctacaaaagaaggagcaatagttaacgttgctgttgctatgatgaaacaccatggccaaggcgacttgttaatgaaagagcttgacttacatttccacatcacagttcatcatcagctaggctaagaactcaaacagggcaggaacctggaggcaagagctgatgccgaggccatggaggagtgctgcttactggcttgattacatggcttgctcaacctatcagcctgcttacttttagacaccagggccaccagcctggggataactgcccataaagagctgggtcctcccccatcattcagtaatgctctaccagcttgcctgctgcccactcttacagaggcattttcttaattggggttctctcctcagatgtctgtgtcaagttgacataaagttaacacaatgttcagcaacaaatgaaaatttctgcaggttcttttgaatagcccacaagtagcatttgctgtgagtgacttgctgtgggaaattttagcacccgcccagttcattatcatatgcctttcctcctggctgttagaacctagtagaaacacatgcttttctctttctttcttttttttttttttttaaacctcaccctctgaagtgacagtaaggagttttcagtagaagacagctggccaagctgctctagtaactttctgatgaaaagctttaaaagtaaaagttaagcatcctgccttcagagcatcagcgttagtagtttctgcaaggagagccatcactgctgccccgggtgttaatctccgataaggtagtgtgggctggtttttcagaaattcactataaatcttagaacatatttccagatatagcttaaaatcatagcaatgttcactttgaaatcgcacattcctggtaaaatacttttgagtgtataaagaaatacttgctgttgagaaagttgaagtgctttgtttataggtagacctaagagataaaactgcagggtatcacattaacgttggttaaaagattttttttaagtccctgatgtaattttcttccacataaataaattttcatctgcctctacttttcagcagggcttccctgtgcttttgtttctatcccagcagagatttgttgatgccttttgttgtaaaggttctcagaattgggaagattaaaatacagaatcaagaaacagagactctgtttagacagcatgagtcactatagccactccccatgtgtccaggaaagagaaaccatgtgtttcatcaagcatacctgttggttgcattttacaccgggcctgcaggaagaaggcagactcattaaaatgtggctttgtgtagaggaagcctttccagagccctttgtaattctcccatgcaggctcttaggatcccataactcaaattcaggaacatgctactaaagaaagactttagagtctttctgatgtcttcaggagaatggtttatttttattatttgtgtgtgcccacacatgcacatagaggctagaggcatcttcctctatgctttccaggtattattatttttccagacaagttttctgactgcaactgaagctctctggttggcttctggtaagccagcaaacccacacgtggccctgtctgccttcggtgctggtagcgcttatgtgatcctgatgctcggttctccacgggtgctggggacgcagtgcaggctctcatgcttgtacaacaagcacataccctactgagcagtctccgcagacctgttattagacgcgttctcacgaccggccaggaagaacaccacagaccagaatcttctgcggcaaagctttatttcttacatcttcaggagcaagcgtgtaagaagcaagagagcaagaagcaagagagcaagaagcaagagagcaagaagcaagagagagagaaaacgaaaccccgtccctcttaaggagcattctccttcgcctcggacgtgtcactccctgattggctgcagcccatcggccgagttgacgtcacggggaaggcagagcacaagtagtcataagatacccttggcacatgcgcagattatttgtttaccacttagaacacagctgtcagcgccatcttgtaacggcgaatgtgggcgcggctcccaacatctccccctttttcttttaataagagcaaataggccacccatattaatgagagtggagatagaggtcaaatccccagtgtgtaggtaaaggagccatgtacaggattagctcttaggctcacaggcttttacccagagcaaccctgacctgctcccgtgtcgttttgcctgggggaagggaactaggacactgaaccttcatgaaagatgacatgtctccctagaataggctcatatatgccgcagagcctttccattgcagtgcttagccttgcaactctctcgggctgctgaagcacactcactctatcccgtgcaatgagtctagcctcatgggatataagagctgagtggccagcgacctattgcctaagcatagataaccatatatcagggggagctccatgttctagtcctgcaagcgcctgggcaataaccaccttgtctctccctagtttaggccttaagcttacagaccaatcaaagaagcaaca

SEQ ID NO: 481 - DNA, 2160 bp, Mus musculus
agcgcgccccggcggcgacggcgggagcggagcggctgagagaggctggccgcgcgggccggcgggcagcggcagcgcccggagccgggcgaagggcgaggccggcggggacggcggaagtcgcccgcccgaccgcgagcccctgagtcggtagatggggctgcgcggcgcccgcgactgatgagtggagcggcggcgcggaggcggccgaggtgcgagccgtaacacaaggcacattaacatcaggaagaagtctatgagaagacctcaaagcttcacacgaaatcgaaatgcagcaagttttggaaaaccttacagagctgccctcatctacaggagcagaggagatagacctaattttcctcaaggggattatggagaatcctattgtgaagtcacttgctaaggctcatgagagacttgaagattcaaagttagaagctgtgagtgacaataacttggaattagtgaatgaaattcttgaagatatcactcctctgattagtgtggatgaaaatgtggcagagctagttgggatactcaaggagcctcacttccagtcgctcctggaggcccatgatattgtggcatcaaagtgttatgattcgcctccttccagcccagaaatgaatattccttctctcaataatcaattgccagtagatgccatccgtattctcggtattcacaaaaaagctggagagccattgggtgtaacatttagagttgaaaataatgatctggtaatcgcccgaatccttcatggaggaatgatagatcgacaaggtctgcttcacgtgggagatatcattaaggaagtcaatggtcatgaggttggaaacaatccaaaggaattacaagaattattgaaaaatattagtggaagtgtcaccctaaaaattttaccaagttacagagatactattactcctcagcaggtatttgtcaagtgtcattttgattataatccattcaatgataacctgataccctgcaaagaagcaggactaaaattttccaaaggagaaattcttcagattgtaaacagagaagacccaaattggtggcaggctagccatgtgaaagagggaggaagtgctggtctgattccaagccagttcctggaagagaagagaaaggcatttgttcgccgagactgggacaattcaggacccttttgtggaactataagcaacaagaaaaagaaaaagatgatgtacctcacaaccaggaatgcagagtttgatcgtcatgaaattcagatctatgaggaagtagcaaaaatgccacccttccaacggaaaacgttagttttgatcggagctcaaggtgtgggcagaaggagcttgaaaaacaggttcatagtactgaatcctgctagatttggaacaacggtgccatttacttcacggaagccaagagaagacgaaaaggatggacaagcatataaatttgtgtcccgatcagagatggaagcagatattaaggctgggaagtatttggagcatggggagtacgaaggaaacctgtatggaaccaagatcgactctattctcgaggttgtccagactgggcggacttgcattttggacgtcaacccacaagcactgaaagtgttaaggacttctgaattcatgccttatgtggtgtttattgctgctccagagctagagaccttgcgtgccatgcacaaggctgtggtggatgcgggaatcaccaccaagcttttgacggactctgacttgaagaaaacagtggatgaaagtgcccgaattcagagagcatacaaccactactttgatttgatcatcgtaaatgacaatctagacaaagcctttgagaaactacaaactgccattgagaaactgaggatggagccacagtgggtcccaattagctgggtgtactgatgattcaataaggttaacaacagataaataaaactttaaaacagtgactcaacaagtcagccttctgctgggcgagcacatgcagaggtggaaggcgcctgcgcatcaaggcatttttattgtgtagattgaaataacagtgcactaggtggaatttttatatatttgtggttgggaaggtgtactaatatataatttctcttaatttttctaactttttatggataaaacctttctattcataccacat

SEQ ID NO: 482 - protein, 535 aa, Mus musculus
MQQVLENLTELPSSTGAEEIDLIFLKGIMENPIVKSLAKAHERLEDSKLEAVSDNNLELVNEIDITPLISVDENVAELVGILKEPHFQSLLEAHDIVASKCYDSPPSSPEMNIPSLNNQLPVDAIRILGIHKKAGEPLGVTFRVENNDLVIARILHGGMIDRQGLLHVGDIIKEVNGHEVGNNPKELQELLKNISGSVTLKILPSYRDTITPQQVFVKCHFDYNPFNDNLIPCKEAGLKFSKGEILQIVNREDPNWWQASHVKEGGSAGLIPSQFLEEKRKAFVRRDWDNSGPFCGTISNKKKKKMMYLTTRNAEFDRHEIQIYEEVAKMPPFQRKTLVLIGAQGVGRRSLKNRFIVLNPARFGTTVPFTSRKPREDEKDGQAYKFVSRSEMEADIKAGKYLEHGEYEGNLYGTKIDSIVVQTGRTCILDVNPQALKVLRTSEFMPYVVFIAAPELETLRAMHKAVVDAGITTKLLTDSDLKKTVDESARIQRAYNHYFDLIIVNDNLDKAFEKLQTAIEKLRMEPQWVPISWVY

SEQ ID NO: 483 - DNA, 2202 bp, Mus musculus
agcgcgccccggcggcgacggcgggagcggagcggctgagagaggctggccgcgcgggccggcgggcagcggcagcgcccggagccgggcgaagggcgaggccggcggggacggcggaagtcgcccgcccgaccgcgagcccctgagtcggtagatggggctgcgcggcgcccgcgactgatgagtggagcggcggcgcggaggcggccgaggtgcgagccgtaacacaaggcacattaacatcaggaagaagtctatgagaagacctcaaagcttcacacgaaatcgaaatgcagcaagttttggaaaaccttacagagctgccctcatctacaggagcagaggagatagacctaattttcctcaaggggattatggagaatcctattgtgaagtcacttgctaaggctcatgagagacttgaagattcaaagttagaagctgtgagtgacaataacttggaattagtgaatgaaattcttgaagatatcactcctctgattagtgtggatgaaaatgtggcagagctagttgggatactcaaggagcctcacttccagtcgctcctggaggcccatgatattgtggcatcaaagtgttatgattcgcctccttccagcccagaaatgaatattccttctctcaataatcaattgccagtagatgccatccgtattctcggtattcacaaaaaagctggagagccattgggtgtaacatttagagttgaaaataatgatctggtaatcgcccgaatccttcatggaggaatgatagatcgacaaggtctgcttcacgtgggagatatcattaaggaagtcaatggtcatgaggttggaaacaatccaaaggaattacaagaattattgaaaaatattagtggaagtgtcaccctaaaaattttaccaagttacagagatactattactcctcagcagagttacgtcaatatggagaggcacccagcccacgtccgtcaggtatttgtcaagtgtcattttgattataatccattcaatgataacctgataccctgcaaagaagcaggactaaaattttccaaaggagaaattcttcagattgtaaacagagaagacccaaattggtggcaggctagccatgtgaaagagggaggaagtgctggtctgattccaagccagttcctggaagagaagagaaaggcatttgttcgccgagactgggacaattcaggacccttttgtggaactataagcaacaagaaaaagaaaaagatgatgtacctcacaaccaggaatgcagagtttgatcgtcatgaaattcagatctatgaggaagtagcaaaaatgccacccttccaacggaaaacgttagttttgatcggagctcaaggtgtgggcagaaggagcttgaaaaacaggttcatagtactgaatcctgctagatttggaacaacggtgccatttacttcacggaagccaagagaagacgaaaaggatggacaagcatataaatttgtgtcccgatcagagatggaagcagatattaaggctgggaagtatttggagcatggggagtacgaaggaaacctgtatggaaccaagatcgactctattctcgaggttgtccagactgggcggacttgcattttggacgtcaacccacaagcactgaaagtgttaaggacttctgaattcatgccttatgtggtgtttattgctgctccagagctagagaccttgcgtgccatgcacaaggctgtggtggatgcgggaatcaccaccaagcttttgacggactctgacttgaagaaaacagtggatgaaagtgcccgaattcagagagcatacaaccactactttgatttgatcatcgtaaatgacaatctagacaaagcctttgagaaactacaaactgccattgagaaactgaggatggagccacagtgggtcccaattagctgggtgtactgatgattcaataaggttaacaacagataaataaaactttaaaacagtgactcaacaagtcagccttctgctgggcgagcacatgcagaggtggaaggcgcctgcgcatcaaggcatttttattgtgtagattgaaataacagtgcactaggtggaatttttatatatttgtggttgggaaggtgtactaatatataatttctcttaatttttctaactttttatggataaaacctttctattcataccacat

SEQ ID NO: 484 - protein, 549 aa, Mus musculus
MQQVLENLTELPSSTGAEEIDLIFLKGIMENPIVKSLAKAHERLEDSKLEAVSDNNLELVNEIDITPLISVDENVAELVGILKEPHFQSLLEAHDIVASKCYDSPPSSPEMNIPSLNNQLPVDAIRILGIHKKAGEPLGVTFRVENNDLVIARILHGGMIDRQGLLHVGDIIKEVNGHEVGNNPKELQELLKNISGSVTLKILPSYRDTITPQQSYVNMERHPAHVRQVFVKCHFDYNPFNDNLIPCKEAGLKFSKGEILQIVNREDPNWWQASHVKEGGSAGLIPSQFLEEKRKAFVRRDWDNSGPFCGTISNKKKKKMMYLTTRNAEFDRHEIQIYEEVAKMPPFQRKTLVLIGAQGVGRRSLKNRFIVLNPARFGTTVPFTSRKPREDEKDGQAYKFVSRSEMEADIKAGKYLEHGEYEGNLYGTKIDSIVVQTGRTCILDVNPQALKVLRTSEFMPYVVFIAAPELETLRAMHKAVVDAGITTKLLTDSDLKKTVDESARIQRAYNHYFDLIIVNDNLDKAFEKLQTAIEKLRMEPQWVPISWVY

SEQ ID NO: 485 - DNA, 134342 bp, Homo sapiens
agtctagcacagtacatagaacatagttgttattcaataagtaattttagtttgttggggattgaaaataattcccctgtgctgggatagtaagtgagtttggcattcctattatttgctcccacagcagcctgaactttccctattagagcaccagtattgaatctaatatacttgtgtcattgtctccccatctagactctgagctctgtgaggacaagaatcatgtctgtctctgtcatctttgtaacctagttcccagcccgttatctgccataggtattaggtgcttgaaatcaatattagttgaattgttaatttagaaagcacctacctagtggtaggattcctttcctttcgaagaaaggaattgaagtcaggtcttatgctcataagtagcccacaccctagttgggatgaaaaagtcatgggatggtatttctaaagcaatacatagtcaaatcagttatacagtaacatctcacaaaaccttaccactttttctctctgtagaatcccattaagaatataatatgaaaaaacattgccacaattttactaatattctttaagcatactaagatatgcttaagatgtaagaagaaaatgaaaaacatcaaacccataatgatatgcaaatgatattgatctaatcagtcatgtttgctatcataaagaagtccacatgattacaaaatatttcacatattgtgtgagcattattatagtgtacatcatcatcattaaacacccatctgtgtaaggcaccctggtaagtaccatgaaaaagactttaattaaaacaagttaaatccctacactttaggaatcaaatttactcaaataatcctctctgctcaaaaaaagaagttccctaatactttaagttttaaatttaaagaagaataatttgagcggctggatcctatcccagtgacactttcattaaccttcataaatcatcgagtgtaaaaagatgaatcctaaagaacactgattcaaccaagcttacatttgtcatttattaatttaaactggatttagttacttatgtttatactaacttttaggtattctttgtatatgaagactctgaacactttgccatgactcaactttatttctaaacttattatttaattttcaattttaattatggtatctcttttccaaaaaaattcatctagtcacagtttttagtccttcaattatagtttctatcttgatataatggtgtatttctcttttagatttaaatctttagttcaactggaatttattttctgaatggtaattttaacacgttttgctaattatcttcacactatttatttagtgatccaaactttttctaccaattaaaaataatcacttttgcattcctaaatttccatatacacatgggtctatttcatgactactttatttcattaatctattctttctctagtactctacatttaaattgctttggccttatattccaatttttggtatggtacatttttgtttcaattgtgaatgtgatattttctttttcagtctagttttctatctagctatcatatatacaaaaaaaccaattgcattttataaattttgattagatctaccaaatctttctttttattatttattatttattttagttgattatcttgggtcttctagagagacaatttcatcatcagtaaataatgataactttatctctcccttccaatattaataccatatctcttacttatctcttttctttcttatcttattgtactggctagaccttccagatcaaggcttagcaatagtagataaaatggaaactttgtcctttttgggaggaaagataatttaattaagagcattcttagcttataattatgcaccaaagtaaattagcaaatgactatttgctgtcctacaactacacttttgtgaaaataataatagtaattacactcttctctgaaaaagcaactatatcaggcatttgataggtttaattaataattcttaaaacaccctgcaaggtaggcctattatactcattttgcatttgagaaaagaaagattcttatatactgaaaaacattcctaaggttactcagctcatacgtggtaaatctagtagaacttagagttatctgattctaaactcttcttttgtaccgtattacttgcactatataaatactattatgatttaattctgatacatacaaatggatctgtctcattggtcaattggtatagggttgcaatgatatacttaatatatcttaggtattcaacttgtgagaattataatactgactttgaatgacagaaattataattattactcttaatttaaaaatagaattaatcaaataaatattaagtacctacaatatgtcagtgtcttcataattatttacctaactatatcatttaataatatacaggttgagcatccctaatctgaaaatctgaaacttcctcaatgccaacatgatgctacaagtgaaaaattccacatataagtacttaacacaaatgttattttatgcataaaattattttaaatatcatataaaattacctcagactatgtgtataaggtgtatgtgaaacataaataaatttcatgttcagacttgggtcccatccccaagatatctcattacgtatttgcaaatattcccaaatcccaaaaaatctgaaatctgaaacacttttggtcccaagcatttcagataatggatcgtcaacttgtattgattagactgtgacttagcatttcataaaggtatagcttctgccccaaataaatcatctataagtcagaactctattggtgacaagtgatggaaactcaactcaaattatcttaaatttaaaaaggtctcatgaatttatgtaaccagaaaagtctagaattaaggctggcctcaggcatgactaaatcttcccttttttgagattctcaaagtgttgatttgaaaagagaaaaaaaaccaaattatctttcttcctactgcagtacagaaaaatccaaaattttctttatttaggtaacatgtctacttcttgcactaatccctatggctgaagggatggggcactcttattggccaggcctgggtcacatggccactcttgtaatttaagaatatggggaggatatggtgattagtagtcccaccagaatctaatgcaaaatagatagcctttccacaaatgctacattgttaaaatacacacatacagtaagtctgtagatcgtggtggtgaatctgagttaaataacatgctacagagaacctctaattgtggtaactcgtactataattcattccagttgaattgacctgaaagttacaaagcactctgtgtatgaagtgtgggaatgagcaggagttttgcagcagagcttctttaaacacttcctggttctgaagcctgagccattaactcctcttcacttgttttctcatctgaaaaatgggagtaatagtaatgatccccatgggatgctccatatgaaggttatacaccagtgtctgccacacaggcatgagctcaatagatagttgtcattcgctattattaccaaagcaggattttttaaaaagacttggtctttcatatttataaacagctgatattttaaggaaaaactaaatgccctgtacttcctagcatgaagatggcattgctttaaaatgggccattaacttcccagattgttaacagccaaaacagcttgccatggctgccccgactcatacacatacaccccgacttccatcattgcttccacgtcccttatcctatccatctttcattcatttatttaccaaaaatgtcttaagagcctactatgcatcttaatgacttgctcttaccctcacgacttctcctcagtcctttggaggagcatcggcctcacagtttgaccctttgtttttatgtttaatcaccattgacaccctttttgcctgtcatgccagaagattcttccagaagacctccactgccctccaggacttcgtgcctgtctgtgttttcaatggggaaaggtacacactatactgacactatatatttttacaaatttttaagaaaggtttttcctgttttcctatgtctttttaatcttctttttgatacttgagtagaaggatttttttttcagttcatatatataatgggagaggtagaatttagaggccgattttaaatgagtatctaaaagggttaattacatatagatgctggctcctggtgagataaagtcaagctcaattaaggtcactgcttgaaatctgattgtctttctaagagcttttcatctgtaacttgcatattctggaacaagtgttcaattgtaattagcaacatttttcacttaattttatttaattttagaagtctaccaactaacaggtttatctgtttcaataaatgagcagctactatgtgcagtactatgccaagtgctacaggcattcctgtacacatcaccctggattttacctgcaagaaagaaggggatggggctgagtggcggtaaaaagaatgcaaagataaatatttgaaaacataaatgatgcttttatgaagcagaataggaaaggagccataagatgcaattaaagtgctacaggagttcaaaggagagcaattacactagtcccttcttatccaagagggcatccattccaagccccccagtgaatacctgaaaccatggatagtactgcactgtacatattttatatatatatatatatatatatatatgtactatggtttgtagacatacatacctatgataaagtttttaatttatacattaggcacgttaagagattaacaataactaataataaaatagaacaattataacaatataccttcataaaagttacgtgaacatagtgtctctctttctcaaaatatcttatcatactgtactgaggaaaactgaaaccttggaaagtgaaaccatgaataaggggggactgggggactactgtacctctgtttgaggtgaggcagaaagggtttcatggaaaaggagggtgtgagatgagcacacatgcttggattttggccagcagagatggcagaaggcaaaaacaggggtagaaacataaagatacaagatatgactaactagaatatccaaacagggaagctttgactgtcattgtgaatgaccttgtaaatggggtcccgtaggcagtaaggagacagggataaaatgactggcacctggcagtcagggcaaggaggccctgaggcagggagatgagttaggagactctgtaggactaaagcaaataaacaagagaatccattcctataattttgagaaagtgggctgcaagggatttgagtatgtgtttgttcaggagatggtaaaaggaggtaaaggaaaggaaggtgccagaaaaaccagcaggagcaaccccgtgaatagcttatctagatggaaattttcaacagcgagttgaaaatatgcctcaagggagaatagatacagatgtggaagcattggtgctagagtcctaaggatccctgggattctcaagataaacagtactatctgctctttttaagtttctcctcaaaaatttatttcattcttagtggaacatttttctttaggaagtaggaggagataacacagcaaagtaagggtcagagatggaacagtcagagaggtcgaaagagctcccaggtggtatggtatcagagaagttaaaggaaaagagaggtttagagagtgagagtacgagagattaacctcctcaaacactgcagagaagttcaatggcatgaacactaagcaaagaccttccccactaattctgtcatatactattaagacacctggcatagcacttattatgtaatattttgcttattattcttcgccattaggtagggactacttgatattgttaatttttttattttcattatgcttcactagtaaatgagtgactgaatggatgaacacatgaatgaaaatgttaattgtgatggaaatagtagtttcagcagagaagtgggtgtggaagcccaattccaatgcctaaaataaacaaataatggtaagaaaagtcaaggagatatgctgagatatatagttttcttttttaaggaaaaaccaaacaaccccaaaactcaagttcttataatgtttggctttaattgtgatgattaaaaaaaaaaaaagaactgccatcgtatcaggaaatgttttttcagacagctagtttagaggagaaagttctgctaagacatttctgtttgagacagttgacccagtgggacttttggaaagatttagattataagaaaagcctctgacaaatatctatgaaagcaagattaaaacaataatgtacacaatcaactgaggtccagcggtttgtaaaccagtgccagtcgggatgctcagagctgggaacggtgatcttcaggcagccaggtgagactaatctggagaagctttaggaaggagataaatttaagctgttttgaaaggggactattctagtcaattggcaaagagtcttaaagcacaggattaggaattttaatttgattactcgaggtaatttggagctaccccactgttgtgaagatttggtataaatgttgtttggaagatgattcatttccatagttcttaactctggctgcgtattagagttatctggagagctctgaaaaaatcctggcacccaggctgtgctccagagcaattaagtctgggatggcatcaaagcatcagtgctttgttttgtttcttaaagttctctgggtgatttcaataaagagccaaaaattaagaagcactgctctgagtataggataaattgcaaggaagcaagagagaggctagaattagaaaggttagcaaggaggctggaaattggaatctgacctagctttgtgagcagagataaaaggagtgaagctaaataaagtattctgaaggaaaacttggttggactttgtgatgcatgccagttgcatttttaaataaagctatcctccaggagtgtcactgcttttactatgatggattagttgaaaaacaagtacacaggatttgcttttgctaaaattcggggctattagcaaaattctcaatttctgtaggagcaaagcaggtcagaagagaaaagaaaatgtaatcacattaaaagtgtatgttgtttacatttgaaggaggaaacaaaattgagtgatggatgctcctgaattaagaatcaaaattcaaattttaaattgaattaccgttgggagatactgggctgtggtaaaattatgatccctttagagtaaccttgaaggaaatgaaaagtcagactattaaggacactgaagagaaagatccaccatcattctcaatcatatcattcccctttcttggaatgaagaatttgtaaccggtatgggaaatggatggtggtgtctcagtatgatgacctctcagaaagctgagttgggaaccaatgatgggagttccaatgtttaactgagaacactttaaatttatcctggcatgtcccacctttaaagtttagaggaagggcagaatgttataaaatgggaatatcatttataaaaggaaatagtgtttccttttataactgtatatgagtatttgatacaatactcatctgacactgagagaggaacttcaccggcaagagctttctgaaggggagcaatcaaagacagttattggagcaaaatcatttttctgactctaagaatgaagctgagtcttacggcagtgataagcctccatctgatagctgctgtcattacttagagcacagacttggaactgcaaatgaaagataattgttcctgtattcctgctcccaaatgctgggtctctggtagatgcagagataaagcagttggccaggagtggtgccagctttaagtcaggtaggtctgcatgtaatttgaggggcagagcctaccccaaaccctccctccctaaaacttcctcagttaacatcattctacttgcagggagcaggggtagagtaggttaggacattgtttccagaagacccttgaggaaataaaagtgcactattaaggatcactaacatatctggaaatgacattcataccctacctcccaccccaaccccagagaagctcagggcaagtaactaagtggctgggtccaaggggatgtgttaaggttaagagtcagaagggaaaagagttcacaagcctgggtagggtacagcagggaggacccatgggtgtcctgtgagaagcaagtgggcctggggcagcaagaaggacctgaaaggtcttgctgacaccccgagaagacaaaccccatccttccgctttgtctctgccttgggctccgagcccactccacttcatttcatccagccatcctgactacagggggcccaaagctactctgtgccctgggcacgtttgagtctccttaaatgcttccaattacctttgcctgggtttgtggttccaggaaagaaggttctaaattaacactgtacaaggcccccctgcatgttggtttgcaaaattaatgatcctaatggaaaagtaaattaatctttgatgcttggttgaggataaacacaaaaatcactgttttggacactggaccttcttaatacatctcatcaatagtattttctctctcccttccatgcctgccacattcacaaagagaggagacaatacaacttataacttcatctctgaatccaaagggccatgatgcacgcatttattctgcaaacacttattaatggtctggtttgtgcaaggtgcccaagagaagccaggaaaggctgcacagaggaggccacctcataacactcctcacacgtaaagtttgacttgcactttctacgttcatggtttgaaaagattgcagtaagcattttgtaaaatgtaaattacattcttcaattttaggaagaacacaatagtttttccaaaagccgcctgtcacaggtctgagggttcacagagctcttttaaggggatcggaagttctctggctgccttgctatgtttttctagccagaagtctctgctgcagtgcattgctcagttcctttcaactgaaaaattaaatctgcacttctgtcaaaatgtgtcatctacacatccggacactcatcacagttcaccaagctctacgcagagtccaggctgaaaggatggcatgccctccccaaccccacccttttgaggtctgggaagcccaggtgctggggaggagctgaacaactgtgtccagggagtgtctggcaaagccgacccagggagttccacgggagcctcggtgctatgaaaagagccagtgtccatgcatttcctcgggtgtgaatcacactgcccggtcgggcctttgggaaaaaattaatgaaggacacagtcagcgccgtagaacctgccaaatacacatcagatccagtggagtctgtgaagggggagggggagatttttccagaggcttttcttctcgttccatttctcttttgtgccccacgactgggttcttgaatgtaaaactctcagaaaggtcagggcggagcctgttttatgccccgaggagtatcttgcccacccgtaaatgctgacagacagctgcgacttcggcccaggagacccggcggggactgggtccgaccagccctctctcgcgggcgcaggtccgggacccctgaagcgagccggccgggcgcagagcgcagtcagtctgggcgctcagaagctgggagggggctccacctgggcgcccagccgcggcgggaggggcggggcccggctttccggaggcggtggcacctcctcgcgcccgagcgcgcgctccccgacgtccggcgcacgcgcgaggccggctgggagcgcgcccaagcggcggcggcggcggcggctggaggaggaggaggaggaggaggaggaggaggagggcggctgaggcgcggctggctgcgcgcgcggaggcagcggcgggggcgaccggagctggggcagagtggggagcgagggagggggaggagagagagggaggcggagggcagtgagagacgcatttccagttctcaactacgagccacgagtttgcagatggggctgctcggcggcgcctgtggctgagggagagcagcggcggcggggagcgaccgggagcggcggcagcggcggcgcggaggcggctgaggtgcgagccggtgagttaactggacccccacgccgctcgggtaacggtcgcgccgcgcgccgggccggccgggggcgccctgttgctcggcgcggcgcgccacgcggggaccctggcccgccccgcccccctcggcacctgggcttcggcgggcgcggggaagagggaccggcaggcggcggcggcggcgccgcggtcggggaggctgctggccgcccccagcccggcccgcgcggaaggggcgctcggccgggctcctgcctctctggctgcgggcggctgggcgggccggagctcggcaacgtgtctggcccatgctgcttgccgccgctccccacgcgctccccggcgcggccccgactggggctagggccgcagacgcgcggggccccttcgggcgcggggcttgggtgcctacacctctgcggcgggagtcgcggtggagcctgaatggagagccggcctgggggcggcgttgctgtgactgacacctccggggtctgtcccgagagggggtgattccgccggctcccggttctctcccgagctcggagttggtaggggaggaggctttctccaactaccgccgctacttccgaggtacgagactccagttgtttggccaaagtggctgtgggccgagcacaggctgccgcgggggcgttcgctgctgagatcgtgctcgcggattctcggtacgtttgtctgaaaccaaataggtgctggggcttttttattttggctgggtggagggtcagcaggggagtcgattgaggtatccgaccgtgtggtgacaggatgtggattggttggtagatgtttttttgcagaaggactttttaacactttactgggagtttattctcaatcctaccagtttctgggattgcagctcgagattacatttgttaaacttccatcagttgggtgtgcatctgtgtagggggtgggggtgaagcgagggagagaattgaagactgccggggaagctcagaaaattctccgcattacttataaacagccgggtaaggtcaggctagccacgttttattctttcctacgcctttggagagtgttggaattttactttgtgcttcaagtatattacaagtggtcttgtagtgtagctgagaacgtttggggtgcgttaaaatgcgtttcaattggagtatgatttagcagccatttcttcccgtgaaattttgcaaatcatttgtaaacttatgttggtcgaatataccaggcgaagtaacatttttagtaatgcggtatatagtttccgtatataggtatagcaacggacctcaagtaatattgcttattgtaggcatctactgtgcaatgatagggtagtgggtagtaggcctgattatagttatgtcttctgaggccttgttaacagtaaacaaagaacttttgtgggttgtgtcattttgaggtcatttgtaccttaaatctatcatatatttaaataggtgtttaaatgcgtgtttgcacgatgtgttactctttaaggtccatgtttccttcattctggactacggttacataatacacaaatggtaacacttttaattgctcaattttgtcctatggagactgcacaccatctttatgaaagaggtgtgtatgtgtccttactgatgccaccgaattcttgacatctggaatgtcaaaatgaattattttgcattctaggttaaatcaacactggaaaaattaaggtgtttaagcaagtctagtagctctatataagagagaatctttttttttctttaggccaactgttggatttttaaaaatgaatcatatttttaaacatttgagggagcagtttgcttctgagtctcattttaggctgaaattgttccagagcactacatagcctgcttctctctttctctccccactccccctctttttagcttgagataaccaagaagacataactgtgactctatgtgttatctttttaaaaagttgttttaaaattgaagttgcttgtttgaatatttactatccctttacatgctttactacttaataatggattagcagaataaaacagatattttaattaaatgtctttcatatttttgacatctgagctttgtaaaaatggagtagcatcatattattgctgagagagttacaaataatacaggattagtgctagtcaaaggctaattgtaaaaaaacagccagaaaataaaattaaaagaggtaagaggacgcatttatacttttgacatcactctaatataaattacctattgctaggtgacttttgaaaaagagtatcttgtaaaattcacattaggtatataatagttaataatttttccttccagagtgattcacttgatgagtgactagattttttttttttaaatcagaactctacttcaggtaagtatagttaaccatgtaagtgatgtgctgatgtttatttcaggaagaatgaacacttacccatttgataaatactgaactgtttgggaatatgtcagttattccttaaaacttaggcggagaaaaattatgctagttttgttttaactgtaggttctttagaaaagtagtcttcacatttataaatataagagcagataagcacaagagatctctttcctgatatggtgctagtattgaattaaagattttatttttttgttgtagggaccagttttgtttagtcttcctgttcagtctcacagaagctgcaatgattttcctccttttctgttacttgtatctgaccactggggggagactttacaattgggcttgaccatattccttctttacatacattggctgctaatcctgggcactttgtcaaactgctgggtagtgtgctgaggaggatgcactctgaagcaagtctcaatcaaggtgtttaatgacttttctttctttaactcacagcatgcttacaaagtatcattctttatagactgtgttattaacagtctactgttaagtggtctaagtatgcctctaacataatgaaagataagattcctgaatacattatagctttcaaagatccgactttacttgcattaatcttagaagcagtgtaggtttaattgcttgcttagagtacacagatattagttgtctggaaggatctggaaagatcatcactcttctgtgaagtgtatctatatccaaaccctttaaacaaattggtctcctcttataaaaagcttttggaggagaagatattgaagcatcccatgtagctaattttagtgttcatttcaccacagaggggaagttcttcctttatcatagtcatatagataagattaaagcccacaactttgttaaccattaagctgtgaccattattaccaggtgtaataaagtcaaaagcctggtttctactttttcttttctgacagtatttaaccttgttaatgtccaattcaataataatgaactcagtaaacagaggctgctacgtttatagtagtttagaaagaacttaagttttatgaccttccttaattatgatagactaattcaaagacctttctataatctttatcatagtaagtatattcacagagtaatgaacagaacaaaattagtttctatttttccttcatcctaggttattttccttctttcctttaagatgactttgctttcatccgaaaattcttttttccttttttcctttttttttttttttaatatagtgtactagaagagatactttctgcttaggaatatattcatctctggctaactttaggattgtgttaagtacttgggaatggaagtttctaaaagcctatctgtcagagttatcactgatacaaggcaaaatgagaattaaagacaatataatgaatatttcataaagctcaagttattttcagatcctttctactgcttgctagttttgtacatgatttaatccctccttcaccaatttacatcttttcctcttaaatctatcatttctttaccctcttcctccactttttgctatatttcatctacattgcccttcattttgttcctcatcaatgccatggcttgctcctaacttagggcttttgcactatgttcattctgttgggaactcttcctaaatcattacatgagtgactacttttcatcatttcatgttgtagttcaaatatcatcttttcagacaagcattgctacctaaccatccttccagaatgacactagcctcatccccctcaatcccattaccttttttacttaaaaatttcttcaaaccatttatcagtatctgaaattatgtttttatattattttataatctccatactcactagaatataagccccgtgatatcaatgatcttgtctctttttgtttttgtttttgagatagaatctcactcggtcaccccaggctggagtgcagtggtgtgtgtgatcacggctcactgcagcctggaactcctaggctcaagtgatcctcccacctcagcctcctggtagctaggactataggcaacaactaccatgccgagctaattaaaaaaaaaaaattctgtagaaatggagtcttgctgtgtgtgttgcccaggctgctctcaaactcctgatctcaagggattctctcgcctcagtgcctcaaagcactgggatcataagcatgaaccaccacaccctgctgatcttgtctcttttgattaacactatatttcaaggacttagacctgttcctggcacatagctgtcattaaataaatcatccttttaaaaaatctgaggtcatgttctttctgaggtttcggtgttcaaatgctcctttataaaatgatagtagtatggtaaacaggcctcttttggccataagtaatagaaatccattctagttgttataaagggaatttatcgttcaaatgcagccaatgtccagtggaatgcaaggactgggactccagtgcctgcagggcacatcatatcgtttctctcttcttctctgtgcgtttgcttcattccttctcttgctgcagaggaccacttctagtcctcttagtggaaaatatggccaccagtagcttctgagttttcatgataccagcctgggaaactggagaaaggttcatctagttcttccctgttcaataaactatatctcattattagaacttggttgtacttgctgtaaccacatgtaatgggattaaacagacaatccaagtaggtgcccctgtgataattaatgttcatacttattcatctgctgcaaaacactcgtctctcctctttttaaatttgatcttgaaatctgaagtatctgaaaagcactcttcctggagatatagaaaagaaatgtgatatctttcatgggcatgatttgcagtttgattgaggaagataaaatatatacaaaaaggaagtaaaataaaaatagcatgataatggaggaactggtagaaatatttgcaatttgtatgataaataagagtctaacttcctttatataaagtacctactaaccaattaggaaaagaccaaccatcaagtgggcaaagatcatgaacagagtaattctcagaaaaggaaatgcaagtgttttgtaagcatctgtaaaggtattcaacctcacacataatacaaatattataaataaaaactatgagatactgtttcacctactgacagatggaaaatgtttgataatacttttgaagaggctattagttaacaggggctttcacattgttggtggaaacacaaatcaaaatctgatgtggttgaaatttctgaagagcattaaggtaaatagaaaaggctggaaatatgccttaattgatacagatgtttgtgaaagggtaaaaagttaatgcacaacttatttgaacactaacttgcattgctttgtttttggctaaagtcataaacaaactgaaacagcaggcttcctcccccaaaaagagataccttttgagtggtatttagttacccctttccatcttctccattcccctttcttctaccccagtactggtaaagttgtttataaatcaccgagattttccgatactttgtatccttcacacagcccagcactttgttacctacttagtagcactaagtaaagatttaattgaaggagcttagcttatcacctttttatagacccagttcataattcttatgtttttggaagaaatcttttataaaaagtgattttcaatttcatttgataaatctacttagaatatttattagaataggcaatagagcaattttttataaatcttggtttattgtatagcatattaatggaactttttcatagttgctttgttctgtaggatattattagatattagttgggtaggattaatatttttaaaagatagaatagggcagctggagatatgtgggacttttaaagaaaaatgtatgagaaagtgtggggaaaatgattctctgagcagactgggggccatatgcttaggaaaggaaaagtgaaaggtgagggattcgtttagagaaattctgtggtggaactcagaggggtacatgttgggagaagttttaacttaggaaaatactaagctgatttacttaaatgcatatttcaaggataaatactttatattttgttctgtaggtcatttttaccatgaagtgactctggcagggattctttacctaagtgggcatcagaatcctttggagctatcctacgctaaaggattctaatttagtaggtctggtatggggcaggagcatgtttatattgttaaaatccccaggagccaccatttgagtgtaaaataatacatcctgtggaatattccattttaataatgaaatcattcaacaaagcttttgaggttgtatataatttaggtaactctaatgctggaacttggtctctcaccaggtcaatacttctgcacatacctcattgatccccattgctttactctcttgcatactcttccctcctctgccttcttgtttcttttctactaatgaatattcaggcatggttctccaaggaagccatcattaggtggcctcatccataatttatcttttcagtacagaacaaattataacacagtgcttatacaactggcaagtacactcatcacatgagtagatgatttatgtgttttcgttcacatgagccttgaacaaatatacccagttttactagttgagcttccttgttttttcttcttgctatcaagaggttggcgtttagtcatagttaatgctgatgtaaacatttgataatattatagataccaccatgtttcaaggtctatgttaaatgctctccacacattatctcatctgcttgttgcagattttaaaattatgttttttaagtcactaaaatctttttatgattgtattagttttctgtgactgctgtgacaaattgccacagacttagtggcttataaataaatgtattctcttacgattctgaaggccagacatttgaaatcagtataattgggccaaaatcaaggtgtcaacagggacatttttcctccaaagaatctaagggagaacttacttgttgccttttccagtttctggtggcttctggcattccttggcttgcggctacacactgcagtcttcaaggctggcatttgaaatctttcagctctgtgtctttcatttccccacgtgtgtgtgtgtgtgtgtgtgtgtgtgtgtgtgtgtgtgtgtgtgtcagagagaaagggaaatctccctctgtgaaggacacttgtgaaggcatttagtgctctctggaataacctccccatcacaagatctttaatcacacctgtgaaactttccaaatgcggtgacattcataggtgtcaggaattaagacatagatatcttgtggagggggagactattattcagcctaccataatggtaatttaaatagttcagaaaagggaggaggagttgataagtctttttgtcccatcttcatcactttctaagtcagtatttctcaatcagggatgattttgctgaacaatctccaggaatatttggctgtcacaactgggaaggtgttgctactactatgtataaggtataggtcagggatgctgcaaacagtgcacagggcagcccccctcaacaaggagtcatccagcccaaaatgtcagtagtgatgaagccgagaaacgttattctaaaggcaactattgccaatagcttttttggggtatccagaaaaaattttgatgcctctattacgagtaaaagcctttaatctgatttgatcagaacgggtggtagttttggctgactgaaagtgatttaagtgaagagtcataaacgattgacacatatcttaaataatatattacttaaaaatctacattcatgtgtcagtcttttctttaagtatgtgtcttttgccaggaactctgggtcatcattcttatataagccaatgcattatcactgattaccagctttggagtgagaacttaaaagtttgtgaagcagtctgcatataagatctagatttctaatgttttatgactcctcaattgtttatacttgttttacccttaattttacagcagtttatcattttgttttgttgttttgtcacttgcttttttggggtcttcccaaagcatcaactgattttcatataaagaatataactcccatcatcttgtatcaaatacagcatatgatgcatataaagaaaatgaaatcctattttgtaataatggcttgctaaggaattgggaatactaattctagtcgcagctcatttgaacagcatccaatctggtgatatggtgagggctaatgtcagttgtttacaaattcttgaatgtttcagaacattttgttttagttctgtaatggcagagtttataaataatctatagaatattactataaatactttattggtattaccagcttagtgcttgcgttacttttctaaaagaaacattgatttttttttcattaactgtaataaatattatttgaagtttgaatgtggctatctttgagtggatttgtcttctttttatttactagaatatgtatgtctatatgcacataataaaatgttatatggaaaacctaactttagttacataaataaaaaattatttgctttttttattcctcttttaatatccttctatcttctatccttgtataaggagctagaaggtataagaaactccaataattgggtttcttataaagagctttgatataagaaactcagataattgagtaaagaagtttaatttattaaagttgcttatttttgaaatgatagtcatgcttttttttttttttttttttttttttgagacagagtcttgctctgtcacccaggctgctagagtgcagtggcgtgatctcggctcactgcaacctctgcctcccggattcaagtgattctcctgcctcagcttcctgagtggctgggattacagatgtgtgccaccacgcccagctaatttttgtatttttagtagagagggtttcaccatgttggccaggatggtcctgaactcctgacctcgtgatctgcctgccttggcctcccaaagtgctgggattacaagcgtgagccaccgtgcctggaaatcattcatatttttatacaaatcaatttaaatgttttttattttttagctagtaatcttttggaatggaggtcagtaaaaaaaaatgtaagccctatttttaaaaggttggactatcttgtgagacaaagtagtctcagtttgccatcaccaaccaatccttagcattaagctcttgaaaacaactaggtagagaaattttccgtgaaggaatttaatgatctttataaagttttactattcacccaattaaaatgttagattatcattttatgctattcaatttggaaataccagatactatacaattagtttccattcaccattactttcttgaaagaaacttttcacgactttcaataaggtcccctgcccccaaataaagtggttataaatcctaggaggcatttttgaggatatcttattcagatcctttctttttttttttttcccatgctaaatatttatttaatttttttttttattatactttaagttttagggtacatgtgcacattgtgcaggttagttacatatgtatacatgtgccatgctggtgtgctgcacccactaacttgtcatctagcattaggtatatctcccaatgctatccctcccctctcccccgaccccaccacagtccccagagtgtgatattccccttcctgtgtccatgtgatctcattgttcagttcccacctatgagtgagaatatgcggtgtttggttttttgttctcacgatagtttactgagaatgatgatttccaatttcatccatgtccctacaaaggacatgaactcatcattttttatggctgcatagtattccatggtgtatatgtgccacattttcttaatccagtctatcattgttggacatttgggttggttccaagtctttgctattatgaataatgccgcaataaacatacgtgtgcatgtgtctttatagcagcatgatttatagtcctttgggtatatacccagtaatgggatggctgggtcaaatggtatttctagttctagatccctgaggaatcgccacactgacttccacaatggttgaactagtttacagtcccaccaacagtgtaaaagtgttcctatttctccacatcctctccagcacctgttgtttcctgactttttaatgattgccattctaactggtgtgagatggtatctcattgtggttttgatttgcctttctctgatggccagtgatgatgagcattttttcatgtgttttttggctgcataaatgtcttcttttgagaagtgtctgttcatgtccttcgcccactttttgatggggttgtttgtttttttcttgtaaatttgtttgagttcattgtagattctggatattagccctttgtcagatgagtaggttgggaaaattttctcccattttgtaggttgcctgttcactctgatggtagtttattttgctgtgcagaagctctttagtttaattagatcccatttgtcaattttgtcttttgttgccattgcttttggtgttttagacatgaagtgcttgcccatgcctatgtcctgaatggtaatgcctaggttttcttctggggtttttatagttttaggtctaacgtttaagtctttaatccatcttgaattgatttttgtataaggtgtaaggaagggatccagtttcagctttctacgtatggctagccagtggtcccagcaccatttattaaatagggaatcctttccccattgcttgtttttctcaggtttgtcaaagatcagatagttgtagatatgtggcgttatttctgagggctctgttctgttccattgatctatatctctgttttggtaccagtcccatgctgttttggttactgtagccttgtagtatagtttgaagtcaggtagtgtgatgcctccagctttgttcttttggcttaggattaccttggcaatgtgggctcttttttggttccatatgaactttaaagtagttttttccaattctgtgaagaaagtcattggtagcttgatggggatggcattgaatctgtaaattaccttgggcagtatggccattttgacgatattgattcttcctacctatgagcgtggaatgttcttgcatttgtttgtatcctcttttatttcgttgagcagtggtttgtagttctccttgaagaggtccttcacatcccttgtaagttggattcctaggtatattcagatcctttcttatgttcacttaaaagttattgattccaacttctgtcctagagatagcataacttggatgtttgagattaaaaaaaaatgcttttagtaacctttatttaactcgctcagcttgctatatagccaagtcggtatttatagtttgtttccacccttgataatttcatgccagtactcatcagaatggaacactgacttggctctgtctgtccttattctcatctccatcccctcctttccaacacactgcaattctagattgaagactgcacatttatttatttatttatttttttgagacggagtctcacactgtttcccaggctggactgcagtgccgagatctcggctcactacaagctccgcctcctgggttcatgccattctcctgcctcagcctcccaagtagctgggactccaggcgcccgccacctgcctctgttatctcttctaagagtgtgcaccactaatatcttctactcctactctgccatctatctagttcccttctcttttatcatccaaacttggagttccctcttttgcaaattatctccaaaaagagcaacttagaatttgttactctccagggaaattttcactgaaagcaagtctgtttatatatgtatatactggtattacacaaataaaaagattatatagtttatttgagggaagaagcagtttctttgtattcccccagtcaggcatcatccatgaacataggctttgctatttttttttttaattgaagatgttaggggaaaacaaagtttagccatatttaattttatttagccatatattttatttagccataaaataaaatactgctttattttatcatgtgtggcagactgtaagttctgagagaattcagaagaagaaatgttcacctgtggggagagacttgctacttatttgctacttgattgagttaattttgagatgagttcagggactcattttagctctaaaattttgattctgcgtaagcaagaaataggtcataagctgggtaagtatggaataaccaaggaaaaaaagtagtccttagatgggatgagtaacaagagtgaaggcatttaggtgagaattagatatgtggttgtgcatataggaagtaaaatgatcaatgtggttagaacagagagtttatattaaggaataagagtgcattaggttgaatagatggaaagctagatattaagaagagaaatttaaacatacccagatgatagaaaatcatgtttttctaatgcaatctggtcattaaaatgattttttaacatgattggtgtgatagtcttacgcctagtagattacagtgaagaagagaatggtagaagaggcttgtggtaataatttaaaagtgaattaaggagagcctgaaagacagtggtggcagagggaagggagagtaaaagataaatataaggacattgcaaattcaccatgacaaaccaaatgacatagggcgtcttgaggttttcaaggaattccgaggcaaaggcagtctctggattttcagagtttggaaattccctgcccgccctgccccccaaattctagtattttccccaaaataaaccctggtcttgtttaaaggattttttttttgttttttgttttttggttatttttatttttaaataagttgttatggcccctagatttgagcaagttgttctcatatttgactaagttaatactaaaggatggaaaagttctttagagactacctacttcgctattaatttgtcatttatccctgcattatatactgttaaaaacattggaaggacgaaggacgttaactggaatgacgatggatgagtgtgggtactgtcatataggggaggggaaagagcagaggaacttttaaattattaaattattattattaaattagaggaactgagaaaataaagatactaatagtaaggaatatgttatttttaatttaaaaaatttttttagacagcatatccctctgtcacccagtcgagtacagtggcctgattgtagctcactgcaaccttaaatttctgggctctagtgatcctcccaagtaggtgagactacaggtccacaccactatgcccagctaattttttttttttttttttaatgtttttagagtccaggtctcactgtgttgcccagcctggtctcagaactcctggtctcaagccatcctcccttcttggcctcccatagtgctgggattacaggcatgagccaccatgctaagttttgtggggaagtgtggaaagtacgtggcttgattcttatcagaaagtttcactttacttttgtctgagtcttcctctctgacatcttcttttcaatttcataaaagaacactatagcaaatacatcttacaaccatgaccatactgtctctagaaagccagaatattatgaaacatttagtaggtgagcaagaaaagtggagtgattctgatgccagaaatagcaccgagctaatacagtttgatctatttgttatttagaatacaccagtgattctctaagggtgcagttttgccccctaagggacatttggtaatatttgaagccatctttggttgtcacacctggggtggggtgctactgacatctagtgggtagaggccagggttgttactaagcaattcattgggacagaccccacaacaaagaattatctggcgccaactgacagcagtgcgaagattgaaaaaccctggaatgtagagtaggcaggttcttccctggacatgtttggagacataggtcaattttttttacttccttttcttctaggcttgaccagatatcatcctaccaacagcttacaataccatatagattcttactctttgtttcattgtgttcttatcttaagggtatatcttagacatttcaattagacaaatatttctaaatatttctacccatcttcatttagggttgcttttttctgctaagtttatttttctgttttaccagtttatctcttgaggcatcactctatttttaaataattgagggcctctgatgatgtatttaggtattctcttttacagcattttcatgtgcttcaagtcccaggtctgggttgagctagttcttgagtccagatttttttcatatactgtttgaacctcttctgattttttagtatataaaaagtttgaacaacaagacccttaagggaaaaactatcttggagttcttttagaatgattttattcttgcttacagataaagattgccatacgtataacagctacatacaaaaagactttataatggtttatagcactaaatggaaaacactgaaattctagaatgaaacaaggtttgcaagaacttctatttggctttattgttttggttaagcagagcaaaataattcatcataatatgaagataaaagttgaatgaatgtatcataattgagaaaggggtgtgtttttagaaaaacagtttattttgtccttatcccacctccatttgatgttgatgtaaacatattggccatttaatataaaatataattccagtctgcctatgtataacaactacactgtacaataaaaagagatggaaagcaaaagtatttctttactgtagtggtcaggatatgatttgtagatccaaattttgtgtgtgtgtgtgtgtttggaaaatttgggaggcaaagttctcaagtaagtgcagatcttcttttagtagatacttcctgtctgctttgtatacacatcaattatatcttcatcttccattttcacctgtacaggtgtttcattaattggcctcccatcacatccaaaaccaagttgcctcattgatagatcagttgttaacaataggctctcattagtttgctaagtgatatactctggagctgtaccactgaaccattccaccccaccactgcaactctatatggttatttttttgggtcttgactcctttcttgggctttttgtcagccatggaaagcattactgttgcagctgctgcttctcgaaagaagtttcaggtacctcatgtatgtgcacacaaccagcattagtaagtaagcctgttttaattctggagatattttacctaagaaatatttaagtgtgtgaagagactacttttctgagtgtagaaatttcagggcagtcaaatgcatttctgtattgttaatgctctgaacaagctagtgtacctggagggaggaatttatgttggttaatgagtaacatagttctctcatcccattacttatttatgatcaatttatttttaattaagcttttaaaattattaatgctacatgacatgcaaagttaaaatcagcatggaagaatgaatgtaccatgaaagttaaaggtttctatccctactcttacttcatagagttaatcatggttagtagtttcagatttagttatattagtaaagtggttctcaattcatgactggcatttttggcagtactatactttgcaatgcaggattgtcctgacctgaacactactcagtgtttagtgtcccttaatatttggttttctaccacagttactgagacaatcaaaaatggcctagtacatttccaaatgctcactggggagaggtggtatgctaattttaaaaaacatacatcttagaaagcatatgtttatgttttcaatttcacacagtaagtattgactctagtataaaagaatatttaagtgcgcacagacttcttgagggaggcccagagaaagtccacttgggaggaactgtgcttacttctaaagtcttagatgataagatttttcaatcttacctgctttctttcctgatagtcttactttcttgtgttttcagctacctgtctttttgttactgtttgatgatttttgaattgtgtgctcttgcttcgctgggttttattggaggaaattctgtgcagcccagttagaggacacattctttccaaggtttgccaaggcttttctttggcacctgtggaagccactgacccaagaccacttcgtagtttctctgcttggggtgttctgaactaggcaggtaggtatatttggaaccctgaatccttgagagtaggctgtgattactaattctcaggtgatatttttttctgctaatatggagtccaatctgagacaggccaacttccttattgtcttccttggccaacaggcatgtttttattagactactcttacaaagtaggggttagtcctataaggtctcagcttcatgtgggaaggtctaagttgcatttttcatcttgaacaggccagggcctaaatggcagcttctgaactcctggttactgaaatcctaaacaccccagggcagtcataacttcagtacctacttactagtttgttttttccccttcatattggctcacagggatattcttggggactttttttttttttttgaggggatgttttcagtattttattttgcatttttagatgttttgtgagagaattattttcagattttcaagggtaccttctttgccaaaccagcaagcctttcttatctgttttctaacttctaagcagttcctaaacttctggtttgctaatctctttctcttttatttttgtctcacctcccctccagtattagtgctgttttattcttttttaaaattacatacctgttttgtcatttcagtgggacctcaggagggagggaacataggcatgtgtgttcagtcttccactttaactggaagtgtgtctaatagttttgaggtatactatgtctattaggaccaactgaccttaggaaaaatcaatgtaaatacctttccatttaactgtcattttaagtttgaatttaaaaagcatagtctttggctgtaaaagagggacagggtcaggaatggaggatgacattcagaccattatgcagttgagcaaggcctcactgagatagggggcagtgtgtagcttgacatacgtgggctcttaccataaagtctagctatataaagcaaatcacattacaatgatgagaagccagaattttaaaatttcatccaatgagtatttattaaatgtgatgtgtctggagtaatactaagaattagagtacaaaaataaataaaatgccatatcctcagtgaacccactaattttgtgttagagatagacatgtaaattaaaatagttctcattattcaagatagttatggtgtataaagtctctgcaaatgcagaattatcaaatgctgagccgtgttgcttctaggggaaatgcagggttaggttcctgcaagcctttagtcacagtatgttcatcaactggtcaatatatagccttttttatctgtatttctctttaaagatactttattatatattattgattcattaacattgtactcatagccaagcttaccatatcttatgcctgaacaaagcttgtctaatatgtacatttttctgtaaagcacaccagagccttttcatgataaagaaacactagatagcacttcagtgctatgattggggaccattttgtgaaatcacaaacaacagaaaaatgcaaaaaaaaaagtggcacaaaataaactatgaaaaggatacttgtttttagtatgagagccgaaacaagaaagcagagtgttgctttcttccacctcagctgggactgtgcaatgttgggtgactcaaatttttcaccactctgcatatccactaatgaccacaaaagctctgtaagtatcgattattggattaaaagtaaattttagcaagtaggcaaattcgcaaacacagaataatgagaatcaactgtactgtataatgtggtaagtgctgtatattgtaaatctgctaggttgggtcagggaaggcttcatttgagacaattaagatgaatttacagcagtatgaagcaatgaatctatggaatggcaaatggtccagagtggttggaataaaagggcccctgtaaggagaggcaagtggggacgtttggactggccagctaacagaggaggatgtgaaggcccttatgctgtattaaggaattttgattctgtaggtgatgggaaactattggatgattttagccaggggagaaacatggtcatatttgtattttggaaagctcacactgctttggtattgggtatagatgaagtaaggaaaataaatacaggcatacctcagagatatcacgggttcagttctggaccgctacaataaaacacatatcacaatgaagcaaatcacacaaatttttttatttcccagtgcatgtaaaagtatgattacactacactgtagattattaagtatacaatagcattatgactaaaaaatgtacataccttgatttaaaaatactttaaagcttaaaaatgctagtaatcatcagagccttcagagagttgaagtcttttgctggtggagggtcttaccttgatgctgatggctgctgactgatcagggtggtggttgttgaaggttggagtggctgtggtaatttcttaaaataagacagatataaagtttgccacattggtagactcttttttcatgaaagatttattggtaatatgtgctgctgtttgagaacattttatctatagtagaacttcattcaaaattggagttaatcctttcaaaccctgctactttaccagctaaacttatgtaatattctaaattctttgttgtcatttcagcaatatttacagcatcttcaccaggagtagattccatctcaagaaaccactttttttgcccacttgtaaaaaccaactcctcttctgttaaagttttatcatgagattgtagcctacatcttcaggcttcacttctaattctcattcccttactttttccaccacatctgcagtgacttacccactgaagtcttgaatccctcaaagtcattgatgagagttggactcagcttcttccagactcctgtgaatcaacattttgaaggatattttgaccttctcccatgaatcacaagtgttcttaatgacataaatggtgaatcctttccaaaaggttttcaatttgcccacatccatcagaggaatcactatctatggcagctatcgtcttatgagatgtatttcttaaataagatttgaaagtcagaattactccttaatccatgggctgcaaaacagatgttgtattagcaggcatgaaaataacattcatctgctgtgcatgtctatcagagctcttgggtgacaaggtgagttgtcaatgagcagtaatattttgaaaggaatctttttttctgagcagtaggtctcaacagtggacttaataaattcagtaaaccttgttgtaaaccgaagtgctgtcatcaaggttttgttccatttatagtgcacagttagagtagatttagcataatttttatgggacaggatttttcagaatggtaaatgaggattggcttcagcttaaaagtcaccacctgtgtttgcctctaactaaagagtcagactgtcctttcaaggtttgaggccaagcattgacttttcactagctatgaaatcctatgtggctaataaaaggctattttgtctgcactgaaaatctatctgttgtgtagcatagtcaccaccttcatcaatgatcttagctagatcttttgggtaacttcttgcagcttctacattggcacttgctgcttcaccttacacttttatgttatgagatgacgtctttccatagacctcatgaacaacctgtgcaagtttcagacttttttccagtagctcttcacctctctcagccttcatagaattgaagggagttagggccttactctggattaggctttggtttaagagaatgctgtgactggtttgatctccagaccactcaaactttccccatatcatcaataatgctgttttgctttcttattcctgtattcactggaatggcacttttaatttccctcaagaacttttcctttgcattcacaacttggctgtttagctcaagaggcctttcagcctctttgctttcaacttcccttccttattaaatgtaatcatttctagcttttgatttaaagtgagagacttgctcctcttcctttcacttgaactcttagagattattgtagaattattaattagcctcatttcaatatcgttatgtctcagggattaaggaggtctgaggagagggagacgaggaatggccagttggtagacgagtcagaacacatacatttatcagctgtcttatatgggggtgattcatggtgccccaaaacagtaaacagtagtaacatcaaagagcacagatgtgatggatatggtaattaccttgaccctatcaccatacattatatgtatcgaaatactaccccatgaatgtgtgtatttattgtgaagtttaaaaagattactgatcatagatcatcataactggcataatagtaatgaaaaagtttgaaatattgtgaaaattacaaaaatgtgacacaaagacatgaagtgagcatatgctgttggaaaaatggcttcaatagacttgatcaatgtggggttgccacaaacattcaatttttttaaaaacagtatctgtgaagcacaataaaatgaagtgcagtaaaatgaggtatgcctgtagaaggttttagatattcaggtgagagatgatgagagagtgaactaaggcagtgacagtggagatagagaaaatgggatagtatttgagaaatatgccaagatttaaatcaaaagttcttcgtgacagattagatagaataaaggagatcaaacagctattcattgttgctattaagataggcaatacgggaggaagaccagatttaggaagtaacatgataatttctggatatgctcatttttatggtgcccatgggagattttctgtggagatgtaggcaaggaaatacaaatctgaagcttgggtgatatagctttgagagacatcaactatttatatatatataaaaaatatatataaatatataaaaaatatataaaatacataatatataatatatataaatatatataaatatgtaaatatatattatatatttttaatatatataatatataatatatataatatataatatataatatataaatatatattaactatatataaatatatataaatatatataaatatatatatatttgaatgtctactgtgtgtcaagcactgtcctagtgccagaggagacagaacaatgagtgaatttttagtgaggggaaacataagcaaaaaataatttcagatgagtactgtgatgaaaatgaaactaaaaggatggagagtgacaagactgtatgtaagggtggtagcgtagtttagattgaatgcttgggtttactttctggggaggtaatagttacactgtgacaaaatgaagagaatattggtatgtgtgtggatctctgggaagagcatttcaaggagagagaacagaagatggtaaagatgggaaatgagagatgggagatgaactggtctagtttgaaaacagaaaggagcccagtgtgactggagacaagcagacaaagggaaagagttggagaagttgaacgcagagaggtacagtgggtgacaaatcatgaaggcgctaagcggccatggtcaagagtgtggctagttttctaagtacagtgggaagcctttgggtagttttagcaggagagtaacaaaatctgttttgtgttttaaaatgatggctctagccactctggggagaatattgttgagaacgagagtgaaggtaagggaactggtcaagtgactactgcagcagacaggcaagaattgatggtggcttagcgtagggggatagcagtgaatgggcaagggagtcagatggcttttcttcagtcacctccattgtgaccgaattgaagaaccagtttatcattggatctgttatgaattctaggtatttttgtaagtatatatataaagtattattttgaaaacagaccctatcaatgaaatttattctaaaattacatagttttgggattcaaattagaacatttgataaaatatctcagtgattctataatatttcacatttatgaatgtttattaggtgtgtaaaacattttcaaacaattttgattcattatactacatattttcttgtaaaataatgaagttttgacttgctttgttaattagtggttgggtgaataaaaatttactcaaagcaggactactacattgtgagagtaaattggcaacagtgctatttatttgagctctgtttaaaaaggaaaaaaaggactctccgtatatctagctttctcctgtgtgagcactacactttaacaaggatatttctggacatagtaggaagcatggactgtggtggggagagattggggattagtataccagttaagaggcttttaaagtagtctaggcaagagaatattagaaactctaaaccagacagtgaaatttttagagtggaattgtggtgaagattactttgagacttttatgaagtagaatgaaaagatttgaagaagaattagatgtctggaggttagggagaagaaaaaaattggatgattctgagattataagcatcagagaatgggtagttggtgatgtcgtaatataaatgagaggtagaatctgtagtcgcagtaggcttggttagagtcagtgagtagttttcaaaatggtaaattaaaggcaccatctttgggactccctggggaaaaacgtaaagaaggcagttgaagaaaggtgagtgctgtaactaatacttggaaattatcatcatatagaaactagatgaagcctcagaaataaatgagatcactcaagaaaagaatgaaaacctgagagatagcatcagcagtgatagtctgtccttaaatagaatgaagacagtatgtgactggtttgtcagttgtcattcctgatcttttccaagaagtttgaggagagctgtggctgagatggcacgggtggagaactggaaagataacacataatacagactactctttgaaaagtgtggtggggaaaaggagagagataaggctgtgacttaaaagagaaatgaggttccatatagggatttttaaaagttactatttaaggatggagaagatgttagcacatttatagatgcagaaatagcaaatgaaaaaatattgaagttttagaggaataacccatggatcatggtcccacagtgggtgggaagtagttgattcattgacaggtagtagccttgtagaggaggaagggcatactttctcctgagatacaaggaataaagaatgatggtaatgtatttgattctgcaagtgaaagggaatttcagtaaatcataggtgataagctctttttttcctttttcttctgacaaagtagtcttttgacaatttagtgtggtaaatgtttgaaatagagaatatgagagaacttgagaaggggcaagtaataggattgtgcagcagtatttgggagcttgtttctttttgtaggaccagggcaatttgagaatattgcaatacttggggataagaataggaaggaaggccctggaatggagaaaagagctgtggaaaataagaggtgaggggagatgattacttcatgatttgcctagggctgcctatattgaaatgtgtgcaggcaagctattgctaggccactggggagatcttttcactgagtccaaatgtgaactacatcattaatgctgttttatcaaaccaaagtatataaaggaagttctgttaaagcagaaaattatcattatagaaaaggacttgtgaaaagttctacaacatttgaaacaggtattttcatgtaacttaaatttatgaaggacaagttattgtctttttagttcatatttttagttcattttattaccagtattttcaaaacgtacccagctcagtctttagttgttagaagtgaagggctaacaaggatatccagttgtctatagtgttgatgcttgctatagggaaatttgcagtgaggaaaacatattaaaatagtactgttgttcagttgtaatttcatctatttaaagtgttctttcactacattgaacaaattatcagattgcctaagtttcttataaccagaagtctttcatataagaaatgtgaggttaaaacttaaaataacctgttcattatagattggataatctgctgtttcactgagttaggacctctttggaattcgcaaatttctgaaactgtgctaaataaataaggctattatgagcaaggttttatgtgtacacacacaatcaaagttttctaatatttggactatgttttaatattccatgcaaggattctgtgtatggtgtgtctgtgtttctctgtcttgttaatgtgagcattcatgcccagaagggatgactgggagacattatgcctttgaagaagataatttgtttccaacttatttttactgtcaaaaatgttttttgtgcttatttttaatgcagtgctttgtatatacttttgtgaaatatttcgcccagtactttaaaggatgatacataatcaaaagtaaaaaacacaccgagtgttgaatgaggcaggaataaaatacagtcgtgcatcacttaacaaaggggatacattctgagaaatgcatcattgggcgatttcatgatcgtgcaaacatagagagtactaacacaaacatagattgtactaacacacacatagatggtatagtctgttatacatgtgggctatttggcctattgttcctaggctacaaacctgtataacattttacacttgtggcttaccatgaatggagcttgcagaactggcagttgctctgggtgagtgagtggtgagtgaatgtgaaggcctaggacattattgtacactactgtagactataagaaatttattttttaaattttttcttcagtattaaattaaccttatcttactataacttttttactttctaaactccagctcttttgtaataacacttagcttaaaatacaaatgcattgtacagctgtacaaaaatattttcttttttaatatcttctataagcttttttttttttttttttttatggagtcttgccctgtcacccaggctggagtggagtggtgtgatctgggctcactacaacttctgcctcctgggttccagtgattttcccgtcccagcctcccaagtagctgggattacaggtgtgcaccaccgcacctggctgttttttgtatttttagtagagtcgaggtttcatcatgttggccaggctggtcttgaactcctgacctcaagtggtccacctgcctcagcctcccaaagtgccgggattacaggtgtgagccactgcacccagccctataagcttttttctattaattttttttaaccttttaatcttttttattaaaaactaagatgcaaacacattagccttggcctacacagggtcaggatcatcaatatcagtgtcttctaccttcacatcatgtcccactggaaagtcttcagggggcagtaacacccatggagctatcatttcctatgataacagtgccttcttctggaatctcctgaagaacctgcctgaggatcttcttgcgggggtgtcactcttttcagaaatctgttcatggtggtttccttgggtttgtttctgtttttcatcatagatttgcttgtaagcagatctatgaacattcctctctagtaatgaaaacctttcattgttggggttcatgttttcaaacttgttaagcagcttgttgaagtctgcaaaaacttctgctaaacccttcactgtacattttcttgagagaattattcagctgcattataatcttttggaaccactgttgtatatgtagtctttggtcgactgaaataatgttatgtggtacatgactgtatccaaattgatgaggtaattctagtagcttataaaatatcttacataacaagatccatgtcatttccccctgaatcaaggacaaagaagaaaaaaggtttgttattttaagtataacatataatattcaaatgtgaattatgtttgattgtaggtcaataatttttgagccccagtttcttatgagaatggaattggtagtgtgccagttaaggaaaatttatggtgacactagataaacatggcagtaagtagaagcagttcattttgtataagttaaatcgttacatttataaatataaagaatagccatttaactattttttataggtttttaaattatagtttttacatcttacgttttagttgaatgttttactgaaatatatttcatgtcatagtatagataaaaaagaatttaagaaaccatgtcatctaaggatgactttgtcttctccaggtttctgtcctcaagcgaaaaaatcttgcctgtttttaactctagaaaagtggttataattatttgatttttcagcatgcaaactagtaactatttacacatgatagatatactttttttttaggtttttattttttattaaaactattaatgcacatatggatgaaagactagaggtgctccccaactctatttctgtttcttcctcccaggaggctactacatcgaacatttttagctgactgttttggtatcatgtcagtaaatggtgtgcttatgttgctaattcttatttttttggttttaaccattatggaggatgaggatttagctctttacattttccttcaccacgtatgcatatcatatactcttccaatccctcagttctttcaccctaattatattagtaattttgattagattagtatttgttagcagatccactagtaaattgtagttgctattctctattcctgtattttcattttctcagacttcatttatttgcttcatttttttgtatatgccacttggctataattcaaccccgaaatctgtgcttgttttcaaaatcaactttcagtgcattcattctgatttgtcaacttcattttcttgaagatgtcactcctggagccttctaagctgaatacggactcattttctgaagctggtgtacacgtgtcaccgatcttcttagaaattatctttgcctttttcctgagttgggccttctagatcctgtattctctgtctccctctttatgttttgcttgtttcatgctttgagagcagcatgtctttttttttgtttttgtttttaatctttctgaggaaaagtgtttgtggtaggttaattttgtgaaaccttatgagcaagtctgaaaattatttttaactatcctcacacttgattgatggtttggcagggtaaagaattcctgggggaaatgtttttaaaggcatcattgcatcatcttctacctttagatgtcatcattgagccattcagaatcattcctgattcttgacacgtgatttttttcttttttctcagtattctgatatttcacaacaaaatatcttaatatgagtccattttcatctgttttgctgggtgctcagtgtactccagcaacttacatctttcatttctggaaaatgttaaatatttcattattgtttttctcccctccattttgtctctcctttctttccaaaacccatctggtttagatgccctctaatcaggttctctaattttcttctgtttttctactcctgtgcttttctactttttgtggtatttcctcacatttaccttccatgatttccattgaattttttctttctgcttttgtatttttattttctaagagctcttttgtttcctctgtaactatcttattctagtttcatgagtatgatattcttctttttctttgataatttttataactgtttcttttttcaacctgagtagtttttacctatttgtttattttaatctctttcatttactaggcttttctcagctatccagtatcccaagattcttagctcattaagagtgggggactaaaaacctgatgctctgatttcatgttgaatgtcactgtagctagtttgtagctgggttatttgggggtaatacctgatcttcatgtctgtgtctttcttgttgactggtcatattctgtagactatgaagaagacttcacatctgcctggaaagtaaagaccaagctgaaggcttcagatagtcaggagggagaatcaggtggaggggtttgtatcagcatttaataatcctgtcttctatattatttcattgtctttggtcgagaggtacctcttatcttactctctccagaaaataagcccctagttttcagttctgtgtagtggaggaaggtgggtgatatggtttggctttctgtccccacccaaatctcatcttgaattgtaatcccataattcccacatgtcatgggagggacctggtgggaggtaattgaatcatgagggtggtttcctgttctcttgatagtaaatgagttctcacaagatctgatggttatataagcatctggtattttccctgctgccactcattctctttcctgctgccctgtgaagaggtgccttccaccatgattgtaagtttcctgaggctggggagccatgtggaactgtgagtcaattaaacctcttttcttcataaattacccagtcttgggtcataccagcatgggaacagactaatacagtaagaaggcatccctctgtaaaccaggaagtgagccagcaccttgatcttggacttcccagccttcagacctgtgagaaataaatttctgtcatttaagctacccaggctatatttttgtcatagcagcctgaattaactgagacagtgagcttaggactagctgagaaaaccagcagctttgctgcccaaaagttgtggagtgacttgattcaggctagggaagaaagagaagacacacaaactaaacctgtgactttgctggtgaaaagtggtggatttggttggaaacaaatagagaaaacctgctgctgtgctaatttgacattgtggaccagcagaaatttaatagggaaatcctagaaatgagagagccatggaagggttaagatgagctctccacatagagacccaggagagcctggaaaaaagtgaaagctgatggggacttgacaactggctgcaactttgaatgcatttcccagtccatcacagctcaactcactgagagtgaagtcttaaaagcttgaggtttttgaacacagccgttgctgatttgtccacaacattggctcaaatggctgttggagcacaatattggtccatcattaagctttacagacataggtacaaccccaagagagtcagactaaaatgtaaaaataagaattaaaatattaaacggatgtcctgacagcataccttggagggaaacagattctgcagtttaagtctagaccaattatttaaaaactcaaactctgaaaaaaaaataataaatctagagttactgttaagggttccatattcaaccccaaactgctagacatggcaaagaaaagaaataccaggaaaatgtgagtcatcatcgggaaaaatagtcaataaaacggactctgactgggctcagtgttggatttaatgaagacttcaaattggctatttagaatatattgaaagaattaaaggaaaatacagtctgggcattgtgacatgtgcctgtagtcccagctacacaggaggctgaggtgggaggattacttgagcccggtagttcaagactatgatcacacctgtgaatacccacatcagtctagcctgggcagtaaagaccctgtttctttcaagaaaagaaaaaaaaaaaaaaaaaaggaaaaaagaaaaatatgtgaacaagatgctaacaggacacaataaatagagaacctcagtaaagaagcaaactcaaaaagaaccaagtagagattttagatttgaaaagcacagtatttgaaatgaaaatttcattggataggctcaacagatttaagatggcagagaaaatgtgaagatcaataaaaagtattccaacaagagaaagaaaagagatttgtaagaatagggaacaaagccttggagacatgtgggacaatgtcaaacattccaacacacatgtaatgggagtttcagacagaaaggaaagagagagacagaaaaaaatatttgaagtaatagtggccccaaaccatctcaaagttttactaaattctggtagaaaataaaacttaaaaagaatttcagtaagatgaaataagcacactataccctaacttggcagagacagtgagctctggtcctttcagcttctgataagggcattcctgccaagatgggggctccaccctcatgacctagtctaaccctaatcacctccccaaagactccacctccaaataccatcccactgggaattagggttttagcatatgaatctgggagggacacaaacgcctaggccatagcactgatcaagcttcggttatcaccaactgagctggggccctggggaggtacatggggacagccccaggcaagaaggccacagagtcacactgttcttacctcaagctctagcagttttgccagaataaatgtgcctcatttttataacggcctttgggcaattttcagcacccttaaaagactgcctttgatgatgctgtccagttttatatttgcttttttgcagaggggaactgccaatctcttcatgccaatattatcagaaattgagtaatgtttgtaataaaagattttcaacattttactattactaaactttcatagtcacaactttgttatcaagtgaaagaaatcattgtgatatgggcaatattgtttctaatgatgaaattcattaggatgttcactgcagcatttcttgaagacatgggaaaaatagaaacaactgccatgttcctcagacgctaaataaactacactcatcctatgaatctgcaacaactaaaagaataacatggtttcatatgtactaatgtgaaatgttctccaaaatacatttttctgtgggaaaataagtttcatatatcactgatatagtaagatattacttatataaatacagtaacacattatgttttagatatttatataagtatagaaatgaagcatatatcttcatattttctacagatacaaatatgtaaatatgtaagaataggtctataaagacataaagaataggtctataaagacataaagaataggtctataaacacataaaaacaaagtataacatgcattacccctagggaaagagcagagatggaaagctggccaagttaaaaaggctcttgtctctatccagtaatacctgaaattttttacaaaattaatttatgtatacctgtgtaataaaacaataatttaacaaatggattgcccaagctatcagctatgtatatggaaagtcaacatcatgaggattcctagaagtttctatacaaattcacagagattaaagaaaaccatttgatgaaataaaattaagcacccttatataaaagattttattaggtgaaacatgcttggcatcatttctcaagtcatggatttgtcaacccaaagatgatctccttatatagaacatttcatcttttaaaatcccatgacttatatgttagtttgtgctttttatcatggatttctttcctagtagtaagccatttcagtatgtgtcacattcaataatatcttttaataactttaacaggtgcatttcaagttacaagatttctttatgcctacagttaagaattactatgaatgaaacttattaacaattactcttaattctttaaatcgtcatcttatgaatcaagtattttctgctagaaatactttaccctaattacaaccttcatagattgtaaaaaggaaacagactccaagacactgtggcaataaatggaaataatttgtctcccacagttcttttaagaagaaaatgattttataggtgataggagagggccttgagatactatgtcaaagtgaatttaagtactatctttatattttgagctctggcttttcatattctagcatttgttgttgagattagtttttcactgacactttgaaaaattagtcagaaagagatggttgatgagttgcagaatatagataaaatagaatagcatttatgtttttagtaaagtaggcatttaattaggtttttttttgtttcattttgtttttttgagatggggtcttgctatgttgcccagactggttttgaatttgggcttaagcaatcctcctgcctcagcctcccaaagttctaggattataggaatgagccactgctcctggcctatttacttttattatacaggttgagtatccctaatctgaaatgcttggaaccagaagtgtttcagatttgggatttttctggattttggaatatttgcaaatacataataagttgtctggggagaggacccaagtctaaacataaaattcatttatgcttcatgtacactttgtgtacatagcatgaaagtacttttatatagtgcttttaattttgtgcatgaaacaaagttttgactatgacctgtcacgtgaggtcaggtgtggaattttccacttgtggtgtcctgttggtgcgcaagaaattttggagttgggagcatttcagatttttggattagagatgttcaacctgtataaccttatgagttgtatcaatgtcatttatatttttcaggtaagaagatagatgtgtggttagattttttaaaaatactacattggggaaaatgagattataattcagaatttagtttttactctatttaatcactccttttgccacacatgtcctcagcatttatactggagtgttttatgaagcaattcattattattattctaacatataatgaaatgaagccctcttaatgaaaatgtcattgctacaacctgtttaaaggacagtatgacagtatctgacaattgaaaaatcatgtatcctttgatctaggaattctacttttagctcttagtgtttacttgctaatgtatgtgtatctctctctctctctctctgaacacacacatgatatatatgtgtatatatatgtgtatatatgtgtgtgtatatatacacgtgtatatatgtatgtgtatatatacatatatgtgtgtatatatacatatatgtgtgtgtatatatacatatatatgtgtgtatatatacatatatgtatgtatatgtatgcgtatgtatacacacacatatacatatgtgtgtgtatgtgtatttgtttttggatgctgattgccacactaattacaactgcagaaatggaagcagcctgtatgtctttcagtagaggacagacgagataaattttgatgcatgcatacaatgaagtactaggtatctctaaaagaatgagcttcaatatggaaaaatcactaagattttattaaacaattgcattcatgtaaataaaaattgatgtattcaattttgtctgaaagttttgtgtaaatttgtctaaaaggctagaaagagacttctttaggggagaagatcagtttttgttttttgatttttaaatatttcaatgtaattagactacatcttttaccacatacatgtgtgtttatatacacatacatacacatatttatatacatatgtgtgaacctgtaatggatttttttaaatgttatatgtaaaggtttttttactcactgttcatcacaactttggagtctactccattatctcctgttgttcagtactatcagtaataaatgtcatgcaggtttgattattgttccttttacattaacatttttctttctggaaatccccatttttttatgttttaaacattctgaggtttcacttagtgtttctagatttgggccattttcattccatctgctctgcacatggtagaccccttcattctaaagttttctgtgtcatttaaactcaaatacattttcttctattacttcttcaactatttcctctcacacttattctattcttgtcttatgaaactcttaataggtagtgttggatttgcttctgggttctaactttactcatatttgtcatctttgttctgcatttggaagattaacttgacttgattttctggattagcagtttcaactttattctgtcatttagtctgctgttacattttaattttaattttaatttttgtttttattttagaaacagtgtcttgctgttacctagtagcacagtcacagctcactataaccttgaactctttggctcaagtgattctgctgtctcagcctcccaagtatctgggactacaggcacattgccaccatgcccagctaactaatttatttatattttctttttgtagagatgaggtctttctctattgcccaggctggtctcaaattcctggccttaagccatcctcccacctcagcctcctgaaatgctggcattacaggtgtgaggcagcatggccaaccttagatttaaatttgacaataatgtttttaagtgccaggaactttcttattttttggttgctcctttgcttccttttagtgacttgttcttttatgaacacagtagcttctcacatatctctcagaatgctaacaaaaataaaatgttaaaattctcttctattctcagcaccatctgtttttcccccagtttagtttgcttagtttacccgctgtcactgatgttttcttcaaatgcctggtgatataattgctgagttttatttataaatgaaggactagggtgatgattcaggattatatctgatgaggatttcctctgtatttgtgtaggctgctcctcccctcctcccaccagccttctacctggaatgggacgtcatggtcaggcactgagtaagtggtgggtttgtcctcaggcagactgctgcttcagatttataggcagagagcaggtgggagcccttaaaataactaaattaagaaggaagagtactctggatatgggacatattagggtaaggctttgagtggaagaacagaagggaagaaaatggcaccacccctagagttactgggaaatgtattaaggggaacttttggttgttataacacctgtggaagacaacagccgtttgatgaaaaaaggaatttttttctccctaagtgccagtggtttcctgtttgaaaaaccctgctttagtgcattcactcctaggcaatctcccttcctccatccctcctcctctagtgtcctttgcaaagaacgagatctacctcagcctctactctcttttttttcaggctcccacatccccattcagagccctccccaaagagaacaaacccccactgtctttggaaagaagtttgtggtatttagtcaggccaaaatgtgggctcttctatatgcgattccttaatggcctggaatgactgcccctccactgtgcctgcactttgttgttgttgttgactccaagcttgaattttctctaggaatggtttaggaaattcagctctacatttgttttaaggctttaaatactgatcataaattcagtgtttttaagatgaattcagtttagttttttccactaggatacttccagtggtgtgtccccgtgtgtctcatgttcttaacaccccaccaaacccatcaaataaagagttaactgctttcccttatttccacaatactaataatgcagtaggaagtattgttctaggagttttccatgtattatttagcaataacaaacctgtgagttagataccattgtcattcccccatttaacaggtgaaagaaacccactttaggagggtaagtaatttacccgggttttcaggactagttaagtggtagaatgcaggttctttaccactgtgctgtatcacctttttctgtgattactttatgatgatcttatcaccagtttcatacatgtgtttatacattttggtctactctaataaatttgagtttttggggaacagatggtttgtccatatattttcttcaacatctaaccacgtgcatagcgtctagctgtgagtaaatacctatggaattagctgtgcgcaaagtcctacttttctttgattcaatgaaatattactaaattacagtttcaagatagtagtttgagagggaagatatggatagcatattgtcagtttatagaaaattatttttattgatttaatgttttaagtgaactctggttatggtcaaatcagtatgtgaaaatagttgcatcaaaatttaatcttaagaaaatgaaatttcagtcagttcttttttctttatcatctcttggaaatgtactttacaaaataatgttgctgctgtattgcaaaaaccttagaaatagtgcagatgacttttaagtgcttcctttaagaaaatacttaaaaataatgcatagaatgagattttgtttttcatttcatggatactgtaagttatgcaacatggatctggtgaaataattattttatctgtaaaatataagagcagaagtaatttttaacatcttatgaatgcttaatttagctgtcatattttcaatggaaattcagtttgttgaattaaatgggtgtgaacctatcacctaatgtagttacaaaaggatttttaatattaaaataggcacggcctagtatattaagaatagctcatttacttacagttctaaacctgggtagaaatgcttttgtaaaacaattgttacagaaaacttctggggcagaatataggcgaataaataacacttttattacatttccttaacataataaactgtattgtagacagctagaaatacatttataggcaggaagtattaccgtaaaagcttgccattttagtagactaaagatgccacttctatctttatgccttgttatgcaattcacgggaagttgatagctttaagagtactactctataaacaatatcaccttttgctgcttccaagtattacacaattttatttataaatagtaatatgtacatttaaaactattcttgattttggtaacagaaaaatgtaacatttttgtgactgtgaaactatgccaccaagaagtaatgatgtcccagatgtggcctagttgttggggatgcaaagatgatttctgcactcataaaacttagagtttagaaaggaagttgcacattaaataccaaaaaatttaattatataggtttatcagaattatgaagtatagagtactatgaaagtatgtcttaggagaagttatcctaattagggcagttagggacattgatattttgcccttaaagaatgagtgtgaattaggtatgcaaagatggttgtgtataggtggtggtaagtgcagggagggttttgcatcagggctggggtaatactggtatgtttaaagctgtgggagtggtgcaaattgaatctagcaatatattaaaatgcttataagccataaaatcacattttaattcctcataagttatatgtagataccaggctgttggggtagtctgggtacgatatgataatggcaaggactcattagggggtgatggaaagaaactgatagattctagattctagaaatatttacgaggtagaatttactgcttctttgctgtgtctgtttctactcctaccacttttaagctttgaaatacttttgaatatttttgtacagtgtttctctttagctattccctttgttcatgtggttttttgccttaatactttgctgctgttttaatagagattgtgaagaaaaagaatataaactcaggtagtcaatctaacatattttactgaaccctaggcccactgatttgaaatgtcacctttattgtatattgtttcatttaactactctgaagatttgtctgttcctatgataatactgcactatttgaatatacagtgtttttacagttgatagcaggtacctccttgacatttatgctttcctaaaaaatcatgttggctagttttacgtactttctttttcaggtaaattttaggataaatttacccaaaatgcttttgggatttctattaggatttattcatttttttttaaagaataatttggagagaattggcatttttacgttattggatcttcttacctcagaacacggcttctccatttaatcaatttattttaaatgtctcagcataattttaataattttcatatctgtctgaacattttagtcttatttggttattacgattatttaggaaaactgttgatttttctgtgttgctcttatttatagtcagccaaactctcataaataactttactaattttttcactgatttcttcagacctttctgcagttcttgagaatgcacttatatcatctgcatttcttaaaatgctatgtcttactacattacttaaaacttaaactacaagtttgaaaagtagtcatcgtagtgggcattcttgtctagtccctgacttaatagtaaagcttctgacatttctccattaaatgtgatgcttcctatagaacctggtataaaatgactcttatttccttctgtttttactaaggtaaggttttttccatcagaattgggatttgaattctatctgatatatcttaagcattgagatgagtttgggttttttccttattctatgatattatattaaattacattataattttttaactaagttttgaagtctatgtagaaattggaaagctttcagtcttttctgttttgttttaaaaatgaattatctccatcttaaaggtttgatagactttattcttaaatctctccagatctcatgcctttttttaaagagaggacccttggaaatctttcagtttcttctatttgatctatttcattttttacttctttctttgataattgacattttcttagaaaatcatctacttgactagatttttaaaataaagttgttcattgtattcttaaaagagatttaaaaatctctatacctacagttattttctcatctcgtttctaatgttatttgtgtcttgcctttttttaattaattgacacattaataattgtacatatttatggggtacttagtgatgttttagtacatacaatgtttagtgatcagatcaggataattagcatatccattgtctcaaacatttttcatttatttgtgttgggagcattcgaatatcctctcttcagccgcttgaaaatgtatactgttgtcaactatggtcaccttatggtgctataaaacactagaacttattcctcatatctagctgtaattttgtgtcctttatcacatctcttcctaccccttctttccccctattcttccctgcctctagtaacctctgttctactttctacttctgtaagatcaacttttttagcttccatgtaagagtgagaacttgtgatgtttaactttctgttcctgatttatttcacttgatatcctccagttccatccaggttgctgcacatgacaggattttattcctttttatggctgaatagtattccattatgtatatataccacatttgctttattcatttatctgttattggacactttgattgattctgtatgatgactattatgaatagtgctgcagtaaacatgggggtggcacagatatctcattaatacactgatttcctgtactttgaataaattcccagtagtggcattgctggatgatgtggtagttctatttgtagattttaaggaatctccctactgtcctccattgtggctgtactagtttacatttccaccaatagtgtaaaagagttcctttttctccaaatccttggttaaatttattcttagggttttttttcagttattataaatataatagctttcttgatttttaatgtgtgttgtttgtgtatagatatactactgatttttgtgtatttgtgttctgaaacctgactaaatttatcagttccaagagtttttttggtagtcttttaggcttttctttattgtaagatcatgtcatatgtaaatagtaacaatttgacttcttcctttccaatttggatgccctttatttcttatttgaagagagacaaggacattgtagtaaaagggtaaattaagcaacaggctaaatcaattataaatgcacacaaccctggagcaccagatataaaaggaagtattattacatctaaaaggatagaccctgatacaataatagttggaaacttcagcatcccattctcagcattggacagatcacctagtcagaaaatcaacgagataccagatttaaactgcaccataggccaaatagacctaacagacatttacagaacatttcacccaacagctgcagaatacacatttttttcgtcagcacatgaaacattttctaggaaaaataaaggcaaacatacaatgtcaaaggaaagaaaagtaatgagaagtactgccaaccacatttatgaccatatgttagggcatacaagtcacaaaaatttttaaaaatcaaaataatatcaagtatcttatctgaccacaatgaaataaaactagaaaccagtaacaagagaaacataaaactgtacaaaaacatggaatttcaaccacatgatcctgaatgaccaatgaatgaagaaatttaaaaggaaatttaaaaattccttgaaacaaataaaaatagaaacacaatatatcaaaacctgtgagatacagcaaaagcagtagtaagatactagtttatagcagtaaatgcctgcatcaaaaaaggagaaagatttcaaataacctaatgatgcatctgaaggaactagaaaaacaagaacaaaccaaactcaaaggtagtgaaaggaagaaaataataaggatcagagcagaaagtaaagactaaaataatacaaagtcaacaaaagaagttggttttttaaaaagataaaatcaacaagaaaaaaagagcaaatccaaataaaatcagaaacaaaacatgtcataactgatattacagaaacacaaggatcattgaagactattaggaacaactatatgtcaatacatttgaaaatctagagaaaatagataataaattcctggacatataaaacctaccaagattgagtccagatgagatagaagacctgaacagaccaacaatgtatgatacgactgaatcagtaataaaaaaaaagactcccaacaaaggaaagtccaggactggatggcttcaccactaaattatcttctcaaactattccaaaaattggaggggagggaattcttctaaactcattctacaaggccaaaataaccctgataccaaaaccagacaaggacatcacacaaaaagaaaactacagaccaatatccctactgaacataaatgcaaaaatcctcaacaatattatcaaaccaaatccaacaacacatcaaaaagatcatacaacatgatcaagtgggattacagggatgcagcaatggttcaatatacacaaatcaataaatgtgactcatgaacagaatgaaaaataaaaaccacataatcatctcaatagatgcagaaaaagcgttttgtaaaattcaacattccttcctgataaaaactcaataaattaggtagagaagaaatgtaccttaacaaaataatggccatatatggcaaacccacagctaatatcccattgaaagctgaaaagctttgagcttttcctgtaaggactggaacaagacaagagcatccactctcaccagtcttattcagcacagtactggaaattccagcaagagtgacagaaaggagaaagaaataaaagccatccaaattggaaagggagaaatcaaattgttactgtttacatatggcatgatcttacaataaagaaaagcctaaaagactctacaaaaaaaactcttagaaatggtaaattcagtaaggtttcagaatacaaaataaatacacaaaaatcagtagtatttctatatacaaacaacacacattaaaaatcaagaaagccattatatttacaataactgaaaaaacttttaaagtctgttttatctgaaatgaaataagtgtagcttttggttttcatttacatggaatatcttttttcatctctttgctttccctctgtgtgtcttcacagttgaaatgagtttcttgtaggcaacatgtaattgactcttgttttttaaatccattcatccagtttatattttttaattggggaatccaatccgtttacagccaagggtgttgttgatatgtgaggacttactcctgtcattttgttgttttattttctctttaaaaaatatcccttgtttcttacattctcttattgtttatttttgtggatgagtggttctctgtagtgatgttttgatttcttcgtctatgacttgatgcttttcttttgctgtttttagaactctttgtctttgacttttgacagtttgagtataatgtgccccagagaggactgtttggattttatcaattcgaggacttttgtgcttcctggatctgaatgtccattatctcccaagacttgggaagttttttacaactagctcattaaatatttcctatgatatttcccttctcttcttcttctggaactctcataatgtgaatatttgttcacttaatagtattctttaaattattctttttttctttttgtctgccttagttatttcagaagacctgtcctaagttcagaaattctttcttctgcctggtctagtcctttgttgaagctcttcattgtattttcttctaatttcattcattgaattcttcagctctaagatttctgttttctaatatctctctctttttgaatttctcattcaaacaatgaatcatttttcctaattttgttgaatcatgtatctattattttgtatctcactgtttccttacgattattattttgaattctctttgtgatattttgtatatttcctaataattgggatctgttattggagaattactgtattcctttggaagtgtcacgtttctttgtattttcatgtttgatgtagctctacattgatttatttctacacatatggtagaaaagttgccttttccagttttatggagttgttgaaaaaacttagagtattggttgcgtggggtgcattcactttgtttttaggtagacccacttgtgtagtctctttgcagattcttcagcagtaatcaattttagtgatgtttgtaagtgtttcagtggcctaagctgcaagagtttgtggctgcgatggtgcagctttgccaggggtgggctcactgggctgtttctcaggtcaggggtgcatgagtgaacgctgtgatgaggcaaccaacttggtgtctggcttgctgggattatggccatggggctgttactctggctggtggcatgggcacatgcctgcttggctggcttggagacacaatgcctgggttggggccactgggctatttctcaagttctcaggggtggtgtgcagccactcggccagtctaggggcatgtctgccagaggagaacctactagtctgttttttaggttctgggctgggtgcacaactgcttagccagtctgtgggcatgtttgttgagttcaggcctcctggagtatcttagggtgtaggtgccaatgtggagccagttcaaggacatcttcaccagaggctagcctgccaggctgtttttcaggctcaggacatgggtgtgcaactacccggccaccatggggacatgtcagctgctcagttgctcagggacctctgctgctcaggggagggcatacagtggtgtgactggctcaagggtgggttctccctggatgtgtccaccagactgtttgaccagaagtgctggcagcagggattggtttccttgctctgcaggaccagagccacagcagatcctgtgctcaggctctgtgcagctggggttgtggcattcagacacctgtgtggacttagtggaatgaaaacaactcctaggctggaaaagtgcagggtgtacttcagaaatggttctggtctcaaggtgatcggtgacatgctgcagcagcttggctcacaagggagtaagtgcagatcttgtgctcccagtctgggggaatacagctgtgtgaattcacagcagctccccaaactgggctcagggcttgcaaggactgtggattctcctgtagtaaggattgcatgtgtttgcagtgggagtggaggctgctgaggttcctctgattaccttcctcccctaccaagcctccgctcccacaaggagaagtcccttctgactctgggccattccaggctcggaggatgggatggcagaggcaggatgcctccacgctggccttgtgggctcccagtcatcacaggtacctctccacttccctgctgtacttcggcactctcccttcaacactccagtcaaatcttagctgtttatttattgccgtggtcctttcttgaagcggaggaatgtgcaccagacacttaccgtcagccatcttactgacatcactcttcgtgtcttgtctttttttgattagactagccaagtatttgtctatttaattggtcacttgaaaaagccagctatttactgacttactgattgaatctatctcttttgattggatgacttttgcttttccttttattcgtttctggatttaattaccttgtaaattttggtctttcgtgatccataatagtttactcatactttcctgctctttgcccttttttaatgggagtattcttccgcttgatctttctgtgtatcacaatttaatctttgtttttgtttttgttttcctctctttttatttggtagtaattctgtttctctggaggctcatgcttttgtttgttgaatttggttagtctaatgcatgctgctagttttcataagtgattggtgattcatggtttattcatatttgtaactgaagagtctagattaaatctattaatttttctctagcccatgtaagaatcccatttatggctgggcgcggtagctcacgcctgtaatcccagcactttgggaggccgaggtgggcggatcaggaggtcaggggatggagaccatcctggctaacacggtgaaaccccgtctctactaaaaaatacaaaaaattagctggccgtggtggtgggtgcctgtagtcccagctactcgggaggctgaggcaggagaatggcgtgaacctgggaggcggagcttgcagtgagccgagatcccgccactgcactccagcctgggcaacagagcgagactctgtctcaaaaaaaaaaaaaaaaaagaaagaaaaaagaatcccatttatgtgttattgaatctagggtctgattaaaatgtttatctcctctagtgattattgagaaggagtggaacttgtaggtaacttactttttgagtttagactctcctttcttcccgaaatctctaagtaaatgggaaaaacttccctgtttttctggctcctatcttaactttgtaaggctcccattccagagagcctcttattttatatattaagtttttacatatactagagttgtcttgtgtttatcgatatctgaataattattatagatttatgttttaatattttataggactaaatcattttgctactttaaaaaaatcacgaaagtacattatttgaagtttggagaagaaagggatttggtaacaaaggacagccatttccattttaagcagctaaacagcaggagagatttctgtaagaaggtaccagctcagattccattgttcatcattttggtgagagactgcagaatcacttgtactaagttgggattaggcccatctctcattatttgttataattttgtcacatggtttttctttatcgtttcatatgcttttaggataatatagtttaaaagaactatgtattgtattttgactataaatccaccaaatatacaaactaatttgagaatgattgacagcattataatatttgagatttctttgccaggacaagggatgttgtcaagtttatccatttctagattaaattccatatgattaagagtcagtaacaacttatgaagatctttaaaataaccaaagatctatttcacaatttctttcacttttctactgacttaaacaccaatttgaaaaaaaaacaagcacttcaagaatcaatacagaaggtacattttttaaaaatcttcagtacaactggcgttatgaacactgactaaacatttgataacattaaggaattactgttaatttgctaggtattgctaatttgatactattgctaacagtattttggttatgttgtttaaaaggagtgctgatctttgagacatatacattgaaataggatttctggaatttgcttcaaagttatataaggtagaaagtatataggagtgtgaaacaagattggccatgagttgctaattgttggagctgatcattgtgtggtttattatattattctgttttcttcacatatgtttgaagttttccataataaaagctaaaaataaaaacaaatgtacaatgtcaaaagaaagaaaaataaataatgggaagtactgctaaccacatttatagccacaggacaaaagtacttttaaaaattgattctattgttccctgcccacttaaaggtaacttgttgaccttaagcaaaattactaagtagcttagtttatattctttacttcttatgtcatctttcttcatgttaatccaatacttgttttccttctcctttgtcaagtgcacattgtcctcttgttcgcttctttaccttcaaaaattgtcagtcatccatgaaacccccatggatgaacctgtccaagttaacatacaagagaatgctttgtgagggagatcagggatagaagacaggaaataggtctgatagagtattagaaaaatatttgaatatttagaaaaatactggtaaaaatgtgagaagcttgttggaacatttggaaaaaacttaagagttccatatgaaaaacactattgattttgtttttaaaaattgagagtctgaagatagggaaagtaaaagctgaaacctctagtattctaacagaaaatagataatgtccaaaatgggtcagtcacaaagtagcaatattagcatattatccagaaagaagagaaactacgaacagatctgattagaagaaacaattaaattcctagtaattacttctgggagtaggataagttgggagaagggtaagcagcatggaacagaaaactgtattttataagccatttagtactacaatctgacttttaacagtgtttatattttactttaataaaaataaaagttaatattaaaaacgacttctgtatttactgttgatttattctatgagctaagagataaaactaataaaattaagattataatattgagtgaggggaggggtctagcgtcactctctaacatgtacatatgttgtcccagcaccagctgttgaaaaaactatttttttctttattgaattgtcttggcacattgtcagaatcaattgaccataaatgtatggatttgtttctagcctgttgtttagttgtatgtatgtatatatgctagttccacacagtcttgattactgtagctttttagtaagttttgaaattgagaagtgtgaggtctccaactttgttgttctttttgaagactcttttggctattctggtttttttgagtttccatatgaatggaatgagcttgtcaatttctacaaaaaaagaaaaggcagttcagattttgatagggagtgtattaaacctgtaggttaatttgggaattgttgccattttaataataagtcctctgatccatgaacatgggatgtcattccctttatttagatcttctttcattctttcaatgatgttttatagtttcattgtacaaattttgtactacttctgttacatctatttctcagtattttattgtctttgatgctactgtaaaaggaatggttttcttaatttcatttttggattgtttgtcaccagtgtatagaaatacactatgtgtaacaacatattggttgttttgtattaatcttgtatactgaaaccttggtgaactcacatattaatgataataaatttttgtatattaggattttccatatacagaatcatatgatctgcaaatataaattgttttacttattgctttctagtctggatgccttttctttattttcttttttcttttttttttttttgcttaacagccctgtctagaacctctaatccaaagttgaataaaaatgccaaaagtgtacagccttatttttttccttattaggagtaaaagcaccattaagtatgatattagctgtgggtttttcatagaagccttttatcagagagaagaatttcccttctatttttagtttggtgaatgtttttattatgaaagagttttgggttttgtctaatgattttctttgtctgaagtgtcatttggttttgttcttggttttattaatagagtctgttgagtttttatctgttgaaccactcgttcattcctgggataaagtgaacttggccattatgtacaattgtttgtatatgtcactggattcagtattttgtttaagatttttgcatttgtatttctaggagagattggtggtaatttttttgtgtgtgatgttgttgggtttagtatcagggtaattggtctcatagaatgagttggaaggtgtttccttctcttccgttttttttttttttttgaaggagtttgtgaagtattggttttaattcttttttaactgtttgatagaattcagcagtgaaggctggttctgagcttgtgggaagtttctgattcctaaattagactttttccttcttataagtctgtttgaattttctgttttttcttgagtaatgtttttaaatttgaaaaatacagagcaagtgcaaggttgtaagtatgtgtaaggtagtctgataaagtccaaattacatataaaaatctatcctgctattaattcctgggaagtcaatttgaaactcatactgtttaacaatttcattttttaaaatgttatttttccaaagagtattcttaatgtctagttgcattattaaaataatcttactccataacggcttgaaatttaagggtttttgtttgtttgtttgtttgtttgtttttatgttgcttttatctcagcagcaatgcagcaagtcttggaaaaccttacggagctgccctcgtctactggagcagaagaaatagacctaattttcctcaagggaattatggagaatcctattgtaaaatcacttgctaaggtatatagatttattcataagattactgaattattttggacttagtttttatagagatattttcagatattactattttagaatttggttgatatacattaggtttagttagcaaataaaaacattcagcacataatgaaatcttaacatatgcaaaaattagaccatttttctcttttctactctgactttaaatacaggatgaaatgactcttagttttggcgtaatgcctttaaggtttagagaaatcatacctgcacagttgtgttttaacagggcctgtgaaaaagatcctgatcctatttccattttcaacaatggcaaagtactgattttcttcttttgcattagactgtgtacctacttttcatgtaagttcttgacttcctttatctagtgcttttttgaaattttgttatttgttgcataagcctggtattttaagtctgtttccctagtcaactctggagtaatctctttaactcattgataagtatactttacaaccatttttattaaataattattatatgctaaagcttaatgtattacctattttacaaacctgctataccattctttagagttcccccaaatgactcttgctttcaagaatctatgccacatgccttctttgatcttttcttcatagagccatcttgttccttttggtttttgctctatgagaatgttgatttcactctcttctgtgatttttttcttagccaaagtctgttacttgttttcttccaagacctctgaaaaataccttttacaaggttttctattagtgagagtgaattaatgatgcagattcttcttcttttttttttttttttttttttttttgagaggaagtctcactttgtctcccaggctggagtgcactggcacgatctcagctcactgcaacctctgcctgctgggttcaagtgattctcctgcctcagcctcccgagtagctgggactacaggcgtgtgccaccacccctggctaatttttgtatttttagtagaggaggggtttcaccatgttggcgcaggctggtctcgaactcctgacctcacatgatccacccaccttggcctcctgggattacaggcataagccaccaggcccggccaatgatacagagtcttcattttatttacgtgtttacttatgctaaaatcacatggtataaaggcccttaagtagaaacgaatccatttgcagatcatccaactggaatttttattttagtcattttttactatagcctttccaatgttcattagatatttttatattttaataataatgtgcagggtattgtttcagattcaaacttgtcataaacattaattcctactgttttaaagtaatagctccagggtctgttgaaattagtaggaactatttaaatttctgttaaatagtttacctgggttcttattgtacttttaaaatggttttttactcttttcttgatgtttttctgttgattgtcagttattgtccatgtagctgttacactgttatctccatgtttatttaatttatagcttttgatctatagattttaaaactatataatgcactaacaaatgtttatagtttgcaaaggtctttaaaatacactgttttgtcttcacaacaactttatgaatttaaaatatactgttttatctttcaacaacttttgaattgaaaagtaagactcagtcaataagtgttgtgtctaaggtctctctgctagcaaaagacagatgaggtttaggccatgtgttctatcatcaaattctgtgttctacctactccaacaccgggtgatggggtatgtgtatgtttgtgtatgcttattcttaaaaactggtgggagtaaaaatttactgattttatgccattgatgttggtctttcagaggattatcttgttcattattcttaacagttgcaatggttggatgacttttgagcaggtaaggtgctactgtactcttttgatgataaaaatgaaataaagcaaagagttatccaataatatgcaacattcaggcagattcttaataaggaaaaacaatggtagttcagtattcctataatataggttaaaaaaaatcccaggaataggggaggaattccgcttccaagaaagaaatagtaagtcacagcagcctagcactctcagtataacaaatagaaggaaaaaagaggcacacattgctagatatgcagagaggcagaaatatctggccactaatcatgagaaaaacaacagaggcagtcccataaatggttcttttattagcatttatacacaaggatttgaaaataacttattaatgtacttttagtagaagaaaagggaaaaaaacatgtaaaatatttttagaaaatcagaataaaaaataatcaaatgaacattttaggatcaaaaatacagtatctgaaattagttcactgatagaagactagacacaacagaagagggaataagtgaatttaaagataggttattagaaaatactcaagcaaaaactaatagagaagaaagaatgaaaaaaagataacaatatgtgaaacatactcaaaatatctaatatatgtagtttgtattccagaaagaaaggagagagggaagaagaaatataggtaaaccctatacttttgcatttcactttattcccctttgcagttactgcctttttaataatcaaaatgggcaaaataaccagctagcattataatgacgggatcagattcacacataatattaaccttagatgtaaatggctaaatgccccaattaaaagacatagaccagcaaattggataaagaatcaagacccaccagtctgctgtattcaggagacacatctcatgtgcagtgacacacataggctcaaaataaatggatggaggcagatttaccatacaaatgtaaagcaaaaaaaaagggattgcgatcctaatctctgataaaacagacgttaaaccaacaaagatcaaaaaagacaagggcattacataatggtaaagggatcaatgcaacaagaagagctaactatcctaagtatatatgtacccaatataggagctcccagattcataaagcaagttcttagagacctacagagacttagactcccacaccataatagtcggagattttaacaccccaccgtcaatattagacagctcaacaagacagaaaattaacaaggatattcagaatttgaacttagctttggaccaagtggacctaatagacatctacagaactctccaccccaaatcaacagaatatacattcctctcagcgccacatagcacttattctaaaatggaccacataattggaagtcagtcctcagcaaatgcaaaagaacggaaatcataacaaagaatctctcagaccacagtgcaatcaaattagaactcagggttaagaaactcaaaaccatacaactacatggaaactgaacaacctactcttaaatgactactgggtaaataatgaaattaaggcagaaataaataagtactttgaaaccaatgagatcaaagacacaatgtaccagaatctctgggacacagctaaagcagtgtttagagggaaatttatagcagtaaatgcccacaggagaaagcaggaaagatctaaaatcaacaccctaacatcacaattaaaagaactagagaagcaagagcaattaaattcaaaagctagcagaagacaagaaataactaagatcagagcagaactgaaggagatagagacatgaaaaacccttcaaaaaaacaatcattgaatccaggagctggttttttgaaaagattagcaaaatagatagaccgctagccagactagtaaagaagaaaagagggaagaatcaaatagatacaataaaaaatggtaaaggggataccatcactgatcccgcagaaatataaactaccatcagaaaatactataaacacctctctgccaataaactagaaaatctaaaagaaatggataagtaattcgtggacacataacaccctcccaagactaaaccaggaagaagtcaaatccctgaatagaccactaacaagttctgaaatagacagtaataatagcctaccaaccaaaaaaagcccaggaccagacagattcacagccagattctaccagagatacaaacaggagctggtaccattccttctgaaactattccaaacaacagaaaaagagagactcctccctaactcattttatgaggccagcatcatcctgataacaaaacctggcagagacacaacaaaaaagaaaatttcaggccaatatccctgatgaacatcgatgtgaaaatcctcaataaaatactggcaaaccgaatccagcagcacattaaaaggcttatccaccacgatcaagttggcttcatccctgggatgcaaggcaggttcaacatgcacaaatgcataatataatccatcacataagcagaaccaatgatgaaaatcacatgattatcttaatagatgcagaaaaggcctttgacaaaattcagcccctcttcatgctaaaaacactcaataaactaggtattgatggaacatatctcaaaataagagctatttatgacaaaccaacagccaatatcatactgaatgggcaaaagctagaagtattccctttgaaaactggcacaagacaaggatgcactctctcaccactcttattcaacgtagtattggaagttctggcccaagagaaggaaataaagcgtattcaaataggaagagaggaagtcaaattatctctttttgcagatgacatatttagaaaaccccattgtctcagcccaaaagctccttaagctgataagcaacttcagcaaagtctcaggatacaaaatcagcgcgcaaaaatcccaagcattcctatacagcaataatagacaaaaagagagccaaatcatgagtaaacttccattcacaattgctacaaagagaataaaacacctaggaatacaacttacaagggatgtgaaggacctcttcaaggaaaactacaaaccactgctcaaggaaataaggacacaaacaaatggaaaaacattccatgctcatggataggaagaatcaatatcatgaaaatggtgatactgcccaaagtaatatataatctcaatgctattcccatcaagctaccattgactttcttcacagagttagaaaaaactactttaaatttcatatggaaccaaaaaagagccggtatagcctagacaatcctaagcaaaaagaacaaagctggaggcatcacgctacctgacttcaaactatactacaaggctacagtaactaaaacaccatggtactggtacaaaaacaaatatatagaccaatggaacaggacagaggcctcagaaatgacatgacacatctacaaccatctggtctttgacaaaccagacaaaaacaagcaatggggaaaggattcgctatttaataaatgatgttgggaaaactagccatatgcagaaaactgaaactgtaccccttccttacaccttattacaaaaattaagtcaagatagattaaagacttaaacgtaagacctaagaccataaaaaccctagaagaaaacctaggcagtaccattcagggcataggcatgagcacagacttcatgattaaaacaccaaatgcaattgcaacaaaagccaaaattgacaaatgggatctaactaaagagcttctgcacaacaaaagaaactatcatcggagtgaacaggcagcctacagaatgggagaaaaattttgcaagctatccgtctgacaaagggctaatatccagactctacaaggaacttaaaaatttacaagaaaaaaacaaccccatcaaaaagtgggcaaaggatatgaacagacatttctcaaaagaagacatttatgcagccagcagacacatgaaaaaatgctcatcatcactggtcattagagaaatgcaaatcaaaactgcaatgagataccttctcacaccagttagaatggtgatcattaaaaagtctggaaacaacagatactgaagaggatgtggagaaatagaaatacttttacactgttgctgggagtgtaaattaattcaagcattgtggaagacagtgtggcaattcctcaaggatctagaactagaaataccatttgacccagcaatccattattgggtatatacccaaaggagtataaatcattctactataaagacacatgcacatgtatgtttattgcagcactattcacaatagcaaagacttggaaccaacccaaatgcccatcaatgatagactggataaagaaaatgtggcacatatacaccatggaatagtatgcggccataaaaaatgatgagttcacgtcctttgcagggacattgatagagctgtaaaccatcattttcagcaaaataacacaggagcagaaaaccaaacaccgcatgttttcttttaagtgggtgtaagttgaacaatgaagaacatatggacacagggaggggaacatcacacaccgatccctgtcgggggtttgggaggcaaggggaggggggatagcattaggagaaatacctaatgtagatgatgggttgatgggtgcagcaaaccaccatggcacatttgtacttatgtaacaaacatgcacgttctgtacattatcccagaacttaaagtataataataatttttaaaaaaaagaagaagaagctgcaacaagttacccagaagatctagctgagatcattgattccagtggctacacttaacaacagattttcgatgcagacacagcagctttgttttggaagaacatctagagctttcacagctagagagaagtcaatacctgccttcaaaggacaggctgactctttggttaggagcttatgcagctgatgactttaagtggaagccaatgctcatttaccactctgaagatcctagagcccttaagaattatgcgaattctactctgcctgtgccctctaactggaacaacaaaacctagctgacagcacatctgtttacagcatggtgtgctacatattttaatcccactgttgggatttactgctcagaaaaaaagatttctttcaaaatactactggttattgacaacacacttggtcacccaagagctcggacagaaatgtacaaagagaggaatgttgttttcattcctgcagacacaacatctcttctactcatggattaaggggtaattttgactttcaagtcttagttaaatacatttcataggactacagctgccatagatttcgattcctctaatggatctggataaagtaaattgcaagccttccagaaagggtttactattctagatgccattaagaacatttgtgatgcatgggagaaggtcagaatatcaacattcacatgagttggggagaagttgagtccagctctcatggatgactttgagggattccagacttcagtggaggaagtcactttagatgacaagtgactttcacttagatgaaagatgacactttcttgactttagaagacaagaaaacaagaattagaagtggaacctgaagatgtgactacattgctgcaatgtcatgataaaacttgaacagataaggagttgcttcttgtggaggagcaaagaaagtggtctcttcagattgaatctattcctggtgaagatgctgtgaaaattgttgaaatgataacaaaggattacaaatattacataaagtttaggtgataaagcaggagcagtttgaaagaattgactccaattttgaaagttttgcttggataaaatgctctcaaacaacattgcatgctatggagaaatctttcatgaaaggagagtccatcaatgtggcaaaccttattattgtcttattttaagaaattgccacagccacccaagccttcagcaaccaccgccttgatcagtcagcagccatcagcatcaagacaagaccttacacaggcaaaaagattttgactctgtgaaggctctgatccttagcattttaacctttaaagtatttttaaattaagatatgtatattgtcttttagacatattgcagttgcacacttaatagatcaccttgtcatgtaaacataacttttatatacacagggaaacaaaaaaatttgtgtgacttactttgttgcagtatttgctttattgtggttatcttgagcagaacctgcagtatctctgagctatgcctgtacagctagtagaatgttgaaaccttcaactataatagtagattaacctatctctttttgcagttctgtcagattttacctcccatattttaatgctcttttgttaaacacacattcactaagattgttatatcatctcagagaatcaactcttatcgttatgtaatgcctctctttgttcccaataatttttcttgatctgaagtctgccctgtctgaaattaatatagctactccagttttctttagttaatgttagcatgatacacctttctccatacctttagttttaatctctctatatctttgtatttaaagtaagtttctggtagacaacatgtaattcgatcttttttaattcactctgacagtctctttgtttttttatttttagacggagtcttgctctgttgccaggctggagtgcagtggtgccatcttggctcactgcaacctccgattccctggttcaagcaattctcctgcctcagcctctcaagtagctgggattacaggcacgcccagcttatttttgtattttcagtagtgactggtttcaccacgttggccagggtggtctcaatctcctgaccttgtgatctgcccacgtcggcctcccaaaatgctaggattacaggtgtgagccaccgcatccagccaacagtctcttttaagtgctttagatcactgatgtttcatgtttattgatataattcgattaacgtctttcatactgttactgttttgtatttgttgcctgcttgcctgcctgccttccttttttccttgtgtctctcactcattttgttttctctgctttaactaaacattgtatgtgatttcaattttctctctcttagcatgttagactttaaaaaaaaaactttttagcagttctccttgattttgcagtatacgtttgcaatctaatacactttcgaataacatcataccacttacagtgcaactaccttataaaataacactgtttcctgtcccatataatattgctgccattcatttattcataagctataataatcaaatacattgttgtgaataaaactattatctattaaatcaattaggaataagaaaaataaaagattttattttaccttttttttctctagcactcgtctttatatcaacccaagttttgcacttacaccattttccttctttctgatgaatgtcttttaacatttcttgcaagacaggtgtagtagtaacaaatattctcaatttttgttgaaaaagtcctttttttttttaacttttttatgataactttactggataggtaattccaggttggtggagtttttttttttttttttttctttcaacatttaaagatttcactctattctctgcttgcatgtttcctgaagagttcagtataattcttatgcttgctcctctgcaggtaaggttgccccccccccaccccgatctttcagtattttgttttttattttctgcagtttgaatataatatacctagacttagaattcggggtttttaatcctgcacagtgttctatgagtctcgtggatctgtggtttggtgtccatcattaatttaggaaaattctcagtttcagattttgtagcattttggattttagatttttggattggggatactcaacctatattatgaatattgctgccataaacattcttggacacacttttatgtagacgtagttttttatttctcctgtgtatataagtaggtaactgtgtttcattgaggaactgccggactgttatccatagtagctgtaccattttttattcccaccagtagtgtacaagagttctaatatctctgtatcatcttcaacacttgttattatttgattttttggttcttaactgtcctagtgggtgtgaagtggtattttattgtggttttgatttgtgtttccctggagactaatgatattgagcatcttttcatgtgcttattgaccatttgtacatattttttggagaaatatctgtttagattctttgcccatgtttaaattgagtcatatttatttttattatgaagttgtgagagtctttcatgtattctgggtacaagtcttttatgagatatatcatttgcaaatatttctcccattatatagattatctttttactttcttcttagtgccttttgaagcacagaagtttttgttttttgttttttatttttatttttttgagatggagtcttgctctgccgcccaggctggagtgcagtggcacgatctcggcccactgcaagctctgccttctgggttcatgccattctcctgcttcagcctcctgagtagctgggactacaggcgcccgccatcacacccggctaattttttgtatttttagtagaaacggggtttcaccgtgttagccagtatggtctcgatctcctgacctcgtgatccatccgcctcggcctcctaaagtgctgggattacagtcgtgagccaccacgcccggctgaagcacagaagcttttaatttgatgaagtccaagttgtctttttgtcttttgttgccttgtgattttggtcttatatgtaagaatcttttgctaaatccatggtcatgaagatttacccctgtgtttccgaagagctttatagttttagctcttacatttaggtgttggatccattttaagttagttttttgtatacgatattacgttaggcaccaacttctgtcttttacatgtgcttctctagtccatttgttggactttcaaatggtgtttcagcaccatttgttgaaaggaatattttttccccattgagtggttttgggcacctttgtcttaacatgcaacagttggccactgacatgtggttttatttttttactttcaattctattccattgatctatagatctttccttgtggcagcatcatgttttgataactcttgtgtagtactttttgaaatgaggaaatgtaagtactcccattttgttctttttcaggatagttttcactgttctggatccctttgcaactctataagaattttagaatcagtttgtcaatttctataaacatgtcacttaggattccagtaggcattgcattgaatccgtagttcgttctggggagtattgccatcttaacagtgatgtcttctaatccataaacatttatttaaatctttaatttctttcaacaatgttttataattttcagagtataaattttgcacttgttttgttagttatactcctaggtattttgttctttttgctgctgttatgaatggatttgttttttaaatttcattttcagatttttcattgctagtgtatagaaatataattgatttttgtatattgatcttatatatcttgcatccttgctgaacttatttttttattcaaatagtcttttagtgaactccttaggattttctaaatacaaggtcatgtcatctgaatatagacagttttatttctttttaacctgaatggcttttttatttttcttgcctaattgtcctggctataacctccagtacaaatgttaaatagaagtgatgagagtggacatctttgtcttgtttctgctcttaaggggaagtatctaatctttcactagtaaatataatggaagttgtgggtttatactgctatcctataccttgattttttgcataagattttatatcagtacctgtgtcacaactttattctttgtaaatgtgacataatattttattttatggatatgtcaggttttttgagtcagcctgctgatatttagatggcctttttcttacaagttatgctgtaatgtgtaatcttgctacatgttattttgtacatacacacacacacctttttaggatagatctgaaaagaatcactgtaaggccaggcgcggtggctcatgcctataatcctagcactttgggaggctgaggcgggcggatcacctgaggtcaagagttcgagtccagcctgaccaacatggagaaaccctgtctctactaaaaatacaaaaattagccaggcatggtggcgcatgcctgtaattccagctactcaggaggctgaggcaggagaatcgcttgaacccgggaggtggaggttgcagtgagccgagatcacatcattgcactccagcctgggcaacaagagcaaaactctatctcaaaaaaaaaaaaaaaaaaaaagtatcactgtaatttaggtggatatggtgaatttgcttaccagtgtatgttcccactagaaaaaatatgtcaaagtgcctgtcttctcccatattctcattagcatgatgtgttatcagaatttttatctctgccaatctgataaagagaaaagggatttcattatagttttagtttgtacttctgagtgaagttgtgtgtcttttcatatgtttaagagatatttgatacacagtaggtgactattgcaaataactatgtaatacatatttcaagatagctagaagagaagattgtgaatgttggcatcccaacgaaataaatatttaaaataatggatatggtaattaccccatttgatcattatactatgtatatacatgcattgaaacgtcacattgtacaccataaatatgtacaatatgtatcaattagaaatataaaattaaatttttaaagataggttcctaaatttttctttctgtgaatttctttgctgaaactcttcacccagttctcttaatgagttgttgatctttttcttattgatttgtagaagtccttcgtaagtagggaaattagctttctgtcttgaatatgatttgtgttttgaccctagtttgtcatttgtattttgactttgtcgatttttgatgagaaatttaaaacgttcattaagttaattttattgggccttttttgaaataatgtatgtatctttcagattttgtgttatagttagaaagatccttcccactcaaaggttataaaaaggttattgtgtatttcctctgaatactattaaagccaagcttttaaaatgttgttttttcttttaaaaatttaacagattcccttttctggttttttgacatctgtgtggttctcctgattctacagatatatctaagagaagctcagcagtgctatttagaagtttcctgagtaccttgatatgtaacttatctaatctcggaatttgtattttggttaactaggcaatttctgatatgttctttactcactagagaattccattctgatttacttacacttactcatctttttttttttttttttttcagagcaaagctcatcctttttgatataatgtatgcagaaacaaaatagaaattgagttctccattctctctgtctcatttctactttctgctcaaaaattcttttttatttttgagtattagtgagcctgtgttgatcttgagttttaggtctctagaataaaagaagagggtggtgcttgatcacagccaaacttatttcccatttacttagctttttcaagaaataataagtaactactacatacatagctcttttctcaaaagatagaaacaaaatttatgatatggtccttgtgttttagaaagaccaggtttctacacataacaataatatgattgttattagaaaataatatttgtcactttagatatagcccacaacttttgtttgcaagcatggttggagtgtccttgagtgaaatacccagaagttctgaaagaacattttcttctctgaagttcatttctcaaaggtgcagtggtgaataaaattctcagaactggatatttaagaaggctaggccatatttgtatcagctgcaaatactcaatgccagtcatagaatgttcttccaaccacttgtggcaagtgaaatatatttttattgagttatgctagtgttgcaatagtgctctttaatttaaaaaaagaaaacaagatttatttatttaaatagtatgtggctcacttgctcctctggttattttttgtgtgtgtttcctttgtcttttttagtttgattagttaaatttaagttggtacttgcctcttgaaagctaataaaaaaaatctgaccttaaagtgaattagaggttccaagtttttgacaacatctcagagcttaaaaagctatatgttaataaatgtggacctgcatttgctttcttagaaaaagtaaaattgatcccagttgaatccaagtatgttggttttccatgttaatatatttatagctacagtttctaaaaaaacctttttttctcccttcaatttctgtattttctagtgagattctcttcttccatagaaccaaactgtgaggctgatatgaaaaaatcttcagatgtgcttgggttctttttctaacatgattctgccttctcacatgactctcccctgacccccaaccccttgccattagtctttccacattcctacttctcctcacccaatttggaagcattaggttaatacacatactaaggaatggagttttcaagtcattgatcatttctgttcctttacttctcctaaagtcctgaattaaaccaaggactactgttgtctaaagtactgttgctgatcatataacattttcctgaagaaataaatggtcttcatagctcttacttagagcaaaggagtgaaagtcaaagggacgagtggtattctgaaccatagaagtataaaataactgtgaggatagatacggtgtaatggaattaacacatctagactggaagagccatgctaatcagcaacaactaaattagactgactgagatgtatgtcatacatttaagtgaatgagaataatgcatcatttattggattgaataattaactgcaatttaatgttagagtggctctctatataaagatgaagtaaagtaagctttaatagatgagagttcaagtcttggtgttagactacttgactctgccattcaccagtaatgtgaactcacgcaaatcacttcacctttttttgcatcagtttcttcgtccatagtgtgagtataatatacctacctttgctgaatacacacacacacacacacacacacacactacttagaatatagtatccaacgcagaaaaaaaagcccttcaatagatgttaaggttctttccttcctttttttttcctttgaagctttctttttatactatgttaaaagaattggagtattacaaggttaaagatgctaaatcaggtagtggctttttattccagcaaatatttctatctaaacaattggcaattctagcttatttcataagagttaactaattctgtagattattttcttttttttttttccaatggtgatagtcttttatgataaatattgagtgtcctcatcttctcatccttatctggcttgtattatatgttcagaaaattacaaatttacccgttttcattttttgtggcattttctagtctaattttttttttttttttttttttttgagacggagtctctgtcacccacgctggagtgcagtggcatgatcttggctcactgcagcctccgcctcctgggttcaagcaattctcctgcctcagccttctgggtaactgggattacaggcgtccaccaccatgcctgcctaatttttgtattcttagtagagatggggtttcaccatgttgggcaggctggtctcgaactcctgagctcaagtgatctgcccatcttggcctcccaaagtgctgggattacagacatgagccactgtagtttaatttttttaatctaaatctcataaaacttcttcctctatttcaattacttttggtcttttgatatttttctttttgtttagtaagagttttttcttctttctcggtatttcatatgacttttagaatttcttcttttaaggtctttctttaaaatcttgcttaatatatagctttcttttccacttaagaacttattttactcctgtgaattacctagaaaaaatagatttaagcaagaaaaattgtcttttaaaaattagaatgttttatttggactctgaaggatccactctatggtaaaaataacatctaaagtattatagtttaggtatctgaaaaagtttagttgatactgttaccacttgaaatgtggatttttctttagcaatccttgaaatggatcttaaaatataagatttgctatcttacatggttttgtttatgaattaaattttgataattacgcttttcctgtcttcagaattgtatagcaaccatttatcagaaaagcaaggaatgcttaaaagttggagccgcttagtgttcattctcaatttgaacttaacactcggctttactcctactatgaaaggatgattagaattactttcggccgagggcggtggctcatgcctgtaatcccagcactttgggaggccgaggcgggtggatcacgaggtcaggagatcaagaccatcctggctaacatggtgaaaccctgtctctactaaaaatacaaaaaattagccaggcttggtggcgggtacctgtagtcccagctacttgggaggctgaggcaggagaatggcgtgaacccgggaggcggagcttgcagtgagctgaggtcgcgccactgcactccagcctgggcaacagtgcgagactccatctcaaaaaaaaaaaaaaaaaaaaaaagaattacttactttctgtgacagtgtggttgacggtctattttctgtggaaaagattgtgagattaagaaaaaaacaactttacttataaagacagatgatcatttccctgattaaattatatagtcttttaaaatccagtttaagggccacttgctctaaattgacttttttttccactgattttcaacattggaagataggagcttccagattctggggtttccaaaattatttttatcattttaaaaaatattaacatataattattacattcctattccttgtttttattatgcttaatcatttattttaataaaatgtaacaataacatctagagtttgagccttgaccctaggaggtcgttaggaaattctcttggtggtaagggactgtaataggttttgtaaataattagctgacttgtccagttttttcatggtttagttataaaaatgagtttttcatgactttcaggatagaactagaggccaagatttattatattgcatgatatacttactgtaaaatctatatattgcctctggttgaagtattaaatttggtttacatgaattaaatctccaagtaatatattttaaaactttacgaaaaagaaataaaccatggtctggtgcaaataacaaataagtattactactttaatatactcttattttttcaggctcatgagaggctagaagattccaaactagaagctgtcagtgacaataacttggaattagtcaatgaaattcttgaagacatcactcctctaataaatgtggatgaaaatgtggcagaattggttggtatactcaaagaacctcacttccaggtaactttccctatcactcaactctcaagttccctgtattcccaaagtattctcctttactttccagtttaaggtgatgttttcttcaaagattatttagggctataataggtaagtatgtaaattccaaccttggtattttaatgtcctcatatgctgaggatatataaagagacatatgtaacaataatgctacataaatgtacactgttacagaaatacatcacaatggatttttctttgtgccattaaagaaaacaaccttaattcaccgtcagaccacatgctggagccattttcctcactatgataatggatttttttcttcctcattcccattctgtttcttagtcaatactttttagtattgcttctcaagattgttgtgcagtcagtgaccatggaacatagagagctgtgaagtatagaaactattgtataacataatctccacaggtacagaaataagtatgattttagcaatggcctgtaccaatgaagagttcatcagttttacaaagaagaatgcatttcagaagagaaaagacaggaaagatttcttgtaaacgtataataattaagacagtgtggtattggggaaggtgttagaaaaattaactcattgaaaagaatggaaatccccgataaatacatccagccgtatatggtaacttgatttatgactgggacactgcattttcgtggaaaaagaatggtgctgggatagaataaagtaaatgtcacctgctttcccctgcaaatcttagcactgaaaatcaaatggtaacagccttttgctctttctcagccaaagattttatgtgactcttcaacaatgttactgcaaaatatgaaggtttatagtgagatggttccgacataaattagtgtcttaggtacaaaagaaatatggacacatatctcagagacatatcctgtgcaggtcccagttgattgagtccttataaaggcatactgagttatttggactttatcgtaaggacaatgggaaactttaggtgtggagggggagatgaataggaaaggaggatgggttgggtattaaccagggaaaggtcaggtttgtgaaatgagatggttaagttccaaggcaagaaattatgatggcagtacgtatagatagaaatttaaagactttcaagttttaatgaataaaatcaacaggatatagtgattggttgcatatgacagttgtagaagagagatgtgggaagttgataacacaatttatgacttaaacgatggctgttgaatgaggtaaggaacactagaagaaaatgttttggacatacttatgttaaggaaactggccaccttaggtttgtgatacattggaagcatctaggttttcaggaatgctacttattattagtaaatatttgtaatttaataaatatataagcacatacattatatgaagtgtagcatataaaaattttagaataccagcaaataaaaatacaaaaatgaagacattgcttttcttctacccagatcactattgtactcttagcgcatattcatccatatttttctatgcacaaatgtacatatataatttttttactaatttgagattttgcacaaactgttttaacttactctttttttaagttattgatttctaattttctgtttcagtgaacttccatctcatataatacacacaccatattcagacttctccatttgataccacaatattatttacaggtggtttgtacatataagtgtccagtttaggtccatgtgtggcagctggttgcaccataccttttccccttgattatgacattgacctattgaaaagaccaggctattgtcctgcagaatgttccacccccggatttgtttagttacttccctgtggtgttgatgttatttcttctatttcctataaacagaagttctatctaaaaagttgatgattcaagttgattatttggagctagaatacatcttaagtgatacgatgcaacatgaattaaactgcattagaagatgtgtaataccttttggcccaccacagggctgagattggtcctttgattaaaggtggtgatggcctaatcctttctttgattactgggaagtaatcaattgtgtttttatcttaacattatacaaattctgttctctatcaaccatgtacctactgatgaacacaagttaataatccttgcctaaatcaatattttcttttttcttttttttttttttttacttttgttttaggattaggggtacatgtaaaggtttgttacataggtaaacacatgtaatgggggtttgttgtacatattattttaccacacggatattaagcccagtacccaatagttatcttgtctgtttctctcccttctctcaccctccccactcaggtagaccccagtctctgtttttcccttcttgttgttcataagttcttaccatttagctcccacttacaagtgagaacatgcattatttggttttctgttcctgcgttagtttgctaaggataatagcctccagctccattcatgttgccacaaaagacatgatctcatttttatggctgcccaacctcattgatcttttgaaaggttttttggtattccatggtgtgtgtgtgtgtatatatatatatatcacattttctttatccaatctatcattgacaggcatttaggttgatttgtgtctttgctgttgtgaatagtgctgcaatgaacatttgcatgcatgtctttatggtaggaagatttatattcctctgggtatatacccagtaatgggattgctgggtcaaatggtagttctgcttttagctctttgatgaatctccatactgctttctacagtggttgagctaatatacattcccaccaagaaggtacgagtgttcccttttctctgcaaccttaacagcatctggtattttttgaccttttaataatagccattctgactggtgtgagatggtgtctcattgtggttttgatttgcgtttctctaacgatcagtgatattgagctttttttcatatccttgttggccacatgtatgtcttcttttgagaagtgtctgttcatgttctttgcccacttaaatgggcaaagaacttgtaaatttgtttaaggtccttatagatgctggatactagacatttgtcagatgcatcatttgcaaatgttttctcacattctgtaggctctttactctgttgatagtttcttttgctgtgcagaagctcttcagtttaattagatctcatttgtcaatattggcttttgttgtgattgcttttgatgtctttgttgtgaaatctttgaccattcctatggccaggatggtattgcgcaggttgtcttctggggtttttacatttaaatctttaatccatctcaagttgatttttgtgtactatataaagaaggggctgagcttcaatcttctgcatatggctagctggttatcccagcaccatttattgaatagggagtcttttccccgttgtttgtttttgtcagctttgtcaaagatcagatagtcatagatgtgcagccttatttctaagctctcttttctgttccactggtctatgtgcctgtttttgtaccagtatcatgctgttttggttactgtagccttgtagtatagtttgaagttgggtaatgtgatgcccccagctttgttctttttgcttaagattgccttggctattcgggcccttttttggttccatatgaattttaaaatatttttttctagttctgtgaagaatgtcattggtagtttgataggaatagcattgactctgtaaattgctttgggcagtgtagccattttaataatattggttcttcctatccatgagcacgggatgtttctccatttgtttgtgtcttctctgatttctttgagcagtgttttgtaattctcattgtagaaatctttcacctccctggttagctatgttcctaggtaatttattctttttgtggcaattgtgaatgggattgcctttctgatttggctcttcctttggctgttgttggtgtatatgaatgctagtgatttttgtacattgattttgtatcctgcaaaatttgtatcattcggaaggatacaaaggactttgtatccttggctgaagttatcagctggaggagcttttgggctgagactatggggttttctatatatagaattacgtcatctgcaaacagaaatagtttgtcttcctctcatcctatctggatgccctgtatttgtttctcttgcctgattgctctggctgggacttctaatactatgttgaatagaagtggtgagagaagtcatccttgtcttgtgctggttttcaaggggagtgcttccagcttttgcccattcagtataatgttggctgtgggtttgtcatagatggctcttattattttgaggtatgttcctttaatacctagttaattgataatttttaacatgaagggttgttgaattttattggaagccttttctgctctattgaggtaattatgtagtttttgtctttagttctgtttatgtgatgaatcacatttattgatttgcaaatgttgaacagaccttgcattctggggatgaagcctacttgatcatggtggattagctttttgatgtgccgattgatttggtttgcaagtattttgttgaggattttgacattaatgtttgtcaaggatattggcctaaagttttctttttctgttgtgtttctgccaggttttgatataaagatgaggctgccctcatagaattagttggggaggagttcctcctcagttttttggaatagcttttctgtaggaatggtaccatctcttatttgtacatctgatagcattcagctgtgaatccatcaggtcccaggctttttttggttgataaactatttattactgattcaatttcggaggttgttattggtctatgcagggaatcaatttattcctggctcagtcttcggaggttgtatatgtctaggaatttatctctcttctaggttttctggtttgtgtgcatggaagtgttcatagtagtttctcatggttgtttttatttctgtgggttcagtagtaacattcccttcatcatttctaattgtgtttatttggctctcctctcttttcttctttattagtctagctagtggcttgtctattaattttttcaaaaacccaactcctggattctgattttttgttgttgttgttgttgttttaatttaatttaattaatttttttttttttttgagatggagtcactgtgttgtccaggctggagtgcagtggcacgatctcggttctctgcagcctccacctcccaggttcaagcaattctcctgcctcagcctcccaagtagctgggactaggcagtcacgtgccgtgacacccagctaatttttgtatttttagtagagacagtgtttcactatgttggccaggctggtcttgaactcctgacctcaggtgatctgcccacctcggcctcccaaagtgctgggattacaggcgtgagccatcatatcatgcccagcctcattgatcttttggaaggttttttgtgtctcagttttcttcagctcagctctaatttttgttatttctcatcttattctagcttttgggttgtaaatcagaattttcattagaggttgcaaaatgacgtttttctgttctacattattagctagtattcttccataatgtagagcttctcatcaactgggctgcttagtgcatttctactgaagaggcaggaatgtacttgatccttccttttactaagtttcaaagtgaagagctgtttaaaattgcagtttcaagtggtaacaaatgagttttttcagtctttttttaaatagcattgtggatctatggattttttattcagtgttttaatcttttacaatccctacttttgattttcaaattgccgtgactttgacgagttgtgggcaaatttttactataaaaatctgaagcacatgagatttctgaactagagatagaaatttaagagttgtcaatgcataagtagtggctcaagtcacaggagtaaatgaaactgccaaaggaggatatagggtggaaaactaagcagcgcaggttagcaacttccagcatttataggaagaatccttacatatggatttatgagttgttttattgaatttttttctccagtgtttcacaaattgttttatgaaatgaccagaaattaccaattatcctgattgcttttttcccgaacctgttaatatttgcttctttctattttgatttattgtttttgaacttgaattctatccagcccctcaagaatgttaacttatctttatgttgaatatgcacagttgcagtaaaaattattcttttttttttttttttttttgagacagagtttcactcttgttgcccaggctggagtacaatggtgcaatctcggctcactgcaacctctgcctcccgggttcaagcagttctcctgcctcagcctcccgagtagctgggattacaggcacacaccaccacgcccagctaattttttgtgtttttagtagagacagagtgttgccatgttggccaggctagtcttgaactcctgacctcacatgatccacctgcctcggcctcccaaactgctggtattacaggcatgagccaccgcgcctgccctaaaaattattcttttaggataagaaatgaaaaaaaatttaacattttagtattaattaagaaattccttgggaggccgaggtgggcggatcatgaggtcaggagatcgagaccatcctagctaacacggtgaaaccccgtctctactaaaaatacaaaaaattagctgggcatggtggcatgcgcctgtagtcccagctacttgggaggctgaggcaggagaatcacttgaacccaggaagtgggggttgcagtgagccgagatcacaccactgcactccagcctaggtgacagagtgagactctgtctcaaaaaaaaaaaaaaaaaagcaattcctagaaagctagatcaaaaccacccatgctggtagcacatacatagtaagtataggaggtaaaaaaaatacgttatattcgggactattactgacttgtttttttgctcaaaaaatgttccttttataaactaaaacctttattggtaatataaaattttttgtcactgatataagatgctaatatttatccattttctgttggacatcttttaacagacgttttctacatataaaaagtatatcatattactaacatagcaatgttaggtaaaaatgtcatttgaatttgaatttttatggtattttagtaaataggattgatggtaaatattgaatgatatgatgacagtggtggcaataaaacccagtaccttcattgcaccagactggaaacctaggttcagtttccagtgaacttgccagtttttaaaaagcatcactaatatctcttcatatctcaaagaaggaatataatattgtttgatgataataaaactatatatttttatatctcttaaaaattatatatttatttgatcaacctgatatttgggaatttaataccatgtgccttggaaatttttagtactccattggaataatgaaataacaaagtacttttagtaacaaatttcatccacatatcataaataaccacaggctattttgactccttatagtcactgttggaggcccatgatattgtggcatcaaagtgttatgattcacctccatcaagcccagaaatgaataattcttctatcaataatcagttattaccagtagatgccattcgtattcttggtattcacaaaagagctggggaaccactggtgagtacagataaatcagtaccctattaaatctgaaatatgacataatttgtggttcagtcactactctgtttcattttttttccttttcataatgttatgaaaactgtattcttgtttggcctgtgtataaagacacagctgatgctttctcaacttggtttagcctgcaaaatttaactaaaatgaaaagttaaactgagctagaagtagaaatatggcaaggggtagcaaaaaatttcagaagatgactattatgtttcttcctaccctttgaagacatgaactaccctttgaagaaatactgacagtatcaaaatataaaaagaagttgttattaaaaattgaagccatactaggactctctaagtagtgaagtttactattccttggtaaaattattacttctggatcctgactataagaacagtgagtgcaaaaaaggaaaagccaggaataagtccatcagaatgcacaaataccttttcctgctctctcgagtttccatttagcctgtaagatacatcctatccactagtgtaataaactatactagtacacagtttaatgggagtgaaatattgagacaggagagaacatgggaaaagtaagaatgattcattttacctagttttagaattattttcttacatatgctcatgaatatttaagcatttctccctaataattaatgagaaatctgtttcttatttttcatagggtgtgacatttagggttgaaaataatgatctggtaattgcccgaatcctccatgggggaatgatagatcgacaaggtctacttcatgtgggagatataattaaagaagtcaatggccatgaggttggaaataatccaaaggaattacaagaattactgaaaaatattagtggaagtgtcaccctaaaaatcttaccaagttatagagataccattactcctcaacaggttagtaataaaatttttggtagtattaaaaatactttcatgtttttaatcacagtgttggaaataactatcagttgctactattttgctaaagaaaagagaaaaaattgatttgagtgttctgaaatggcttattttgtcatgggtgaatttttgaatttttaaacaatgctattttactattgtaaaggaaatagtagatttcttcattaacaccaggaaccctggcataatagtaacctacagctaggtatcagaagaaccataaagtctttgaattactaatctagtaaacatttctgacagctgttatgttcaggcattgtattaggccctgggagaggataaaaatgcagtccagatcacctccagcttagtgtttgtgtcatgggtgaaatgactgatgaggccagaaaagaggatgggtataaagaaaatcttggacccctggtttgcacacatttgatctgtattttaaaactaattttaggtaaactaggtaattgaacgggaaaatgttttagttatagagattgtctagactcggtatgttaagtgaattcaaaaagaagagagatgagattatgtaaccaggtggcagatttttgaaggtgtgaggtgatttgtgaacaacagctctaatgaatggttaagatgaccacttaggttcaaataccagtgctgccagttatcagcttaccttctctgtgcttcatttttctcatctatatagttagggataaaatttgttttctcaaaagattgttatgaggattaaacgagttaattcatgtaatgctctcacagcaacacctggcacatagtgagtgctcaagaagtggctgcacttgctgtggtgatgacgcagtagtggtgaaatggaaccgtaaagaaagaaaaagaaattgcggaggaagaattgaaaattatgataggagtgttggaaccaaagagagggttttcaagcctaagtaatgtagaagtagatgcctctaatgcttaggtttattccagaaatttattgtttgatgtatgaatgaaattataagttttcttacataagatactgccagtgtatcttatttcatattgttaaaatgagagtttaaaagtctagttcttacatttccatacagttatttgaaataacatttcattgaatgtctattttaaactgttctttcaaaggtaaggatagattatttagtcattaatattagcatgtaaattgaacttatgaaaatagataggcttgtaattaactttggttgaaatgaaggtagttttgtggtcctcaaggaaaagaattgtgaaaaataaatgatattagtacttagacatttcatatcactagtacctctcaggctacctttattcctcagttggcaactttcaatttgtgacagcctgaggccttatcttggacctgcgtacgctggaagagtaaaatctaggatttacgtattttatttattattatgtgttagttgtagtaggaagatcttattttccttctgtggtctaaactccagaattcttctagctcaccatggctataagagacttttacaggcaaaataaaattttataatattaataactggggctttggcccaaattcctacatagattttgcatctggtgaactaactgaataccatgaaatgcaaggacatttagccttgtttaaacataagttttccacattccataccctctcaaactctgcttttcacttagcatttagagctggggaaatgaattcaagtaggagaggaggagtcttataagtccgaggtagcctgaggcgtgtcctcccataaagaagtaaagaaactataacatgaaggcttccaaaagaacatccaaattgagacttttttttttttaaatgaaaaggggaacattactcatatgctggaataataggcataaaccagggcatctgcaaaccatgggcatcctactgagatgctatagggaagcaagggcattttgcctcttcaactctttcactaaaatctccaccatgtagtgctgtggagctagtctcagctctggattgctgcaagagcaaatgaaagccaagaactcttccctaccacggtaatgtttttcaaaagcatagtcagtagatgatctttatcagaatcgtttcaggtgcttggtaaaagtccagaatctgctatgggacataagtatctatgttttaaattttgagggccagagtgagttagaagtagccaattctgaagttcttcaactttcttatagcttagatttccgggggctattcgtaattccatttgtttattaaggccaactgataggaattctctcttattctttggaaccaacatgacctggacaactagaaacaatataagaaaatatattacaggactgtttcattcaaggatatacattaaaaattctcaacaaaatattagcaaatcagatttgattgtgtatataacaaagatgatacaacatatccaagttagatttattatcccaggtatgctaggagagtttcatattagaaaatccatatgtatgtaactaagcacattaccagatgaaaagagaataacctcaatggagaatttgataaaattcaatgatttttaaaaaatgattagtaaattaggaacagaagggaaaagccttaattttattacaaaaaaaaaaatagaacaaacattattctgaattaactaatgttagaagctttccctttaaagtcagaaactggccttgcagctggtctgcctgagacctctagtgccaaccccaataccccacgaagtttaatttccactcacgaaattccactttcgttttcattataaaatgaaaaagccctcacaaaccatgaaaaacttgccagatttcaagcacaattgtgcactggtaaaaaggaactgccctcagatgatacagcaaacattatctgttaaaacagatgataaaaaaaatcttcagttttcctgaaagaaagtagaaataggcaatatctctgatactaaagaggtatgtctgcaaaccaaggaatggtgatcttcattaacaatcccagtgttcagacatctctagcagcgaacactttgaccattaccagacatgctgagacaaagcagctaacagaaatgccacccagtgtcttaaaccagcttggtgtcaacaagcttaaggaaactggcagaagctggatggaaaagtaccacttactattggggaagtggtgatcttgttcagaattttgatgaagcttccaacagtgaggcaaactgaattgattcagcttctaaaaaataatacaatttcaagaattttaactgcttttaaaatttttgttttatatatgataaaatgtaagtctataaattccaagacccttggacactgctttttaattattgattatatacagttatttattggcaattaattagccagaaaatagtttaaaacaaagataaagcctttgcctagttaaaaaaaaaaaaagaaactagagaaggatgctcactagcaccacttatatttaatattttcttgaaggatccataagtacagtatgacaaaaataaattatacaagcaaaatgtttggaaaggaggcaataaaacttatttacaaatatgatcatgtttttgcatagaaacccctcaaaactacaacttattagaaataatagagtttaccaaggtacctgaaaataagatgaagacacaaaactcaattgcatttctgtatgtcatcagcaaacgtctagaaatgtaactatgacatcatttatagtagagtcagagaatgtcacatttatgtctaggaataaattaaccaaaaaaattcaagacctctacacaaaggaattatgaagaggatctaaataagcaggtatatcatgtcatggacaggaagacaatattgtgaagatgttgatttttcactcattaacttgtagatttaatggaattccagtcaaaacagggttttccatggaatttgataagatgaatagccaagacacttttgaatcagaaaagcaggaatggggtctgattattaatatgtaggaattaagatattgtgatgttggcataggaagagacagcatgatcaatggacttttagagagctcagaaagagacctacacatacatattactttgatatgtgacagagataatgtttttcaatgtggaaaggagatgatgcaatgaatggggggaacctggttattctagggatactgtttgaaattgtgtttcactctacacagaaaaatcaagtaaaaggggacatgtgttcagtaaacatataaagatatattgaaaatcataatgtgatataccattaagttggtaaaaattatagctgtgaatcaacagcatcttttctacattgctggtggcagtgtgtattggtataaacacattggggagaaaagtttaatgtctcttagagttaaatattcacatatatcaagctgcagtaattccctagagcaattcttacgtatgtacagctggaaacatgttaataagcatataaaccccaaaagattacatgcatatagcatgatactatttttttacgtttaaaataactatataaagagtacgtatagatgcagtagaactataatcaaaatgtaaagcaaggagtttgtgaacccaggattcagggtgaagtgtgccttggttggggaaaccgaatgatgggatgggatggaatgagggcaggagaatcaagtaggattttaatgttagttttaggtggcaagtgcatagctgtctattatattattaaaactaattgaatcgacaaaagcagtccttgcacgaaccagtgatataaacttaagaattatgattagtataattttggcctaggttagtagttagtagattttttttttttttttttttttttgagatagagtctagctctgtcacccaggttggagtgcagtggcgtgatcttggctcactgcagcagcgtgatcttggctcactgcagcctccaccgcccgggttcaagtaattttcctgcctcagccttccaagaagctgggactacaggtgtgtgccaccatgcctggctaatttttatatgatttttaaaataaaattttttatttggctgaggcttcaatttgtggccctcaggtatttatcagaaaggaacgtggattgcccttcaaaacttttttaaccaaacataccttcttgttatcttgctgttatcaaaaatgtgtgtgtacatctgtatttaacgaagtagaccaagttcgtacactgaaaatttttagaaaaagagcatccttccttgatcatctcagctagtgtcatggaaaatctcttagcaatgataatcactttgttcaccatcttgtcactcactctgaaatgcagattcagatgggcctggaactatggtttaagaagtaggttcaataagcaacatttgcaccatgtttagccaacacattcccaaatgaattactagccaccttctgatttaacatcagggtcaaggtggagctgtttttctagccgtttcatccatttaatttttctcccactaattattgtcatttgcataagcatagtgtattcctgtgcaatatttcctcaatacttttactgtttttatctttacttttaaaaatatccttgagataaagtttatataaataacataaagtgtacaatttgatacatgtggacatacataatatacccatgaagtcaacacaattgagatgatgaacactcccagaaatttatttgtgtccatttctttctctttttttttgagacagggcctcactccgtcacccaggctggagtgcagtgacatgatcacagctcactgcagcctcagcctcccagggctcagataatccttctacctcagccttctgagtagctgggaccacaggcatgcaccaccacacccggctaatatttgtattttttctttttttttgtagagacagggtttcgctacattgtctaggctgtcttgaactcctgtgctcaagcgatctgcctgcctcagcctgctaaagtgctaggattaccggcataagccattgctcccggcctcccagcttctttgtgtccacttctcattcttccctcctactccctttctctctaccacccctgactccaggcagctactgctctgctttttgtcactttaaattattttgcattttccttatttttatataaatggaatacctgtattcttttttggattttgtttgattcgtttgtttagcttccctcactcagcatagttgtttggagattcattcatgttatgtatattgatagttcatttctttttattgacaagtgatattccattgcatggctgtaccacagtttgtttatccattacctggctgatgaacatttttttgttaccagtatggggcttttacaaataaagctgctatggacatttacatgtaagtctcttgagtatataccaggggttgaaggattgagtcatatggtaggtatatgttgtacttttgaagaaatgactaaaccgttttcaaaagttagtataacaacttaaatttccaccaacattatatgaaagttccaattactctacattttgggcaacatgtggtatggtcagtctttaaaattttagccattctaatagtgtgtagtggtatctcactgtgattttaatttgcattttcctaataactaataatattgaacatgtttttatgtgtttatttgccatacttctgtgcactttggcgaagtgtcttcaaatattttgtccattttttgttgaattgtttttcttagttttgagtattctttatgtattcattatacaagtgcttcatcagaattgggatttgccaggactttcttccagtctctatcttgtcttttcattctcttaacaatgtcattcaaagagcagaagttctgaattttgatgaaatccaatttatgattttttttctttgagtcatccttttgtggctttaagaagtccttgtataacctaaggtcatgaagattttctccaatttgttttctacaagttttacagttctatctatgctgtacctctgagtctatgatacgtgtactgtatgttaatttttatataggatgtgaggaaaggatcagagtttatattttgcatatgaatattcaatttttccagctcagtttgttgaaaagactatttctttcatcaaatttagaaaaactttgacaataatttcttcagacatttttttctatttttctgtttctcctgtcctttggtgactgtagttacatgtatattaggcccattgaagttgtcccatgggtcactgattagttcatttatttcagccttttttctctgtatttttcatgttggatgttttctattgttttgttttcaagtttactaatcttttcttttgcaatgtctaatctgctattaatcacacctagtgggtatttttcatctcagatattttggctttcatttctagaagttcagattgggtcttttttatatctgcatgtgtttaatagacttaatccttcctatagtttcttgaaccatgaatataatatgtaaagttgaaacaattactgtaatgtccttttctactaattctagcacatttgacatttctgggtcattcttcattgatttttctccttgttataggttatttcctccctctttgcgtgcttggccattttgattggctgccaggcatcaaaaattttaccttgttgggtgctggatatttttgtattagaaatattctttttttttcttccaacttttttttttttttgagacagagtctcgctctgttgccaggctggagtgcagtggcacgatctcggctcactgcaacccccacctcctgggttcaagtgattctcctgcctgagcctcccaagtagctgggactacaggcacgtgccaccaggccaagctaatttttttttttttagtagagacagggtttcatcacgttggccaggatggtctcgatctcttgatctcgtgatccatctgcgtcagcctcccaaagtgctgggattgcaggtgtgagccactgcacccggcccttccaacttctaggttcaaggggtatgtgtacaggtctgttacatggataaattgcatgtttctggagtgtagtgcacaaatgattttgtcacccaggtagtgagcatgatacctgataggtagtttttcagtcctcaccctcctcttatcctctgccttcaagtaagccccagggtctgttgttcccctctttgtgtcgatatgtactcaatgtttagcacccacttacaagtgagaacatgcaataatctggttttctgttcctgcattaattggcttaagataatggcctccagctatgtccatgttgcttaaaggacattttattctttttatggctgcatagtattccatgatgtatatgtaccaaattttctttatccagtccaccattattgggcgcctaggttgatttcatatctttgctgttgtgaaaagtgctatgatgaacatatgtgtacatgtgtctttatggtagaatgatatatattcctttgggtatgtacccagtaatgggattgctgggtcaaatgatagttccgttttaagttctttgagaaatctccaaagtgctttccacagtggctgaactaatttacatgtccactagcggttcccttttctctgcaactttgccaacatctgttattttttgacattttagtaataaccattcttaacctttgttctaggatacagatgattcttttaaatcttgctttttaaggtttattaggtatgattgcaggatgtagtttagctcataacccttctaagtattgtaccccacctcctgtgaattacgaaggtttttccacttggcctggtgagaacagaaactattcttgaccgtatacaacttctatatatagttccctgtaatgctttcaaatgattctttaccatcattgaggaaagagctacacagagagaggatgcaggtagcttcctcatacacatgcattgattaagtactcagttgaaaacagagggagtccctcacaattctctctctgtgcagcctttcctcactgatactgtattccatgcactgtaaccaccttgatctcccaggtctcccagttcatctcctcaacttagagaccatcaggcttcacctttctcccttcctgatttgcagcctggaaaccctctctgcagttagctggggcaattgtgcagctcatcttgtttcttccatcttttaggatcactatcttcattgcctgatctcggacatcttgaaagacattgtttcacatattttgtcaacatagtttttagttgtttcatgttggagggtccttgttacttcatctgaatccaaatgggagtgatttatctttattaccttaaaattttaatttttatataggtgaatcattcccatggtttgaaaatcaaaaaatgtaaatatgtattcagttgagatctccctctgaatccttcccactaccaacctagtcctcatccccccaccagtaacaaactttgctattaatttatctttccagaatttcttcattcatatgcaagtaaataaaaattacatatcctttttcacctttcacctcctttttcatagaaaggttgcatagtacacatgctattctgaaccttattttttttcacttaaccatctgtcttgaggatatttccttattggtgcatacacttcctattgacaaacacacacacacacacacttttttaacgactatatatagtgccacatcatgtagacctaccatcatttgtttcaccagttcctttttgttaaacaattaggttgcttccaatcttttgttattaggaatgatgtagtcttgtgcataagtcattttggatgtatctgcataacatagctgttgaatacattcccagacatggattactaggtcagagggtttatgcgtttgtaatcttgacagctattgccaaattgtcctcccaagaggttgaaccattcttccacaagcctattaggaaaatgcctattaacccacagttcttttgtagaatgttataaaatacaaggatttctgctaatctgataggaaaaaatgttataaagtagttttaatttgtatttctactctgagtgaggttgttgaacatctcctatgcttaaaagccatttgtacttccttttctttgtactttaaatcattttggtcattcagttctttttagtaataagaatatgaaatagaaatattttagtaggtggtgtttagttaatgatgaatgaacagttaacatccatagcctataagtgcaacactttaaattgcatttaataaaatataattatactaaatctagtcatatctttaatggttttagagtcattacaaaatagttagatcaaaggttgggttgatttttcagacaaattttcaaagttcaaagtaaaatcaggttaatctgagtttttgaccataacagtaatgttctaaaactactttaattaatgaaaaaaaaaaaataaattgttctataaatcttttacctttgagagatgtggtttgtattccacagataatggcatttccataacaatttgacagatgttggaggaatgaatatttgaaatttggactatcttgtaaagtctgagctttatggttacaaaatatattctgttccacacataagaatggtaatcacattcatggttagatgacaggattctcttgctattcttcaatcactgcatctttcttgagaagtaaggagtatgcaggtatttttataactttgcataccaatcctttttctctgcctgatctcaaatacctttaactttttgttctatcatttataacttgcaggtattatactttgtggacaattaattagggaggtagttgccttaccaaatgagtgaagtaataaaatggtctagtagtttgtttatattttcttaatttattataaattaaaagtctggctttatttatgcaattacaaatatatttttagagtttcatcaatatggagaggcatccagcacacatcccatcaggtatgctgtcattccagaacattctctggtacttcatttttctgtcttatccgccaactaaatttcctttggttaaatttaattattttggttttttcccgttgtcaaaacatggagctgcatgacattatcaagttagccaattgtcacactttagcaatcttaatgtttgtatgcttgctttttagatctaaaattatatatcaggaaaaaaattattgacctactgatttaaggattaatatttagcttttctagagtagttgaaaatgttctgaatgctttctatgaaaatcatctaattataaataactaagattttattacatgttcccagatttcgttattttaaaattattttgtatgcatcgatcacaatacttttaccacactaataatataatatgtctacttgtgttatttgaattttgttggttacagaagtatgataaacaaatagaaaaagaacattgttattttgactaattgtgtgctttcttattaaagtttacatgctgattaatgctaaggcaattctttagaagataacatttgaatttctataaatatatataaaacaagtctgttttaagaaagcagttgggctgggcgcagtggcttatgcctgtaatccccataccttgggaggctgaggtgggcagatgacttgagatcaggagttcgagaccagcctggccaacatggtgaaacctggtctctactaaaaatacaaaaattagccaggtgtggtggcacacgcctgtaatttcagctatttgggaggctgaggcaggagaatcacttgaacctgggaggcggaggttgcggtgagcagagatcacgccactgcactccagcctgggtgaaagagtgagactccatctgaaaaaaaaaaaaagaaagaaagaaagacagcaattggtctgaaccttccatcaaataccaaaaatgcataatttaattagaatttaaattaaagcaaataagcaaaatagtccaaatttcggagatcataactaacagtgttaactgacatacttttattaataatgcaaatgtaaaagaaatgtgtatacacaaatgaatttaaaatggaaaatagtttcgagacttcttcagtatttgtcttacaatgaatttaatgttgatcatttaaatttaagatgagcatataaatcagagcaagatgattaaaaaagtatttaaggctaccaaatatatttcatatctgacttcaacatcaacttttattgtttaattttggtttcagggccttttcacagagttctaatacatctgaaatatataccttaaatcaactacctatattatatttcaggatgttaattggatcatagcatttacttgcattaaaaattatgcagtgttggttggaaaatcaagtgaaaagattgaagaaaagtggaagaatggtgggatagaatgattatcaaactcttgttgatttaaagttagatattaaagtagagaagaagttttattatctttctgataccaaaatctgttaatattctaataacttgatttccatttatgagagacaagttcattatctgaagtactaaatacattgtcagttacaattaaatcagagtggtttgacaaggattttttaaattcagtggcaagtgatacaactatagtatttttaattgtgctatgtgttttaggtatttgtgaagtgtcattttgattataatccatacaatgacaacctaataccttgcaaagaagcaggattgaagttttccaaaggagaaattcttcagattgtaaatagagaagatccaaattggtggcaggttagtatgcttctcagaagttcctcagctacttttctaattttaatcttagatctgatcaatatctgaatagtcaggaagaatattagcatttgttacaatgatttttcccacatgaacagctcctgcttcgtggctactaattttgtggacataagatcaaattgggagggaatttgcaacttaataagtgcagaattaaccagcctgtggcactaacccattggtttagggattagaccaattggtttttttcacatgggtaattgcattaaaatatgctattggccaagaagaactcacttgggtcatcccttttcaaaagataacttgggttttgtttattttaagtaggagacttttactgtgaaataagtgtgtctcttgtctcctctccctcatgttcgttcatagcaagtaaagcatcatttcttaaggtcttaatgtctatttgctcccctcttctcagatattgggaaatggaggttcactctatcagttttgtttggttttggattaaaatctgtgtatatggaaagagatgtgtattatcactgtatttttccctccttttttcagaagatctgtttaatggtattcttttttcttctcctaatgcagctttcagaaacccctagcagcagtaataagtctgtttttgtaatggtttatgttagctaacaaccacaatattcagaactggaaaaactgacaggtcaggaagtctgaaatgccttaaactatcaaagcaaatgagagttttactaaagaacaaggagtaagaggaaaggatccaggacttagcaccaaattctaaaattaactgagatgttggtaactcacattagctctaaattatagatctacttctaaggagaaacaaatcacagaatgagaacaatcttacttatgtgtccttaaatttaacttaaaacattatgtataagtgcactatgtgttgagacagctaagaaatgggtaaattaaacagaatccatgatttcaagaggtttcccctgaactttttttagatccctcatttaaaaaatctctctgtggctgtttcctttattgaattattccagttttccattttttttctttttcctatgaatacgatctcttagttttctcttctaacctgtcaccattctctcagtttctccctgcattttgatagttggttactttaattctgtttttcaggattttaagtgcttaaagttatactagattttctatgctagttgtaaggatagaaatactaactttgtgagataaaccactaacagccagttctccagccactattttaaaatatttctctttggagcttattttaagttagctgttttacattaggtgaagtttcgcctagtttaaacttacaaactcttgggatattcagactcctggtggcataaattaaaatctacactttatattccacatagtatctccttttcatttggtttggcctgaaataccaacatagtaggattaaggttgacagtaaatatcttactaaagggtgctagataaaatgtcctgttaatacatcttatttagaatagcattttccttttctaacttagtatcataaataagaagttttagcaatttaatttgtattttggtccccacatttcactaccagatgacagatatgaagaattttaggtgccaattgattcttcagtgctgaattgtttaaatatcttaactgacaatgctatggatttaaatctcaaggttgtttttaagagcaaatgtgacttttttgactgaccactgcttgtcttacttaatagaatatggtctcaaattttggtcactgagatgtacaattcattaatttgattctaggctagccatgtaaaagagggaggaagcgctggtctcattccaagccagttcctggaagagaagagaaaggcatttgttagaagagactgggacaattcaggtgatgagctcgacacaataagtaacaagcagtcctttgtgaccacctttctttgtctcttttgtctaaataagcaaatgcatttatttaaaatatgtctagaatgaatccctccctctgctttctctcgctcataagtaatcttttttgatcccgttctgccacctgctggtagagtatcaaaattcagtggcttaactcacctccaccctcttttgcttcctaggatgccacattggggagataattctcccacccctgtaaaatactatagggcaattttttcatattctgatatactgcttaagttatatttgttttatcatccttcaggacctttttgtggaactataagtagcaaaaaaaagaaaaagatgatgtatctcacaaccagaaatgcaggtaggttttaaatactttttgagaagtccaagtgaagtagctatatgtcatttagtgtggcataaactctgaatatacagctttaagtgagtgtaattcagattagtacctagttgcaaggggctgacatatgaacacatggtgcaatataatataaattatttaaaacccacattatatatactaccatgtgctttattttgtgagtatagtttacaacacaaaacaaattggttaagatttttgtttgtcttaatcaagaagcagtatcataattgaaactatttgtccagagaattttgaaatagtaatttatgtgccatttctaaaggatagaatgcctttgtcaagatgttaaaagagttatgtttagggcaactgtatcctgccataacactgaccatgatagttttagaaaaatagcactggaccaaataaatcttagtctgatctaatagaattctgtcttaaatcttttagtcatacagaaagaaatatatttaaaaagaaagaaatggtaactatatgaggtgatggatatgtttaatagcttgatcgaggtaatcattcacattgtacacattcatgaaaacatcaagttgtacactttatatacaattcctgtttgtcagttgtacctcagtaaagctgaaaagatttttaaaaacaatgtaaaataagaccccagacctggattggctactcattggctattaaaaataaataaataggaaagaagggaaagaatggaaactactatatttattcttcccagttgcagaggatgacagaaataaaaaacagctctatgaatcagaaatttctggaggcttaatcaaaggagttggcaattttaaaagtactttcttgacttcagagctacctctatgctggtaataaactaaatagcacaccataaaagaaaataatatagaaggaagaagtaggcttgctttctcttaatattggtttaatctactgtggggaaattgtgcaaagaaagagttactattaggataataagctaaggaaggagtgttattactacagattgagagttacagtaataacaggtaatataatatttcaaatcatcactttggccctattattcataaaatatatgcccataaggcttttttgcaaaatagaaaatttgtaattttcccatcgactaagattataattttgggttatgtttctagtgaaacagttggatctaaaatttattttatatgtaaatttcaaaatcttaatatttaaatgtatgttgtcagtaaatgtcagtatgttgaattctaatcaaactgataattgttgatttgccatacaatatttattcatttatataattggaaggtcacttgttctgtggaacttacttaagcaaccacgctaggtttactcctgtcctccgtatttgctacatgctttctatatatactggtttgtaatttgattatttatattaaaggatttttactggcaaattgataataagtttcagtggatagaatctctgataagtaaggataaaacatagaatttttctagcttgattagataaattttttttttttttttttttttttttgagacggagtcttgctctgtcaccaggctggagtgcagtggcgcaatctcgtcttactgcagtctctgcttcctgggttcaagtgattcccctgcctcagccccctgagtagctgggactacaggcgcacaccaccacgcctagctaattttttgtatttttttagtagagacgaggtttcaccatgttggccaggatggtctcaatctcttgacctcgtgattcgcccacctcggcctgcgaaagtgctgggattacaggcatgagccaccatgcccagcccgattagacaaatttttaagggcaaatggatggaaccagatgtttaaagcaagatataaaataatttactggggcaggcacagtggctcatgcctataatcccagcactttgggagactgaggcagcaggatcatttgaggccagcagtttgagaccagcctgggcaacatagcaagatcccatctctacaaaaaaaaaaattaaaaattagctgggtataatggctcatacctgtggtttcatttactcgggaggcttcattgagcccaggagttcaagggtacagtgagctaagattgcaccactatactctaccctgggtgacagtgagccccggtcttaaaaacaataataaaataattattatttattgtactttaccaaatttgtaaaaacaaatctatgctaagtgggtacaagtcaagtgatatttaactatcaagacagctaagccattactagacagaattgcagagatttctttcatgtatataaaagttgactttgtattcccatttcctttttcatttagaatttgatcgtcatgaaatccagatatatgaggaggtagccaaaatgcctcccttccagagaaaaacattagtattgataggagctcaaggtgtaggccgaagaagcttgaaaaacaggttcatagtattgaatcccactagatttggaactacggtgccatgtaagttttctgtgttttccttgctatgcaattggcaggaaagagtatgggcatatggaggaaagggggattattatcattagttattgttattcccaaataagttttctttatggcagtgaaagtgaacaagtaaaagacattgaaaaatttagtaattctgtagctgtcttgaaatagtgctgcagtgctgttggcttgctgtctggtggcaagtgcttctctaaactattcagttcagaaatgttagaattaaatgcctacatttaagactcgtggcaagataggcatttaggattttcttgtactgatgtctatctaaaaagttggatttttcagccattttagtgtaaagaaaaggggaaagcttctgacccttggacatacccagtgtggcaacagctgtgtgaacttacgtggcctggcttgtagctctcagtcatgcaaggtcataaacctgatttttgatagcacataagagtgattcatcttttactgcaggcagcattcattaaggttacagagtctgatgtatagaataaaatagtactgatgagaagtataaccattaagtgaaccaagcactcattttatggtctttgcattcatttctctatttgcatatttacatagaaagttaaataatcatgtcagaagtatgcttgatgagaatggaattagatcaaggaattggatgatgttagtgatttactgtaatgactaatacacatttgtctctgactgtagggactaataaacatttgtctttgtttttgaaatacgtggatctttacttgtgaacttagatgttctctcccttgaagaaagcaggagataagctaacattgctttcattcccattgctgtgcttctatttctgaccaagcccccttttaacatggcattcctttaggtatattaatgcctttaagctattttgagtcaaatcctaggctaactttaaccctatctcttttaattgaattttagagtttccctggttttgtccagtatattttgggtttaattctcagtgagtactcttattgctaaaattcttaaaagttagggaaatagccttgtcattgcccccctgtgctacttataatcccttcagtgtaaatcttctgattctactgcaggcattgtaaatcactaaatttagacaaatcctactaaagtggttaacagaacaaaaacttcactgtaatcaacgtatgttaaagctgcacttgtgaagtaaaaagtttttcgcttttatcaaattcatatgtgcccaatatttttagcaagtagttcttaaagacatataatggggaaaaaaataaccccttctcttcccctgcctcacttatgaaaaacagtcacttttcattgtttttgctatttcttttggttgtgttccatatttcttaataatgtctttagtctgctgtttcctgctttatgcagtttaggccttatctgttgacttcctgactgtccttccaatataaagatagctgtattttcagttagttcaatttcactttcttgaacagccctttccccttctgtgacccaggaatctctggagttctgtttttctttatactacctgattttatatatatatgtgtatacagttttttgttgttttttaaactaaagacttgtttatccagtaagtcaggttctttttttttttcctggagacctctgtctcagaaccctctgtctttctgcttcaatgaggactacatgctgtctctctggctgcccagctgttaacactggagtagttccctttgttgttatcctgggttgaagctgttgttcctggatcccattctttctctttcttggtttatcaccttgttttgctggggtacatcctcttgtatgtggaatgtaatgtctgcatctttgtgttttaaaatgtatattttctgccctttatttgactaattagcagagaatagaattctggattgtaaaattcaaaagctgttacaacgtcttcatcatcgccaaaagaatctctgtacccatttcccaccaacttcctcaccccctgctgccaggagcaatcatgaatctttctgtcaaaatagatttgcttattttggacattttatatactggagttatacaatatgtggtgttttgtgactggcttcttaacatgtcagatctcatctgcattgtagcatttatcagtacttattttcttttccttgctaagtgattattatatggctataccacattttatttatatattcatcagttgatggacatttggactgttttatttttagctattgtgaataatgctacactcagcatttgtatacaggtatttgtgtggacatatgcctgtttctcttgggtatataccttggaatggaatttgtaggttatatgatgactgtatgtttagcctttagaagaacttccacactgttttccacagcagctgtgtatatacccttcacaatcccagcagcatatgaagtttccagtttctctacatcctcaccaacatttgtcatctggctttttgattgtagtcatcctagtgggtgtaaagttgtatctcattttggttctcatttgcatttccctaatgtctgatcatgtcaaacaacttttcatgtacatatttgccatttatatattttctttggaggaatgtctgttcaaactggttgcccatttttcagttaggttatttgtccttttcttaagctgtaagaggaggtcatattatattctgggtacaggttccttgttagatatgatttgcacgtattaatattttctctcattctttgttgacttctcgtgtttttgatggtgtcctttgatatacaaaagtttttcattttgatgaagtccaaatttatatgtcttttgttgctcatgcttttcatatcgtatcaagtatggtaccatatcaaggctttccctaacccaaggccacaaaattttactcctgtattttattttaagagtttatactactgactcttacatgcagattatatgatcaattttgtgttcatttttgtgtcaaatgtgaggagggggttccaactttattcttttgcttgcacttatccagttgtcacaacacaatttgtcaaaaagaatagttctttcctccagtggattgtcttgccaccctttttgaaaatcaattgattgtaaatgtcaagatttatttataaaccctcagttctgttccattaacctagatgtctgtccttatgccagtcccacattgtctcgattactgtatatttgtattaagtttcaaaaccaggaattgtgaacccaacttgttctttctttttcagcttgttttggctcttctgggttcctgacatttctatataaattataagataagcttccagtttctgcagaaaaggtagctagaattttaagagggattatattgaattctagctaccttttctgcagcaattggaagcttatcttataatttatatagaaatgccagtaacttggccttgaggactactgccatctgttttgttttgttttgttttgttttgttttgttttgttttgttttgttgagatggagtcttgctctgttgcccaggctggagtgcaatggcatgatctcggctcactgcagcctccacctcctggattcaagccattctcctgcctcagcctccccagtagctgggattacaggcacccaccatcctgcctggctaattttttttgtatttttagtagagacttgctttcaccatgttggccaggctggtttcgaactcctgacctcaggtgatctgcctgccttagcctcccaaagtgctgggattacaggtgctatattaacagtattaattcttccagtctatgagcatagatgtctctctgtttatttaggttttcattttaatgctgtttatggttttcattgtacaaatattatgctgcttttgtcacatttattcctgagtatttttttcttttttattctgtagcaaaaagtattttcttaatttcctttttggattgttccttgctagtgtacagaaataaactgatttttgtgtgttggctttgtcttttagccttattgacctcattgattctaatgatgatttttttgtgtgggttcctcaggattttctatatacaaaatcatgtcatctgcaaatagagatcgttttacttgtttctttccaatctgggtgctgtttatgtcgttgtcttgtctactttcctcaactagaacctgcagtgtaatgtgtaatagtgtaatagaagtggcaaaagtgaacatccttgtcttgttcatgatcttaaggagaaaggagaaagcattcaatctttccattttagctgtgggtttttcatagatgcctttcatcagattggagaagttcccttctgttcctgctttgttggctttttaccaagaaagggtactagatcttgccaaatgctttttctttgttaatggttcatatgatttttgttttttattgtcttctattgataggatgtattgcattcattgatttttatatattgaaccaaccttgtctttttgtggtaaattccatttggttatgatgtgccgtctttttttgtatacttctagattcagttgcttgtaatttgtaaggatttttgcatctatatttataagggatattggtctatacatctcattacttgtgatgtcattgtctagctttgatatggtaattcagggcacatagaatgagttgtgaagtattctttcctctttcattgtttgggaagagtatgtgaaggattaattataattctttcaatgtttgatgaaattcacccatgaagccatttgaccctgggcttttctttgtgggaagttttgattattagttcagtctctttccttgttataggtcaacttggattttttttaaaatcagtttcaggatttctgcagggttcatagtaatgttttttctttcatttctgattttagaaatttcagtcttccctcttttattcttagtctatgtaaagatttgtcaatttgttgatcttttcggacaaccaaattttgcctttgctgattttctgtattttttctactttctaatttttgctataatctttattattttctttctacttgtactttgggtttattttactctctgtttttttagataggaaattagattattgatttgagatcttttttaacataggcattcacagctataaatttccctctaagcacttagttgcatcttaaagttcttggtatgctgtgtttttgttttcattcatctcaaaatacttttgagtgggttttttatatatatatataaataggttcaatgatacatgtctctgtagatggctacagagactttaaaattgtaatcccgaatatgcaactatgcaacacagaccagttagccagatctaaaataataaactggcttcttacaacaactgtgctgttccaacccttcttccctccacaatgaccttaaaccttacatgagtacagttaatatggcagaacgggaacccatctttgtgaccaaaagtaaaaaccgaagaagaaatagcaattcatccattagttggggaaagcaagaaatgtagtgcccttcactgtgctgcttactcttactcattttgtccctattcttcagcccatccatgttagctcttaatatgtttgaattagccatatgattcagctcttcagtgctcaccacagtgctgatctttttcccatcagtagcttttaagacaattatcaagggcttaaagccctccacagaaccttttcttagaatgaatgggtttagttcaaccatcatacatcttcagggtaatgaacatgctgctggacaactggcactctggaagagcctggtcagctctgtctgtaactgtgctcttcaacagcaccatctcctctcaaagtattttctttcacttgtgattgcttgtttgatccattggttatttgggagtatattgcttattttccatatatttttgaatttctaaaattttctgttataaaattaaggtgatttaactttctttatatattacaaaatgatcctaagataaaatagaaaaacattgttattttagggagatgggctatgttatgcatcctgttttcaatttaacattgacatcttgacatcttgagcttagttaacaaatgaagtattactttgttgattgtgtcttcattatttgaagagcagctaaaattgagaattttgcctatcataaaaaattacttctaaaaaatcacattatgtagttgcgcagtatagaagtctaaggaatcagttgtagtcaaaccttcatgttctaatttctctgttctagaaatggaaagcagtttaaatatgtggcaacgtagattgttttttgaagtgttagtagagaataggattgtagttaaaattcacttgtaaactaaagaacatttctctaagaattaagattccctcagcatggaggtagaggtaatacatgtgcatatacatatttatttcaagcagcgcattcccctatatggtttcactgtaggacttcaccgaaaaaacattaatttttaaaattaatgttcacaatgttgaaccaagtcctattatgcatttatttggggagttacaagttgccttagaagtttttttatttttttatttttttaaggtttttttttttcccctcttattattatacttttaagttttagggtacatgtgcacaatgtgcaggttagttacatatgtatacatgtgccatggtggtgtgctgcacccattaactcgtcatctagcattaggtatatctcccagtgctatccctcccccctccccccaccccacaacagtccccagagtgtgatgttccccttcctgtgtccatgtgttctcattgttcagttcccacctatgagtgagaatatgcggtgtttggttttttgttcttgcgatagtttactgagaatgatgatttccaatttcatccatgtccctacaaaggacatgaactcatcattttttatggctgcatagtattccatggtgtatatgtgccacattttcttaatccagtctatcattgttggacatttggattggttccaagtctttgctattatgaataatgccgcaataaacatacgtgtgcatgtgtctttatagtagcatgatttatagtcctttgggtatatacccagtaatgggatggctgggtcaaatggtatttctagttctagatccttgaggaatcgccacactgacttccagaatggttgaactagtttacagtcccaccaacagtgtaaaagtgttcctatttctccacatcctctccagcacctgttgtttcctgactttttaatgattgccattctaactggtgtgagatggtatctcattgtggttttgatttgcatttctctgatggccagtgatggtgagcattttttcatgtgttttttggctgcataagtgtctgtccatgtccttcgcccactttttgatggggttgtttgtttttttcttgtaaatttgtttgagttcattgtagattctggatattagccctttgtcagatgagtaggttgggaaaattttctcccattttgtaggttgcctgttcactctgatggtagtttcttttcctgtgcagaagctctttagtttaattagatcccatttgtcaattttgtcttttgttgccattgcttttggtgttttagacatgaagtgcttgcccatgcctgtgtcctgaatggtaacgcctaggttttcttctagggtttttatggttttaggtctaacgtttaagtctttaatccatcttgaattgatttttgtataaggtgtaaggaagggatccagtttcagctttctatgtatggctagccagtggtcccagcaccatttattaaatagggaatcctttccccattgcttgtttttctcaggtttgtcaaagatcagatagttgtagatacgcggcgttatttctgagggctctgttctgttccattgatctgtatctctgttttggtaccagtcccatgctgttttggttactgtagccttgtagtatagtttgaagtcaggtagtgtgatgcctccagctttgttcttttggcttaggattgacttggtgatgcaggctctcttttggttccatatgaactttaaagtagttttttcgaattctgtgaagaaaggcattggtagcttgatggggatggcattgagtctgtaaattaccttgggcagtatggccattttcacgatattgattcttcctacccatgagcatggaatgttcttgcatttgtttgtatcctcttttatttcgttgagcagtggtttgtagttctccttgaagaggtccttcacatcccttgtaagttggattcctaggtattttattcctttgaagcaattgtgaatgggagttcactcatgatttggctctctgtctgttgttggtgtataagaatgcttgtgatttttatgcattgattttgtatcctgagactttgctgaagttgcttatcagcttaaggagattttgggctgagacaatggggttttctagatatacaatcacgtcatctgcaaacagggacaatttgacttcctcttttcctaattgaataccctttatttccttctcttgcctaattgccctggccagaacttccaacactatgttgaataggagtggtgagagagggcatccctgtcttgtgccagttttcaaagggaatgcttccagtttttgcccattcagtatgatattggctgtgggtttgtcatagatagctcttattattttgagatacgtcccatcaatacctaatttattgagagtttttagcatgaagggctgttgaattttgtcaaaggccttttctgcatctattgagataatcatgtggtttttgtctttggttctgtttatatgctggattacatttattgagaagttttattatacacacctttggtgactaattccagaaaccttaaagatcacacagttttaaatatgaaaagccatcatagcatcttgaagattctcaaagatactttataaatactcttcacagtagtctaagacgaccactctcaaggttgagccagaaaacaaggggaaaacaggagtcctattatacataatgatctcatttgacccttatttttgagcatgagtttgaagttcattttgttcttataaaagttttctatgtcttaggcttattagaaatagtcaaaacactgtcatctttttattcggattactttcttagtttagtttggtgtagttaataattccatcagttattctccaactacttagctaatagaaacaggatacttcttatatccgatccagcaaagcccagagtaaggctaagcttgaaataacacgctcaaaaattacttttcttcttcaaagctgttgttaacaaagttgtcagagagtacacatttgcaacagtttaaaaaatggtaataaccgttcctagcacagaccaacttgcaaagggttgtatgtctctgaaagtattcaaagctgtaaaatatcagacaaaaggatctcctacttctaaattttgacttgagctattcaatctcattttcccagaaataatatgtcaggtcagaggagaggaggttaatagaccataataataatgaggcgtctagctctaccactgaagtataaaatagaacagttaacatttgggaatatcaataaacaggaagctaaaagcgttggttttgaggtaagataaaagatagataatttgtgggtaaaactgcactttacaaaattggtatcacaactaagaacaggtgaactttgcttgctcacgttttggggcagttaggaagtgttaatgtggaaagaaaagatgtaatagattcctaaggagaaggagagtgctggtcagttgaaaagatactcactcacaacatgcctcaaacacttaccataattaagaacttcattgaaggctctgctgctaggtaaatatactttgagtttcaaagtgattttaagaagcatatttttggatacaaattttatttgggggactacctcttaaaatattcccctaaggtatcaagaaacttttctattaaagggccacatggtaaagttttaggcttcgcagtccatacagtctgtcacaattactaccaccattttaatgggaaagaaaccatgtatgatacataaacaaatgagtatggctgtggtccaataaaactttatttacaaaaataagaagcagatcagatctggtcatagcctacagtttgctgcacccagtggaaaaacgttaagccaccctatgtattttagtctattttttatgccctacaatttctttgtacaaaaatctcaacactattttatttagttacttcacggaaaccaagggaagatgaaaaagatggccaggcatataagtttgtgtcacgatctgagatggaagcagatattaaagctggaaagtatttggaacatggggaatatgaaggaaatctctatggaaccaaaattgattctattcttgaggttgtccaaactggacggacttgcattctggatgtcaacccacaagtaagctgcttggattccaaagctgttttatattttattttctgtggagtttttttcatgtgtgtcggggttgttgggttggggttgtttgttttgtcagggtggaaaggtgactccctccattacctttgggtgatagagaatgttattatgtatacatagctagttaaataaatctctgaacaattagccaacagaggcttgggtggcaatagaaactgtgtgattagatctacaatagaagtttagtatgtatttatttacctgttcaagtaatgcataagtgcttgtgttaagaaatgttaagtttaaaactcaagtctgcaatataaagaataaaaaattaaagtcactccccctcctacctgacacacatgcacacctctacactattcattttattgtcactctatatttctgtcacctaccccttcccactccgctacactcagcccaacctcacgtccctactcagagataaaaattgttaatagtttcttatgtctctttctagtcatttcactatgccttaaatacaaatatatataaggtaatgggttttctgtttttgttgtttctttttacataaatggaaaaattctatatagattcttcaggggttttattaaatagaactattccttggagatctttttgtggtagttactgtagagctttttttctttgtaattgctatatagtatgaatatatattcatttaaccactctccaattaatcaacattgaggttatttctactttttgagtattaacagaattctacaattaacataaaaaagagtttacatcactcttgatgatttttggatcattgttttatactttgttcaagaggaacagactgagttcaaaacaaaataaatggatcactgttttaagaaagtactatatggaatgagaaggacagaacagggataagtattaagttatgtcctttaattcatagaacaagtgcaaacagcctttgatatatactaaagggtagcagaattctagttctaatattgtataaattggcttataattattcttttacacaggcactgaaagtattgaggacatcagagtttatgccctatgtggtatttattgcggctccggagctagagacgttacgtgccatgcacaaggctgtggtggatgcaggaatcactaccaagcttctgaccgtgagctaaccatacgattttccttctaaaatctttccttttcttttgagcatgtttaactgttatctaatttatttttatttatttatttttgaggcagagttttgctttgtcacccaggctggagtgcattgatgcgatctcagctcgttgcaacctccccgtcccgggttcaagcgattctcctgcctcagcctcccaagtagctgggattacaggcatgcgctaccaggcctggctaatttttgtatttttagtagagacggggtttcaccatgttggccagactggtcttgaactcctgacctcaggcaatctgcccacctcggcctcccaaagtgctagaactacaggcgtgagccaccgtgcctggccaactcttagctaattatgcttatgaaataaacatgctatataaggtgctacagaatgaaaattaattagatgtagttaggatctggaacagtattcttttacttgaaaatcattgtacactttattttaaatcaaaagtttagttcccctttgtaaaatgaaatggaccaatattaaaatatgcgtattaattgaacgccttcattttactagtggggtaactgggctccgagatcattaacaggcatgtttattatatggtttatcattggtaaagtggggtgttctgatgtttagtttctattacatgttttttcctttttttcctgtctacttttttacttaatggaaattcaaaaatatatacaaaagagggaataaatgagtccctatgccgatcgcctagcttcaataatcgtggcaatttcttgttttaattagacccctccccacttcctcctcaccttgaattattttgaagcaaatctttgatatcatgtcatctgtaaatacttcagtatttatatctaagagataaagacatttaaaacataccattaatacaacaaaaattaataagcagtatcttactatcatctacatgcagtctatatttgagtttctccaagatttttttttttttttttttactgttgatttgttcaaataaggattcaaacaagatcaacacattgaatttactcattgtcacctaaatcttttgccagcttaattgaggtataattgacacataataagctgtgcctacctaacatgtacagcttgatcagtttggccacatatttgtactcatgaaagccattacaaccaaaataatgaacatgtccatcatctccacacattcgcctgtgctcctttgtaacctgctccccacacccttccccctaccactgtcaccttttcccctcactgtacttgattatatgccatgaaatcaggtagtattagttttctttgttctttttcaagttgatccatgtctctactttctgaacgtatgaaacatagtgtttaatgtctttgcaggttctaacatttgagtcagttctggattggttttgattgaatgatttttctctttattatgagtatatcttcctgcttctttgcaatcctgggaactttctttggatgccagacattgtgagctttgttctaggatgcagttatttggaaatagtttgtttttttcaggtctcactttttaaatgtgttaggtaagacccaagcagttctcattttagggccagttaatccccacaaataaggcaagacccatttggtactcctaccacagggcttgtgagtcatgagattttctgttctggctaagggggaataggtaccattcctgggtacctctaatcctttctggtggttctttctcagcttcaggtcgttgtaccaatgtgcaggttggtacttcagccgaatgctggaaggagaccttctacaagtctccaaagtctgtctgtgctgctcttcccctctggcattccgtcctgcaaactcttgccacctgggtctccctggactcagctctgtcctcaactcaagagtcctgtaggctcctttgggctcactctccccatcctactgcccagaaactctttcaagccaggaagctggggtaatcataagagtcacttcatttgttttctgtctttctatgatctgtttttaataccttgatgtatagtgtcttaaaaagtgttgtttgatacattttgtccataaattaattgttaggtgggagagttagtctggtgcctgttattccaccttggctaaaagcagacatccctttaaatctgtaaattctcactgccaccctcccttccctctcttttcacattgtactttagttgttaaaataataataataataataagtcacttatcctacagcatgttccatagtctggattttacccattctgtccccattgtatcattttcctctatcccttctatttcctgtaaactgataggttgatctagaggttggtcagacacagattcaggttattcaggtttttggttggttggtttttgcaagaataattcataggtggtacttgttttattaacatcatgaggcatatgtcaggctttttgtcataagattaatcagtggggtcagaagttgttagcctgatctataaagttcctcagtaactctttacctactggttttagcaaactttattgatctttgccttggataaattatatttttagggatggcaaggtggtagtattctaaatttgtcattccttctacatttataaactagaattcttaagaagaacttttcctcatcaagtagttgattattctgaggtacgattgatacaggaaaggcaggatacatctttgatactgtcctttgtaggtcagctttcagaataatgagtttattccccaagagcctctagaggtaacaggtgaccagctgagattggctttgtttttttagtttcatgagcacgtatgttcaaacttatctggtgtgctttattctgttgcagtgattatttttattgatgctaagattgtcccatcattgaccaataggagcttattctagttggcccttgagaccttttttttttttcatgacgctgatagtcttggatagcttccttgctatctggtagaacaaatgttccaggctcatcttgtacattttctgttctaggccaggaatcagccatttttccaagatactctggtttcttttagggtaaatggtgttttaagaccataatactaacagtgcccattgtcacatagttgatcactgcttcttgctagacctttttatgtggacagtgctagcatatatgcttttctgtttgtatatttgaaggaaaatatatcatgaatttattctgatattttccaatcaaattcaagattacaggatttttatttaacttattttatcttatatgtctaattcctttctcttatgctgaatatcccttctcataacactggaaatgttagaattagaatatcaaataattgctcatttgctttattctacagtacaaacacaacattctgggaataagtatatcaacataaccaccactagtatcattactgtgaacagtccccccaactgcccacctaggtctttctgtctttagagtatatcccactaagtagatacagtcagatcactatggggtttttttgttttttttttctgtcgccaggctggagtgcagtggtgcagtctcgactcactgcaacctctgcctcccaggttcaagcgattctcctgcctcagcctcccaagtagctgggactacaggcatgcgccaccacacccagctaacttttgtatttttagtagagatggcgtttcaccatgttggccagggagatcactatgttttaaagtcacttgaagtacctcctttctgtgtatttaggtcagttattcttttttaatgtttaaattgttgtgtcttcagcagtaggagcctattcaacttggcttctgagtctttttaacatgattctagtaatgtctgataattccttgctttctgatatgacaagatgttccagattattctacatttcctggcccagacctggaaccagccatccagaagcccttgtttcttttagtgggagatagcatttaaagataattcagtcagtaagggtgtacattaaacttagttggacattgtttttagaccttttcagtaaccagaagtaggaaataaattttttgtttttagaaaacatacatcattagttcaatttgatagcttcaaatgaaattttacattattcttcttgggctttatatttgcctttttttcctcttatcctgaaaaccttggttcctgatgataacatcatttcttaacttacatgtatataaatataaataaactaagcacatatgtaatttgagttatatctgtattaacaatatgattattgaaaagttttaagttccaggcttttattgttcttaggatatatcccactagattttttttttccttcaacttttgttttaagttccggggtgcatgtacaggatgtgcgggtttgttacataggtgaatgtgtgccgtggtggtttgccgcacagatcaacccatcatctaggtatttagcccaacatccattagctattcttcctgatgctctctcttcctcgtgctcccaccctgacaggccccaatgtgtgttaatcccaccatgtgttcttattgtacacctcccacttataacccactagatattatcttcttttaaagccactgaaataattccttgctgtgtggttaaaccaccaacttgaaacacaggtttatttgttttattttgcttctgatttttaagaatggctgtaatttgaatttaaattttgttgtataattctatacaacattttcattgctccaacataaatcttaaaacgaatccagcttttctgtgccctctccactttgtttcctcccacccacataggctgccattattggtagccattttaccatgttagtttccagtataagcaagtgtgcctgtgtctcctcctcccccccattttatacataaatcataccttatgtacaaaatgtgcctgcatttttccaataccagtatatcctagagaccactctatagccagagagagaatctttattcctgttccatctgtatggcatactccgttattgttaacagggtttttttttttttttttttttaacaaatcagattgctaataggcaagaattgctttcaagttgaaatgtggcctgtttacatatctgtgatcaaagatattttagctgtttcaaactcatttagaagtctcagtatcagctgaaatgtaagtattagggtccttcaggcctggcagtgaatccacttctctctctacactttctacacaaatgacattgttgagtgcttccatcaacatcatttacattcatgccattgttatgctaatgatttatatacagctagcccagacctcagagctctgatttgcataaccagtcgcctgctgtacatctccacttggatgtctcacagacatcttaagcttaccatattacaaagtagcacactttgtttcccccagaaattatgctctccctacccctcaactctgtatctcccacagccacccatttacctaagttagaaacctaagagcaattcttgactcattcattttcctcccttttcaaatcctggatgatgtaaaaagctaatcctgattattttatcaccaaaataaatttccagtctggtgtcattttcatctcctctgtcaccatcataacctaggcaacccttctctctgacctggattcctgccatcagtctccctgcttccactcatgtcatgccacattttcactcaaggcccacagaggtctttccatctcgtaggggtcctccatgacttaccttgtttcccaacccttcacccattctggtcttctttcagtatcttgaacgtgccagggtcgtttccttcctctggattttgccctgctgtttcctctgcctgaatgctgacctccttattttcatttagttctcagcttaactgtaatttactactcagtctttttccaatcactttatctaaagtagatctcttaaaattctttgtgcctgttttgtttctttcatggtagttatcacaacttggtatttcttatgtttatttccactttatctcctccactaaaggataggaaccctctctcttattcattgtcatacccactgattctgaaacatagtagacaccttaataggaactcaataaatatttgtagaatatgtagaggtatagtgaaattcaaaacaccatcttacgaaaagctttacttatgtagaacccattgcttatgtactccccacatcattccaaaatgactaaaattactttatgaaatataaacagtgcctggacaaaaacataaataaaagtatgtgagtatgtgttttggtggaggatgggcagcatgtaaggttaatcttcaaaaaacacttctaagattctctgatcttatagagaggtagcaagtttggctttgagcttaacagccactgcaaattgggtaccatgttgtacatgggccatgagataaaaatctttcgaaaaggatgatatagtggagctggaaaccagtcacctgcagtaattgttttgttactgtagattcattccaagattattttcagcagtcttttaattaggaattttatcctaatataagtgaggcaaaagatgcagaatactcataaatgtaaacatgagtgttgttggaaagaataagacatgaacagatggcagtgttgtctttaacactatatggattagattttgaagattaataccagaattaccagaaatatatctaacctatttattatattcacttctagttggagtttgagcaagtaaatatgcattgtaatacaaacatttccttttaaaactcttcaacaggactctgacttgaagaaaacagtggatgaaagtgcacggattcagagagcatacaaccactattttgatttgatcatcataaatgataatctagacaaagcctttgaaaaactgcaaactgccatagagaaactgagaatggaaccacagtgggtcccaatcagctgggtttactgatgattcagtaaggttaacaatgaaaattaaactcttaaaaagtgactgcaacaaataaaccttctactgagaaaatacatcacagatagaagattatctgctaagtccaggcatttttatggtgtagattgaaataatagtacacttctgaatttttatataaaatgtggttggaaggtgtactaatatataatttatcttaatttttctaactttgtatggataatctttctattcatatcacataaagaaatgcgttgaagcattttgtatatgttttgatttagtacccttgcctttttcatcaaaggaattttcaaatcattcactctaacattggtctcatattttcactgtgataatgaatattacttgaaatagttttgtaaagctgtcatttagttcagtattcaaatagtgaagggttagtcttaatagaagaaaatatagttattgaccttccttcttataaatttcttacaaaagcagaattttaagtcagtgttatagctagtctactaccatctaaatctgacatcaaaagtctgatcagtttacgtattttcattatttcggagatgtatggctatccattctaatttatacagctatattagttttgtctcttcatttctatctttactgaaaaattgaagagcaataccttgcactctcttttgaggttattctttttatttgttgcagtgatatgatgctaactaatttaacatgtacacagtaagctctggggctggaagcaaggtcatgcagactgagagagtgccttatcctgtaaaaccttacagcaaaatgacacttgaagaaagtttattttcacatgtaaaattttgactgacaaaaggaacctactactttaaacaatggttttattagaacatggtcagcaaatgtatcatgcctctgcaaattttagtgatgtttagagatgcctctaagtttgcagttggaggtttttgtgcttttagaaatgtgatgtgatccttagggtacctgttttgtctgttgtgttgagaaccaaacccattgaacaacttaaaaaattgggaaataattgtcagctattttgtatacatacacacaaaatatatacattatataatatgtatattatgtattatataatatatataaaatgttttgtatattttttacatatctgttaaaaaatgtactttgtttttttgtttgtttgttttgagatggagtctctctctgtcacccatgctggagtacagtggcgcgatctcagcccgctgcaacctctgcctcctgggttcatgcgactctcgtgcctcagcctcccaagtaattgagattacagttgggtgccaccatgtccggctaatttttgtatttttagtacagatggggtttcaccatgttggccagggtggtctcgagctcctgacctcaagtgatccacccaccttggcctcccaaagtgctgagattacaagcatgagccactgcacctagccaagaagtgtactttttgtttaatgattaccgaaagaagttctcctttagaagcattgacttatacaaattcccacattcacctcagttaatatcttcctttaggattcttggataatagaaattcttcctaaaacatactcagagatgcagctcattattaaattaaggtaaccacattctgtattgttgctagcttttcatgtaaacattattcacactttaaaggattaggtgtttaaatattgatggtcatctttgtctggtgttaggtgccagacacctggctgctgaatttgttttttccctcaccaaagttgtcatttggaacgccagctgggaggactttgaaggaaaagaaaatatatgacaataggcagtattgacacattgtttaaaatctttttcacaataaaacaaaacacccaagttgtcatattgttaaagttggaaatctataggtttttctttttttttttttttttctttttttgattctagatttcatggccagaacacaaattcacgtttcttgtcctaggacagggaattggtgacaaaatggattatactattttaataacagtggaaactttcaaactacatgtgtttacaccaaattcttggcttctcaaagcaacatgaattaaagcacagtatcaaggtgatgccctatgacaatgtttcaacacacacttgaaattttaagagaaatttcagttcttcactcaggaaatgtgctgtattctctaatgtactttcatgctgcagcatggagcctctttaaacagctttgggataattatagcagcacaagaagtttatctgcaaaatatttcaatcatcttggtacaatagatgacttttacatcatgtatattagccttatgtgatataaaatgtattacttagaaaatatacttaaaggaattatttctattataaatggtattcatgattgactacttaattaatgcacattagatttctcctaatataaaatgaaatgatgcagtttagttcatttcagtctagatgcccgtactaacaagaatacagttagataagttcattgtatctcaatgaagaatcattgaacttgaaacccaagtcccaaatgaatctgcaggaatgagcagtgctctgcgggggcaaacagccccagaggtcccagggttcttcctaggtaatgagagtatagctgtgatcaaggaaatgtgaacttctcttttgggaagatctgcgataattagctttatggaagcgaaaatggtttagagtggtgttgagcaattgttaagagttgaaatagacacacacatgcatgtgcttttgggaaacatgatgtgccaacgtattaatgtgcctgagggctccttgtggataggtcagtgtccacatttcagcactcagggcatgactgtacacaacctaagactatatatatattttttcattttcaaatgtacaaatacccatagaggtgatgtgcctggataagtcatttaaccatagcttagtgaaataaatgtgatggccctaaaaagtagaattttcactttcattacagccatgcctttattatgcagtctccatttctgtgtgatatttggtaatatcacatgtcaaatacatcaggactttgtttattttggctaactctaactatacaattgctgaacatagctttctgaaatagaaattataagagaaacccagtatgcctacagcattagtagcctaaatcctagattctagaatccaataaatttatagtagttcttaagaagtttcctttaaagcaacaaatagattattaaggcaaatttagataataacccaagttagcaataaaaccatgtgacattatagattatgtccagatactaactgctttgaccataatatcccaatgacaataaaaaatgatccttggtttaaaaattattaaatggtacttatttttatgtataacaagtgtcatgatcccagtgactggagttgattttcaaggtggatagccatagagttaggtaaaattattttgaattggcaaactaaagataacaattttgaaaattgctcaaaataataatctacttaaattttacttttgtaacttctgaaacagtactccattatccagaaatcacaggctagagagccaataattttgtagtaatgaaccttaactaaacatgaaaaaggcaatcctgaagttttatgtacatagatagcagttcattttttaaatgttcgagttgccatatattatgtatgtgtgtgtgtgtgtgtgtatatatatatatatatatatatatatatatatatatacagctatgtgtataatatgtaaaattctcccaaaatgtatgaatataaaactgaatgtattcattcatgtaattataactagcattctaaaatttttaattactcccatttctttgacattctgaaactttttttagattgttttaaaacgctctggttccaccttgaagctgataatctttctgaaaaatatatgagaaactcagaaagtagtcattattataataaatttaattttcttagggaaaaagggcagggttctggatggaaacccctttggaaattcttatttaaacttttgaatgaatctttaatatgattcaggctgagattatgatacctgcccttgtcttatttcaagaggtttgctgtgagaattcatgtaataacatctgtaatgtatttggaatttttgggagaaattcattcttttaaataatgggattattgtatatagtacaaatgaatactcacaaaatttaagaatacatttgactaataattgagcatcttgtcagtttttatgcaagcatatattgtatacctgaggaagatgacagttctataatttttttaaggtaaggttatttttaaattgcatttttgttctaacgttttgcaatttatattctttttaaaatatttcccataattcatcatgctagcttctgtgttcttggaatagtttttgaaaaatgcagagattcgaacatgagtccttaatatactaaacagtgaaagaatgatgatatctcatttctaaagtaagcatggttcacaccactttggcaatacactgcagtactttttaaaaaatattctctagtgataaaagtaaagacagggtactggccaagatcctaattctgacttctgactgtgtgatcttcgatgaaatttatatttccctttatcattactattctacttgttaagtaaggctaagttaatatttgtcttcgccttaaattctgatttgtaatttgtaactctgatgtggtagctgtgatatggtgaactgaaaaatccttattaggctactttatctgttctcttttagttattttaaagtgtacctgtttctgaagtaatgtagtgaatggtgaatacttttcaggaattcttccagttttaaaatagccccaaagatacagtttcagctggtggaaggtctgttctgctctcttagtcctaatcagaaagtcccttttatcttataatcccatactaaatccaaacccttagcaaatccttgctgccaaccagaccactcacaaatcaaacaaaatgtaagcaagcaatccagtactcggttacaccagaagactctgatctttgcccccgaaaactgtcctactttatccttatacctgaaatcactgcatacctgaaatcactgcagccctactgttttacccataccattaatttaaaaaggcatctatttctttatagaaagaaacattcacagtgaggtcttagtttgtgaacctcaaaatccagatattaatccactttagttattactttgtaattgcttctcagtcattggctgataatgcaatggtgtgataaatttgacttatctccacatacaaaagtcgatcagaagggatagttctcttcctttttttcccctcctactggctcttactgttttctaatctccagtgtaaatggaatgaacacatctatagttaaggtaaatgccaccaatcagaagattgagtgatttactgcttgtaaagcaactgtctttgaatcttatgaaataggtggtgttgctaccacagaagccaaaaaggtcttaaaattggaaatagatgtctttattgtacttcagccaacagcaagccaggggaaggaacatacataaatatgacaggtcatatatgaaatttggctctcctcctatcaaagtagcctaggagcttggaggaagcctaattaactaaaacaggaaaaaagcatactcatctgatgtaaaaactcatcagctgtaaattaccaacattaaaccagaagtcattaccagttaaaatgtgtggttttcatcttattcttaaataggagaggtggacagtagtgtaagtaacattgctttaaagacataaagcttgtcctggtaaacatggtctaaatgagaaatgcctccatcttttcaggtagaaccagatttcaggcatagctcagctacatctgtatttgaaatacaataaaaatatttcttatgtctctgtattctcttttaaaaagaactgctgactggctcctgtctcttcagtaacactgatttttttttaaagaagtgatatgttggactctgttgtagaagaatgagcactagtattcagcaacaagtgcaatttctccatgttatgttgagctctgttggagcctatggtgagtatttgatgtgaaaaccttgctgtgggaattttttattcttccttttccccccacgccagttcgttttggtaagtcttttatttgaacacaagacgcatgcttttttaaacctctagtttttgaagtaactgtagaagagaatctttaaaaaaaaaaatggagggcagaatgcttgttagcaatctgaaaatcaaagctgaacaagctgcttaaagtttctgattaagaagtttaaaaagaaaaattaattgctactgctttccaggtaattgtattattagtttctgtataaaagaaacattattgctgttgtataaataaaattttcctgtggtacaattaagtattgatttttcagaaactgtccctataaatcttttcacatatttccatgtgctgtccaaaacaaaaattattgaaatgtctaatctgtgagattatatactcctggtaaaatatttttgtatatataaagaaatatttactattggaaaaaagtgtttcatttataggtagaactaaggtttagagataataatggaggatatctgattagcgttgataattttttttaactgtttgcattttttaacttttaggtttgggggcacatgtgaaggttttgttacataggtaaacacgtgtcacaggggtttattgtacatattatttcatcatccagatactgaacctggtacccaatagttatctcttctgctcctccccctcctcccaccccccactccagtagaccccagtgtctgttgtttccttctttgtgtttataagatactatcatttagctcccacttagaagtgagaacatgcagtatttggttttctgttcctgtgttaatttgttaaggataatggcctccatctccatccatattcctgcaaaagacatgatctcattcttttttatggctgcatggtattccatggtgtatgtatatatctcatattttctttatccaatctgtcattgatgggcatttaggttgatttgtgtctgctattgtgaatagtgctgcagtgaacatttgcatgcatgtctttatggtaggaagatttatattcctctgggtatataaccagtaatgggattgctgggtcaaatggtcgttctgcttttagctctttgaggaatctccgtactgctttccacaatagttgaactaatatacactcccaccaacaaggtatgagtgttcccatttctctacaaccatgccagcatctgatagtttttgactttttaataatagccattctgactggtgtgagatggtatctcattgtggttttgatttgtattcctctaatgatcagcgatattgagctattctacatgtggttgttggccacacacacgtcttcttttgagaagtatctgttcatgtcctttgcccactttttaaggcggcggggggggggggggtttctcttgtaaatttaaggtccttatagatgctagatattagacttttgtcagatgcatagtttgcaaatattttttcccattctgtaggctgtttactctgtttatagtttcttttgctgtggagaagctcttaagtttaattagatctcacttgtcaatgtttgcttttgttgccattgcttttggtgtgtctttgtcatgaaatctttacctgttcctgtgtcccagatggtattgccaaggttgtcttccagggtttttatagttttgggttttacatataagtctttaatccatcctgagttgatttttgtatatggtgtaaggaagcggtccagcttcagtcttctgcaggtaatttcttttaagtgataacagtctttgtaaaaagcccctaaagtcatttagtgtttcccacctaaataaataaattgatcacttgcctctacaacagaagccctaatcattgttttctctatcccagtccgatttggtggttttcaaagacacactcaaggaaagaatttcagtgttggggaaggttaaaatataggaccaagaaaacaaggcttctgtgctgagatggcatggaatactcttgaccatttcccagctagccaggaatgaaagaaatcctggtgagaaagagaatgaaccgacccattctggcacacagctcagcactgcagcctgcagtgagagaggacttgggcccaccaggctgacgagagacagaggtgtggcactgggtgcatgcaggaagcctccttccagacagggccctttgcaactcttgcccaagctaatttccaggattgcctacctcatacttaagaaattgctagtacagtgtatctctgatgtctccagaggaattagatgttatcttcttcattcttccatcttatactaccttagttttctatcacaaccacaaatttaccagcttaagagaacacaaatttattacctcttctgtaggtctgaagtccaacacaaatatcaccaagctaaaatcagggtgtcggccggggcctgttggggttcttacctggagatctgaggaagaacccgtgtcaggcttgtgcaggttgttggctgacttcatttccatgcagctataggactgtggtccttgtttccttgctggctgtcagagggactgctctctcctcttgctctagtcccttccatcttcagagccagcagcagcacgtagattctttctttttttctttttttttcgagacggagttttgctcttgttgcccaggctggagggcaatggcgcgatctcggctcactgcaacctctgcctccccggttcaagtgattctcctaccttagcctcctgagtagctgggattacaggcatgcgccacgacacccagctaatttttttttttttttttttttttgtatttttagtagagacggtgtttcactgtgttggccaggatggtctcaatctcttgacctcgtggtccgcccaccttagcctcccagagtgctgggattacaggcgtgattacaggccaccgcgcccggccagcacatagattctttctactggcctcacctttcctacgttttcttgagccaagtctccttcactgcctcttctgccttctttcctttaagggcccaccgacataatccaggataatgtgtccatgtcaggtccataactttaaaagcatttgccaagtccctttctgtcatgtaaaataacatacaggttccagggactaggtcttggacatctgtgaggagtcattaatggaccaacaacactagctatgtcagtggtactcctttcatccatttatgaaagagaagtggtcctcttatgaatggaaatatcagaattaagggggctgtcttgtgctattctaggaagtattccttttatttactgttttccagatgacctgagctaatagacttgtttgcaaatctaattatgaaaaacaagtatggttcttgatgtcaatagaggcactttttaaaaaagatttaatgagaaagttggagatactatctagttagaaacctccaaagatgatatctccaacttcctcattaaatctttttcaaacctttggaggcccaattccacctcactgcaagcacacctagccttgctgcacccgcatctctacaggtgtctgctaagatgcctggcagtaacctcaggctgggaacaactgtagtagcataaagctacctcctttttaatagctagttcttaaaacacaatccagcatgtcaactggctggtcttagaacaattgtgaaacagctagattcctgactgtttgatgtaacccagactttcggcgcttgctgggatggcttctttcaatctgaagtctttcattttgtctgttttttaatttggaggataagacatacagaattctagcaggaatagaaagctaaaaaatcttcctctgcctcttgtctcaacctctaagtttctttctccccaaaggagccaccattagatttcgtgtgaactctttaaatgaaattttccattaatattgataacatgtatacatctatctatctttttacacaagtagattcatattataccttctgtttgcagtttgttctttttacttatttcagaaaaccagacaaaaggcaggtatagtgccaccattttagcacaactgctttcacttttgcatattcctttccag

SEQ ID NO: 486 - DNA, 2270 bp, Homo sapiens
gcggctggctgcgcgcgcggaggcagcggcgggggcgaccggagctggggcagagtggggagcgagggagggggaggagagagagggaggcggagggcagtgagagacgcatttccagttctcaactacgagccacgagtttgcagatggggctgctcggcggcgcctgtggctgagggagagcagcggcggcggggagcgaccgggagcggcggcagcggcggcgcggaggcggctgaggtgcgagccgcaatgcagcaagtcttggaaaaccttacggagctgccctcgtctactggagcagaagaaatagacctaattttcctcaagggaattatggagaatcctattgtaaaatcacttgctaaggctcatgagaggctagaagattccaaactagaagctgtcagtgacaataacttggaattagtcaatgaaattcttgaagacatcactcctctaataaatgtggatgaaaatgtggcagaattggttggtatactcaaagaacctcacttccagtcactgttggaggcccatgatattgtggcatcaaagtgttatgattcacctccatcaagcccagaaatgaataattcttctatcaataatcagttattaccagtagatgccattcgtattcttggtattcacaaaagagctggggaaccactgggtgtgacatttagggttgaaaataatgatctggtaattgcccgaatcctccatgggggaatgatagatcgacaaggtctacttcatgtgggagatataattaaagaagtcaatggccatgaggttggaaataatccaaaggaattacaagaattactgaaaaatattagtggaagtgtcaccctaaaaatcttaccaagttatagagataccattactcctcaacaggtatttgtgaagtgtcattttgattataatccatacaatgacaacctaataccttgcaaagaagcaggattgaagttttccaaaggagaaattcttcagattgtaaatagagaagatccaaattggtggcaggctagccatgtaaaagagggaggaagcgctggtctcattccaagccagttcctggaagagaagagaaaggcatttgttagaagagactgggacaattcaggacctttttgtggaactataagtagcaaaaaaaagaaaaagatgatgtatctcacaaccagaaatgcagaatttgatcgtcatgaaatccagatatatgaggaggtagccaaaatgcctcccttccagagaaaaacattagtattgataggagctcaaggtgtaggccgaagaagcttgaaaaacaggttcatagtattgaatcccactagatttggaactacggtgccatttacttcacggaaaccaagggaagatgaaaaagatggccaggcatataagtttgtgtcacgatctgagatggaagcagatattaaagctggaaagtatttggaacatggggaatatgaaggaaatctctatggaaccaaaattgattctattcttgaggttgtccaaactggacggacttgcattctggatgtcaacccacaagcactgaaagtattgaggacatcagagtttatgccctatgtggtatttattgcggctccggagctagagacgttacgtgccatgcacaaggctgtggtggatgcaggaatcactaccaagcttctgaccgactctgacttgaagaaaacagtggatgaaagtgcacggattcagagagcatacaaccactattttgatttgatcatcataaatgataatctagacaaagcctttgaaaaactgcaaactgccatagagaaactgagaatggaaccacagtgggtcccaatcagctgggtttactgatgattcagtaaggttaacaatgaaaattaaactcttaaaaagtgactgcaacaaataaaccttctactgagaaaatacatcacagatagaagattatctgctaagtccaggcatttttatggtgtagattgaaataatagtacacttctgaatttttatataaaatgtggttggaaggtgtactaatatataatttatcttaatttttctaactttgtatggataatctttctattcatatcacataaagaaatgcgttgaagcattttgtatatgttttgatttagtacccttgcctttttcatcaaaggaattttcaaatcattcactctaacattggtctcatattttcactgtgataatgaatattacttgaaatagttttgtaaagctgt

SEQ ID NO: 487 - protein, 536 aa, Homo sapiens
MQQVLENLTELPSSTGAEEIDLIFLKGIMENPIVKSLAKAHERLEDSKLEAVSDNNLELVNEIDITPLINVDENVAELVGILKEPHFQSLLEAHDIVASKCYDSPPSSPEMNNSSINNQLLPVDAIRILGIHKRAGEPLGVTFRVENNDLVIARILHGGMIDRQGLLHVGDIIKEVNGHEVGNNPKELQELLKNISGSVTLKILPSYRDTITPQQVFVKCHFDYNPYNDNLIPCKEAGLKFSKGEILQIVNREDPNWWQASHVKEGGSAGLIPSQFLEEKRKAFVRRDWDNSGPFCGTISSKKKKKMMYLTTRNAEFDRHEIQIYEEVAKMPPFQRKTLVLIGAQGVGRRSLKNRFIVLNPTRFGTTVPFTSRKPREDEKDGQAYKFVSRSEMEADIKAGKYLEHGEYEGNLYGTKIDSIVVQTGRTCILDVNPQALKVLRTSEFMPYVVFIAAPELETLRAMHKAVVDAGITTKLLTDSDLKKTVDESARIQRAYNHYFDLIIINDNLDKAFEKLQTAIEKLRMEPQWVPISWVY

SEQ ID NO: 488 - DNA, 2307 bp, Homo sapiens
gcggctggctgcgcgcgcggaggcagcggcgggggcgaccggagctggggcagagtggggagcgagggagggggaggagagagagggaggcggagggcagtgagagacgcatttccagttctcaactacgagccacgagtttgcagatggggctgctcggcggcgcctgtggctgagggagagcagcggcggcggggagcgaccgggagcggcggcagcggcggcgcggaggcggctgaggtgcgagccgcaatgcagcaagtcttggaaaaccttacggagctgccctcgtctactggagcagaagaaatagacctaattttcctcaagggaattatggagaatcctattgtaaaatcacttgctaaggctcatgagaggctagaagattccaaactagaagctgtcagtgacaataacttggaattagtcaatgaaattcttgaagacatcactcctctaataaatgtggatgaaaatgtggcagaattggttggtatactcaaagaacctcacttccagtcactgttggaggcccatgatattgtggcatcaaagtgttatgattcacctccatcaagcccagaaatgaataattcttctatcaataatcagttattaccagtagatgccattcgtattcttggtattcacaaaagagctggggaaccactgggtgtgacatttagggttgaaaataatgatctggtaattgcccgaatcctccatgggggaatgatagatcgacaaggtctacttcatgtgggagatataattaaagaagtcaatggccatgaggttggaaataatccaaaggaattacaagaattactgaaaaatattagtggaagtgtcaccctaaaaatcttaccaagttatagagataccattactcctcaacagagtttcatcaatatggagaggcatccagcacacatcccatcaggtgaagtgtcattttgattataatccatacaatgacaacctaataccttgcaaagaagcaggattgaagttttccaaaggagaaattcttcagattgtaaatagagaagatccaaattggtggcaggctagccatgtaaaagagggaggaagcgctggtctcattccaagccagttcctggaagagaagagaaaggcatttgttagaagagactgggacaattcaggacctttttgtggaactataagtagcaaaaaaaagaaaaagatgatgtatctcacaaccagaaatgcagaatttgatcgtcatgaaatccagatatatgaggaggtagccaaaatgcctcccttccagagaaaaacattagtattgataggagctcaaggtgtaggccgaagaagcttgaaaaacaggttcatagtattgaatcccactagatttggaactacggtgccatttacttcacggaaaccaagggaagatgaaaaagatggccaggcatataagtttgtgtcacgatctgagatggaagcagatattaaagctggaaagtatttggaacatggggaatatgaaggaaatctctatggaaccaaaattgattctattcttgaggttgtccaaactggacggacttgcattctggatgtcaacccacaagcactgaaagtattgaggacatcagagtttatgccctatgtggtatttattgcggctccggagctagagacgttacgtgccatgcacaaggctgtggtggatgcaggaatcactaccaagcttctgaccgactctgacttgaagaaaacagtggatgaaagtgcacggattcagagagcatacaaccactattttgatttgatcatcataaatgataatctagacaaagcctttgaaaaactgcaaactgccatagagaaactgagaatggaaccacagtgggtcccaatcagctgggtttactgatgattcagtaaggttaacaatgaaaattaaactcttaaaaagtgactgcaacaaataaaccttctactgagaaaatacatcacagatagaagattatctgctaagtccaggcatttttatggtgtagattgaaataatagtacacttctgaatttttatataaaatgtggttggaaggtgtactaatatataatttatcttaatttttctaactttgtatggataatctttctattcatatcacataaagaaatgcgttgaagcattttgtatatgttttgatttagtacccttgcctttttcatcaaaggaattttcaaatcattcactctaacattggtctcatattttcactgtgataatgaatattacttgaaatagttttgtaaagctgt

SEQ ID NO: 489 - protein, 234 aa, Homo sapiens
MQQVLENLTELPSSTGAEEIDLIFLKGIMENPIVKSLAKAHERLEDSKLEAVSDNNLELVNEIDITPLINVDENVAELVGILKEPHFQSLLEAHDIVASKCYDSPPSSPEMNNSSINNQLLPVDAIRILGIHKRAGEPLGVTFRVENNDLVIARILHGGMIDRQGLLHVGDIIKEVNGHEVGNNPKELQELLKNISGSVTLKILPSYRDTITPQQSFINMERHPAHIPSGEVSF

SEQ ID NO: 490 - DNA, 2085 bp, Homo sapiens
ggagggggaggagagagagggaggcggagggcagtgagagacgcatttccagttctcaactacgagccacgagtttgcagatggggctgctcggcggcgcctgtggctgagggagagcagcggcggcggggagcgaccgggagcggcggcagcggcggcgcggaggcggctgaggtgcgagccggctcatgagaggctagaagattccaaactagaagctgtcagtgacaataacttggaattagtcaatgaaattcttgaagacatcactcctctaataaatgtggatgaaaatgtggcagaattggttggtatactcaaagaacctcacttccagtcactgttggaggcccatgatattgtggcatcaaagtgttatgattcacctccatcaagcccagaaatgaataattcttctatcaataatcagttattaccagtagatgccattcgtattcttggtattcacaaaagagctggggaaccactgggtgtgacatttagggttgaaaataatgatctggtaattgcccgaatcctccatgggggaatgatagatcgacaaggtctacttcatgtgggagatataattaaagaagtcaatggccatgaggttggaaataatccaaaggaattacaagaattactgaaaaatattagtggaagtgtcaccctaaaaatcttaccaagttatagagataccattactcctcaacaggtatttgtgaagtgtcattttgattataatccatacaatgacaacctaataccttgcaaagaagcaggattgaagttttccaaaggagaaattcttcagattgtaaatagagaagatccaaattggtggcaggctagccatgtaaaagagggaggaagcgctggtctcattccaagccagttcctggaagagaagagaaaggcatttgttagaagagactgggacaattcaggacctttttgtggaactataagtagcaaaaaaaagaaaaagatgatgtatctcacaaccagaaatgcagaatttgatcgtcatgaaatccagatatatgaggaggtagccaaaatgcctcccttccagagaaaaacattagtattgataggagctcaaggtgtaggccgaagaagcttgaaaaacaggttcatagtattgaatcccactagatttggaactacggtgccatttacttcacggaaaccaagggaagatgaaaaagatggccaggcatataagtttgtgtcacgatctgagatggaagcagatattaaagctggaaagtatttggaacatggggaatatgaaggaaatctctatggaaccaaaattgattctattcttgaggttgtccaaactggacggacttgcattctggatgtcaacccacaagcactgaaagtattgaggacatcagagtttatgccctatgtggtatttattgcggctccggagctagagacgttacgtgccatgcacaaggctgtggtggatgcaggaatcactaccaagcttctgaccgactctgacttgaagaaaacagtggatgaaagtgcacggattcagagagcatacaaccactattttgatttgatcatcataaatgataatctagacaaagcctttgaaaaactgcaaactgccatagagaaactgagaatggaaccacagtgggtcccaatcagctgggtttactgatgattcagtaaggttaacaatgaaaattaaactcttaaaaagtgactgcaacaaataaaccttctactgagaaaatacatcacagatagaagattatctgctaagtccaggcatttttatggtgtagattgaaataatagtacacttctgaatttttatataaaatgtggttggaaggtgtactaatatataatttatcttaatttttctaactttgtatggataatctttctattcatatcacataaagaaatgcgttgaagcattttgtatatgttttgatttagtacccttgcctttttcatcaaaggaattttcaaatcattcactctaacattggtctcatattttcactgtgataatgaatattacttgaaatagttttgtaaagctgt

SEQ ID NO: 491 - protein, 426 aa, Homo sapiens
MNNSSINNQLLPVDAIRILGIHKRAGEPLGVTFRVENNDLVIARILHGGMIDRQGLLHVGDIIKEVNGHEVGNNPKELQELLKNISGSVTLKILPSYRDTITPQQVFVKCHFDYNPYNDNLIPCKEAGLKFSKGEILQIVNREDPNWWQASHVKEGGSAGLIPSQFLEEKRKAFVRRDWDNSGPFCGTISSKKKKKMMYLTTRNAEFDRHEIQIYEEVAKMPPFQRKTLVLIGAQGVGRRSLKNRFIVLNPTRFGTTVPFTSRKPREDEKDGQAYKFVSRSEMEADIKAGKYLEHGEYEGNLYGTKIDSIVVQTGRTCILDVNPQALKVLRTSEFMPYVVFIAAPELETLRAMHKAVVDAGITTKLLTDSDLKKTVDESARIQRAYNHYFDLIIINDNLDKAFEKLQTAIEKLRMEPQWVPISWVY

SEQ ID NO: 492 - DNA, 33905 bp, Mus musculus
  misc_feature (1)...(33905): n = A,T,C or G
ggaaaggccagcatgggtattttttttttaagaattattttgtgtatatgattacactgtcactgttagacacaccagaagaggccatcagatcaatcccattatagatggttgtaagcccaccgtgtggttgctgggaattgaaatcagaaagaacagtcagtgctcttaactgctgagccatctctccaaccccctagtatgtagtatttacggatgtcctttttggtgccagcaatacagcttggtcttactaccaagcctgacaacttgagttcaatccccaaacctacatgaaaggagagaacccaaacccacaagttgttctctgacctccacacatacccccatgcacaaaataaaaatataataaaaacttttgccaggcagtggtgacacgcacctttaatcccagcactcaagaggtagaggcaggtagattattgagttcaaggccagcctggtctatagagtgtattctgttaacctacacagagaaatcctgtctcaaaaaaaaaaaaaaaaaaaaaaaaaaaagtcattttaaagctgggaacagggtattaatattcctccttctcttctcaagctttcctgcctccctgaagcagacctgtaggcaagtccttagggaagaacccagagtgtgagttacttctcagttgctgtgagaaaatgcaatttaagcaggtttatttgggtttgcgtccatggtgctgtaagatccctggccctcggtctgtggtacttacttggagatgcccctgagtgagacaccgagctgcagatcaatgcaaacacaaaaagtttattttccagtgcttcaatcagtccctcaaggggagtgactagaaggcgacccaaatggctattacaagccgtttttatactttttaggggcccaggttatatcagcaaggttacagttcaaacttattggctcagcattactgacctttaaatctattgactagcaagcatgacacgcatttgaactttacctgggactttccagagggtcaggtgactatcagtctgtaccttctgagaattttttactcaagaatgttcctgtgggtggagaagggaactttacctagcggtaaactgaggcgggagggaaagctgtaaagagggtgtgggactggaaaaagcccttagggtccttcagtgcagtccattggtggaaggcaaggcacggagaaaccatcagccctgagtgataagtggttgtctggctagctttatgcagctttatgaagcctgggaaacgatggtgcccagtgttaggatgggccctcccgcctccaaccctaatcagcgtaatccttcacaagcttgccaagaggcttgtctcctaggtgcgtccacatgctgtccaaccggcagttaagccgaccaccacggctccactgcgcctcagcttgacccctaaacagatcacttttaagcagtaacttccatcccttaccattttacaatgctaaggcccatcctgtccaactttgagcgtctccatggagactctctccaggagagtgcagaggaagacccaaatcaagcagtgcagacaccaaatcctgctgttccacatgggctcagcgtttagggactcaacgtgatcatttggacttaggtaaacccactcctccaggtctccactccccgtgataatacgcacagcctgagactggctccatgccttgcctgctgctcttagcagatgtcttggacttggggggtcttcattacaagttaggttttaccttcacatcttcacgcaggggcctccatggccaacctgcaagggccccaccccgccacaccttgcctggctttatctgccctcagaaaccatggaacctctcaatattttttttttttttttttcaagacgggtttctctgtatagccctggctgtcctggaactcactttgtagaccaggctggccttgaactcagaaatccacctgtctctgcctcccaagtgctgggattaaaggcgtgcgccaccaccgcccggctcagtcttgtatcatctatggcaggaaaaccaagatccacatagatggtgctgcctggttctgctgctaagaagtagcctagtgtccttgggccagagctgtatccacttcagtgtgctcaccgtatggaaccactttactaagctgctccttctgaagaacaaggagcccctctccagtgtcagtttcggctcttctttataacacatttgcattttcacaggttggaacttctgtggatgggattttgcctgcaggtcaccatttgtgtagcccaagggctttgatagatccttctcagtggcaccaattgctctaacggttctagctgcattctccttaccagacttattgctgatccatcttgaaatttcttcctccaaataaatttgtccattacctttaagttcaatttcactccagttcacagggcatgtgcagaaggaagtcatattcttagaagatcacaggaacaggctttcatccagtttctgataggtccttgctgtcctctgtcacctcgaggtgagcctctagtgagcggctacatttctccaaccattctcagcttcccagctcccaccaaggaggccctataagccctgcttgcagtttttagttgcttttctagcccaaagttctaaactcttttacattcctccaataaaacaaggccccatgggtctactggccacatggtctgccttagcacagcaacagccccgctcttcacagtcacaatttcggaccctaagaagtcacttaacggagaagggaaagttaattctggttcatagttcatcagggcacggaagtgatggcgccaggaccttgatgtagcttaggaagcagaaaccgatgaacactggtacccagccagctgtctctctttttttgttcagtcaggattgaagcctagagaatggtgtcacctatttttagagtggttcttccaccctcaacccaatcactataacacctcacatgcttgtctaacatggcgattctcagccttcctgatgctgcgaccttcaatactgatcctcatgttatgacccacccctcaaccagaaattgctttcattgctacttcataactgcaattttggtactttgatgaattgtcatgtaaatactttggagaatacaaggttgccaaaggggtccggtgcaaccaatgggttgagaaatgctggtggagaggctaagtggtctctcacaggagtgcctggaggtttgcctgctggattaacagccatcactacgcagcctccagagagcactgaggtgtcgggtggctttctccttagcctgtgtacttgtcgtcttgagatgctgatctgattctgagtcattgatccagaacactgaaacctctgaggaggctggggaagcccaaaggacctctgcaagaggcactgaagtcctgggtactgctgaacttaaactcctgattgcagaaggagaggggtgtgttttctgtttgcctaatgtccagcttgtagaaggcccccggggaagcctgccaggcctgattgttctcaacagggaagcagtggagtgtctgggggctgagcgtgtatggcatcttctatctctgcaccctttgttggattttttttttttcctagtgaaaaaggaagctagagaataattgtgtattaggggctatcagtagcctcaaagagtctccctaaagcactcttccccaggttttccactggagcctcccccacccccaccctgctttgcaacaacagatcaggctggcctcagagcacccatcaacaaaccctcagtcctcagctcttgagtgacccgaggaacaagggctctgagcagatcaaggtacagaacattcctgcccccactgaccagcagccaaccagagtggttttacctagacaagcaggtttatgcctcagtttgctttcagcggctgtaacaagcaccgtgaccatgccaagcaacttgaggcagaaagggcatattgggagaaatgacagtgggttataatgggaagtacatgttacatactttcttattccacaagcaaaaaacaaaccaaccaaccaaccaaccaaacaaacaaacaaaccaaccaaccagggagcagttacagtcacgtccaagcaaaacccaaggccagcagtgttggtcaaattttgcagctcaatgtttgatacccaggtattcattcacaatcttttgcctgtggcagtttgaaagaaaatgactcccattggctcatatgtttaaatttttgactcccagttggtggactgcttaggaagtgttagatggtgtgtccttgttggaggaggtgtgtcacggggtgggatttgaggtttcaaagcccatgccaggcctactcttgctttctctgtttgctgcttgaggatatgtaagctctcagccgctgctccagcaccatgcccgtctgcctgctgccataccccatgccataatggttatagactcacaacctgaaaccgtaagccatccctgcggtaaacgctttctctcagaaaccgcttctgtcatggtgtctcttcacagcaatagagggataactaagacccagccccacgtctttgtctctggtatctgcagcacacacagcttgtctagtaagctcaggctggcttctctctcttgcagtccttgaccgatgctccggagcctccaaaatgcaggggtctccacggcaggtaagaaggctgtacctataccagtggcctctcttcagagtgactgccactcagtcacacagtgccaagtctcagctgctcttcctgactgcctcaggcctacaagcccaattccatgcttttacacattatcaaatccagctaccagctcgagatgcagccttgcctccagcccaggccacagcttccatatgctgacccagcggaaggaatttccagctttcatctcagtgacactggcctcttattagttgcagccgctatttcagcatccattattccagtagaacaaaggtctcacttccagattctttttttttttttaattttttattaggtattttcctcattcacatttccaatgttatcccaaaagtcccccataccctccccgccatcacttccagattcttaattctaatttaccacacaaatggaactgtgagaaggcactcaaacttccctcagaaacatcataagccagtctctatcatcttattttccaaggttctaaagaacagttcattaacacttaagggcttttcttttctgtttgtttgtttgtttgtttgtttgttttttcctgtatagccctggctgtcctggaactcactctgtagaccaggctggcctcgaactcagaaatccgcttgcctctgcctcctgagtgctgggattaaaggcgtgcgccaccacaccaccaagcccagctttttttttttttttttttttttgactgatgattgatgtgggaggacccgagctcactgtgggtaggacttaccctgggctgatggtcctgagtgatgtatgaaaacaggctgagcaagccagtgagaagcaagcactcctggtctctggcccagttcctgcccaccagattcctgccctgagttcctggtgtgacttcctttgatggtagactgtgactttggaagtacaagggacataaatcctctcctccccaagttgctctgggtcatgatgatcacagcaatagaaaccataacaaagaggagacggagtttatttggctttcaggtcacagtcggtcactgagagaagccacctaaggaattcaagtcagaacctagaggcaggaactgaagcagagccctctgagggatgctgcagtactggagaacctagaggcaggaactgaagcagagccctctgagggatgctgcagtactggagaacctagaggcaggaactgaagcagagccctctgagggatgctgcagtactggcttgcttcctcccacttgggcacagccagctttcttcaaatgatatttttttcagacagcttgcttgtaccggtcaggaccacttacctggggtagcaccacccacaagcgccaacatcagttagcaatttaaaatatacatctatacatacattcatgcccacaggccagtctgatggaacagaggcaattcttcatgtaaggttccctcttcttcaggtgtgtcaagatgataaccaatattagccatcacagatagacaggcgggaatcctgaaaaaacagactcccatatggactgccagacagttggatatatttggggtcagataagaagatagacatttagacagatcagtggtcccagagaaatacagccacccccttccttgctgactaaggttaatcccagccgacagaagacagaccatgtccactaagtaaattaccccagtggagacccatcccatccacccacttagcgttcatatgggcagatttacttattagccaaacttgagcctatgagaaagatccccttagtaagattccatcttttggagaaacagacacaactgggtctccagctaggttttcatccctggcttagacagatctccagctaccaaagtagagatttctcaggcactgctcagctctcctgtcccctgcatattaccatagctgaccccttgacctctcagagctgccgctgctcctgggtactggaatggtctccagtgaccactgcccaccagtggcatctgctgctgctccataggggcctgccacgatctcttggtgacacccttccatctgctccggaggctcctggcttaagatgactgccattggtcatctcagagattcagcttcttcagactccaccattgtcacacagatcacagaccttctgtgtaccacctccctgggtcgccatcaacccctcccagcccatccaccaggcattcacaatccctctggcatttattcatggccatcttttgcttctttgggaaccaatactctaagtccccacagccactcaggactttattgcccttcaccctgctcctgaggatgctgactccccaaatgctgttagtaacattcactgacctccaatgaactcagcaattactgtccaccctcagtcattcctgctcacccccttagaacacacaggtgtgaacagtgactccccaagaacttataataagtaggttagagttcccccacttttgaaagctcaaaacaatttatttcttcatatatacacatatatatacatatacataatgtattttgactatattcctctcattctctagcctcattcctcttcctgcagatcgccctcttcacaagctcctctcctactttcatgtctttggtgtgtgtttgccccattgcatttaactgagcttgcctgagtaggttgagcaggcaggggggggggtcatttatcggaatgagggaaacctaccagtgggtgtagcactaaggagtatgcctccctttcatagctattaactgtctatagcttctcagggaagcatgaggccccctgtgcccaacttaatgatgatggaacttgggtgggcccagtgttaggagctcacacctgcaactgctaggtcacatccaggagacaatgtttcatggcactcccaaccctctgcagcgttccctgacttcggagagtggatacagacgtcccttttagggctgaacacttcactcaccctcagtacttgaaccagttcgatattactctcacctcccaatatttaagcgaggtccagcaaactagcgtctgcaaaccacatttaaaaaaaattgcgacaaaaatccaatgattggtgtcaatgtggtttctaaaacttttaaaaattctatttggctggttggtggtggcacatgcctttaatcccagcactctcaaggtagagagacaggtggatctctgtgacttaaaagccagtctgatctacagaactagttctaggtcagccaaggctacacaaagaaaccctgtctcagagaaagaaagaatttatttttatgtatctgccagtatatctgcgcaatgtgcaagcctggtgctgtggaggccaaaagagggcattgggtcccctggaactcaagtttctggtgtttgcaagccattgtgtgggtgctgggactcaaacctcagtcctctggaagagcagtcagtgcttttaactgctgagccatcactccagccctcctagcattttttaaaaaaattacatttacttgagtgcttctgcacaaggcataaggaggtcagaggacactgtatggaagtgattttttttccttctaccatgtgtgtcaggggatgcagcacttattaataggtgtggctgcaagacctttacctgttgagccatcttactgccatcttccccatttcagtgaaaaagttttcatactatcaccctcatactatctggctgttttgcattgccaccactggcagacccacagtgacgtaagacagagatctagcgataaaacccaataaagtcttgtctggcttttaaagatgctatccattccttcatttaaacactgtgatgaccaagttgacagccttttaccaatgatcccactcatcttccagtgacttaaagcacttctttttttggtttttcgagacaggatttctctgtatagccctgggtgtcctggaactcactctgtggaccaggctgccctcgaactcagaaatccacctgcttctgcctcccaagtgctggggttaaaggcgtgtgccaccaccgctccgctcagcatgcttaaagcactttcaattcgccttagccctacttttgcacacgaccccaaacggatctcctcagagccctccctcaacagagagttggcaatgcttgaaattctttggttcccttgcaggtggtgctactccatctgctgaagcctgttttggaaagaacccccttttattttcttttgtgtgtagggagatacaccctcactatagagcctgtgtagttgtccaaggacaacactctggagtcgattttctccttccaccatgtgggtcctaggtatcaaatccaggttgtcatgtttatttagtggcaaggcatttacctactgaaccattccaccatcattaaaacattttcctttctctctctctctctctctctctctctctcccttccttccttccttcctttcttccatttttttttttaactttgagacaggatttcatcacaagctaactttgaattcacaatgtaagctagggtgaccttgactttctgattttcttgcctccaccttgtgaatgctgggacaggcactctaccaattcagctacaaaccttagcacggctcttctccagtctttagtctccaggaccccaggagcttcagcataagatcttcttcaaactcctgaagggggacggagtgagtgttgagaccacttttcctcccaatgcctctctagtctcttcctccctgaggggtatgggttaagatccacaagttaggactgaatcctggtgtccccgcttttccagcaggttccaaaagtgaaatcacaccccctaccctcagaaataggccttttcccagagcaaagtgcagggaatatatttattcgaagtccccgacctctctcatattccgctgtcgcacgactgtgaacctcagcgctcgcaggactccggagcaaccttgggaacccggcctgcgagattgagagcgcagccatccccctggaaaggccaatgggactgagcgttccgtgcggactccaccagcttcacggcagccgaagcacccgaggcgccagtggggaattgcgggacccgcagctacttggacggccagttcggctgcggtggcagccagcacctatgggcgggacgaacggagtgaactcctagtgccattggccgaggagcctgccaattaccggtcttcattggctgctggaatggaggccccacctcgcagtggctaaattctcggagtcggatcactccttgtgggagacctcagagcgggtcgcagcatgagtcgccatacggacttggtgaggagcttcttggagcagctggaggcccgggactaccgggagggggcaatcctcgctcgtgagttcagcgtgagtgacactccagccatcaagcttcgcagccaggcgctccccacggctgtccacctgtgcaatatgaaagctctgccttttcctctcagctcccggggcgtctcctccctcctgctctcggctttcctcttcccgcacttctctcaccctgactctcccagccttccgcactttgcccacaggtgcccagagggtgaagacggctactgtttaggaggagccagacacactcaggtgtcggtgtcgagctcccggtgcaatcttctccctagcggggccgtggcttccgccgtggagggaggcaacacacctgcgctggactcgagtccccaacccgggccactcctgggtcaccttgtaatcccagggaggaagtggtttggggcagcagaaagaggaacgaggaaacttgtagcctagcctaggtttcgcgttaccagtctatcctagggcttttcagaactgtggccctgggagctctgacttcattttcacctgttttgaattgtgaatgataaaagacaagccggtttgaaaattaggtggtttgggtagatgcacctagcacgcgttgggtattcactggctatattaactgtatgcacctgcctttaacatggtttacaaaggttgtaaacgttacctcgggccaatcaagcttgtgagagctactgccactcaacagccatggcacacaacatgtaatgacgtattttaaatagagtgacatgatccaaatacgtaatacactatctcaaacttagaaatgtaaatgacaatgatataaaaataagtgtgacattaaatgatcacttacagcctggcatggtggcacatgcctgtaattctagcagttggtagcctaaaaccgggggataaccatgagttcaaggccagcctgaattacataattttgtgaccactctggaatactctggagattgtttcaaagaatgaaaaagatagtttacacaggccaatatgtaaaccagtaacagtgaaactctggtggtggtgcatgcctttaatcctagcacttggaggcagggaaaggaaggttactgtaagtctgaggtcagtctggtctacacagtgaactccaggacagccagggatatgtaggaagaccttgtctctaaaacaataaaaaaaccaaccaaacaaaaaaaataaccccaactaactaaataagcaaaacaaacaaacaaaaacccaacaaagcaaccaaacaccacaacagatacaacaaacattaataagaaccaaatttatagcagggtgatgatggcacacacctttgatttcagcacttgggaagcagagccaggtgaatctcttgagttcaaggccagcctggtctacagagtgagttccaggacagccagggctacacggagaaatcctgtctcgcaaacctaaaaccaaaccaaaccaaaaaacccaaaaagcaagcaaacgaacaaacaaacaaacaaaaaacccaaaccaaatgtattaagttagtaagtaaatatacacacaagcatatggacaggttaaatgtgagtctagataattttcatatgtaaatgctgtaacagaagaactactagcataaagtatacattttataagcaagaagatatgcataaacaggaagaaggtgtctctgggggctggaaaaacctgaccaacataagtaaaccactttggaatggtggcccaaacacaatgccagtcattgcaaatatgagcacccgataagagcggtactcttcaccagttataataatgcaacagctataaagcacctatagcatcttcctacatgttatacctcatatctatagcatattgtcatgctgtaccttgtttaaagtatttttaatttttatttggcgcatgtagctatatatgtatgtatgcatgtgtgtatatagatactcttggagactagaaaaggctattgaatccctgaagctggaggtaccagcacttgtgatctggccagtgctagtgccaggaaccaaacttggttctctataagagcagaaagcactcctaaccacttagccatcttttctaagccctattatttttttgagacagggtcttgagacaggttcaggccggtcttgaattgaatatgtagccaaggatgactttgaacttgtttaaattatatgtgtgcacacatgttctgggggaactggacaaccatgagagctacttttacccttctatcttaccttggggtgaaagtcaggttatctggcttggtggcaaacacctctacccactgatgcatctccctggccccagtttaatttgttttgggggtgggggtcttgttcatgccacagcacctatgtacagtcagaggacaattttctggtgtcaggtctccttatggtgtggggatatagggattgagtagaaaatcttcaggcctgtgcagaaagtgcttattatatgcaccgaactatcttttgggtctaaatgatgcatattttattatgatttatagtacattataacatgattgaatgtgcagatctgagaggtctggattcaatctttattggggtacctccttgagggacctttggcaagttactcaaccactcactacctacatcaacgttcatctgcacaatggggagagtggatagccccccacttgggatgtctaaatcccctagcactgggcctgactttcacctgctgtcctagatattattacacagatgctagtacggctgggtctcactctgttctttctgctcatggtgctttccactaggacattaaggcccgctcagtggcctggaagtctgaaggtgtgtgttccactaaagccggcagtcggcttgggaacacgaacaagaaccgctacaaagatgtggtagcatgtaagtcagtgggtatcttgagggaatcagtgccacttgcacaaatgctgggtggcagtgcccatttggccgcacccacccacagccagcccctcccactcttcctccctcccctcaaaccccgccccccgccactccccaaagcatgctattgcttgtgcttgaggtagctgcattactccctgaagccacaagggggcagagctccactagtgtgctgtcaccccgcttgcttttgcctgggagggcgtcagtgacttgacacccacccctccacatgtcccaccctctcccagatgatgagacaagagtcatcctttccctgctccaagaggagggacatggagattacatcaatgccaacttcatccgggtcaggctagtgatcaggggaggggtggctttggggtgggttgggacaggcttcagcatctcgttaatgaatgggcctttcctagggcatagatggaagccaggcctacattgcgacgcaaggacccctgcctcacacactgttggacttctggcgcctggtttgggagtttggggtcaaggtcagctttgcgggacagagagagaggggcatggttctgagtccctgtccttccgatttctccttactcagtggcctccgtcttccttaccttttgtctaggtaatcctgatggcctgtcaagagacagaaaatggacgggtatgtatcctcagcctcctagaatgcaaagaaggcttgtgcagggaggagaggaggcgcggagtctccttcttgtccctagaaccagagtccagtccctgcctgactccactgcagctctgcaaaagccactggtcctaattttgccttgatctttttccttttgatcatggggttgtccccacagtactggcagcccgatcagcccacatcatgtactgaagagtctccaccctggtctctttatacccttgcctgcttcttatactcccctctacaggctctgtttggggatgtcctctgccatgggttttaccattgcccattctgttacctggaccttcacgtggtgtcacacccccacatgcccacctctaactctttcctgtgtcttaccattttccttcatagttcttgtctacctcaacacatgggataattctaaaaggggaaatgcacatcacagtagtatgacgaccctccacaagctattatttttacctttgactatcttcttaccgggatacaattctcccgtttagccaggcatgccagctcccagtgtgtacttcaggttcttaggaggccaaagtaagagcatcaaaactttgaggctgccgggcggtggtggtgcacgcctttaatcccagcactcgggaggcagaggcaggcagatttctgagttcgaggccagcctagtctacaaagtgagttccaggacagccagggctatacaaagaaaccctgtctcgaaaaaccaaaaaaaaaaaaaaaaaaaaaaaaaaagccaaaaaaaaaaaaccaaaaccaaaaccaaaaccaaaaaaacccctgaggccagcctgggcaactcagggagaccatccacacattcaccaccctgttagcagtcccagcccatgtttaaagtcacaggcaacccctagtcccctagtctccttttgatgccagcagatttgcctactcggcatgtttaacatgaaatggaattgtgtggcacgtgccttccacgactggcgtcttcctctttgtgttctcggttcttgcatccagaagcatggccctagtgtacttcttttgattgctgaatagcaccttgaacgcacctacatctcactcctcctctaagcagtttgtagatgctggattgcttctctgaatcacaccgctgtgaactttcgtatgcaagcctttgtgtggacatgaacttagagtttgcactaggtggaactgctggctcatagaggaactctaattttaactctagtttaaggaagtgacaggccattttccagagtagctgtgtcaggttacttttccatccacagtacacaactccagtttccttacatcctcgccaacagttctgattccttctcattttgaaaaccttttacttactgtgtataggggcatgcgcatgtgtgcacatgtgtgccgtggaatggggcagaggtcagagacaaatttgggaagtggatgtctctttcatccatgtgggtccctgggattgacttggcaacaagtgtctttacccatgagccattctgcctgttacccctgttccctgccccccctacccccattatagccattgttggaaatataagggagtctctaactgggtcttgtaaaccttgtggtaaaatatatgtaaacataaaaatcgccatgtaagggactgaaagatgtctggaggttaagagcacttgttactctgtagaggacctgaactcctaggtagtacctacatcaagtagcttataattacctataactccagccccaaagggatctgatgccctcttctggcctccttgggcacccaacacacacacacacacacacacacacacacacacacacacacagcataaactcctcctcctcccctggtcctggccacctgtcttctgtccctattgttgcctgtcctagccgcaccgtgtaaatgggattataaaatatgtgtccttctgtttctggttcctttcccttgatggttttaaggtctgtccatgatgtcatgtgcaccagaatgtcattcattgtaagactgaatatgccatggctttgtgtcgtgtttcctgtacccattcatctgctgatagacagttgggctgctctcccttttagaccacggttggcacacactgataaaacagtttatgtttgcttctggctttcgttttcatttgtgtgagtcaatgcatgtccatgtgtggttatggatatgtgtctctgtctcgtgcatctcactatatcaccttggctggcctggaactcacagagatccacctgtttctgccccccccccctgcttctgctatattgctaggtttaaagacttgtgacactctgctggctcttttgttcctttaggggtcctccctgaactcagtccttgaattttctcagcttggctagaagctggcaagccccagagatcttcctgtctctgcccaccgctgagctggggctacaagcatacaaaggtgcctagcttgttatatgggtgctaggatctgtgctccagtgttcatggttgtgtggcactcttaattgctgagctctctctctagaactgtctattttttttttcaattatttgaatataaatctgcagcagaattgtttaatttttttttttccacagtggctagaacttttcggcttctattggctaggggttttggtctctccctatgttcagccacacttgctattttgtatgcattcattgtgtggtgtgcacatatttagagatcaaaggaggatgtcaggtgtcctgtgctgtccactttctgctttttttccttgactcgggtgtttctcttagcctagaactaggctggcaaccatagcctagagatcctctgtttgttctttgcccctacgatgttggagttacagggtataccagccatctcccatgggtgctgggtctttgaattcagatcctcattcttgttcagcatctgttcttacccatgagccatctctccaggtcaacagttatttacctcccactcatggggatggagaaatggctcagcggttaaaagtgtattctgctgttgcaaaggacccacatttggttcctagcaccaacatcaagtggcttacaaggacttggaactccagctccagggcacctcacaaccctggcctgttcagttacctgcattcacaggcatgtaacatccaattaaaaatgataaaaataagtccttgtttgtttgtttgtagatagggtgcctctgtgtagccctggctgccctggaactcactctgtagaccaggctagcctcaaactcagagttctgcctacctccacctggcaaaaaatacatcttaaaaaagaaaaaaaaaacccactcatttttgttttgtttttcatgtgtttgtctgtttgtgtgttttctctggacagacatatattcaggttccattttaaaattgggttattgtttttagtactgagtggaaagagttctggataaaagtacttagctgggcagtgatggtgcatgcctttgatcccagcactagagaggcaaaagagttcgaggccagactggtctataaatcaggatccaggatagccaaggctacactgagaaacctgtctcaaaaaaacagaaaaagaaaccttgtgatgtagctcagtggtagagccagtgttttgaaaaaacagaaaaagaaagaaagatagaaagacagatagaaagagagaggaggaagaaaaaaggaaagaaagaattgcccagcatggtagtacatgcctttgaaaggcagaggcaggtagatctctgtgagttttacactagcctggtctacacagcaagttccaggatagccaggaataaaatttacaactttgaaattttatatcatattttttatacttcttgatgttgtatgcttgttttcattaatgacacaccaaatagcttatactgaataataatacaaaattgatagtcttctgttctagcgaccttattgagttgttctagcgaccttactgagtttattggcctggtggcacgtgtggtatgcattcttaagtcgctttcccataaaaatgagtcatgtcatatatagatcaaagctttgtttctttcctttcccagcctgcatggttgccccccctcccccaccctccctcccctcctccatcacttcctcttctcctttccttcccgtttgcttatggatcttttcccattctctgattatccccatggtaaccagccacattttgctaaatctttgtcaaggacagaggatgctgggttttcagtgttgcgtagtccagtgttagattgtgttgactctggttaaaaagtgtttcaagtgttttactgttctaggaaggcagtggagactcttctatatattttatcacatggtgctttctctttccctggcttctgtttgcatagcctctcttccctgcaaattctttgtcacgatctctaagccgtgcgtgatccgtgcttctgcggcatggtggaatcactgggttccttagttcctacagcttagtgacaaggcaccaccctgcagggcatgggtctatgatacatagtagtccatgcgattagttacattgccaggccataggaggatatcctgaactgtcttcccccagcaagatcagaatctagcttctgtgctgtgtgcaagtatttatgttatactctgcagctggcctccacaagtggctctgaaggtgacttccccattcactccttgccttcctcaccttactttgcagaggaagtgtgaacgctactgggcccgggagcaggagcctctaaaggctgggcctttctgcatcaccctggtaagttggagcagggctgggaacagaggtggcttctgcaggccttgggtagtgtgggagatctcaaggaagacatagggagtgagaagccttggctaggcttggaaaggtgaaccattttctcataactcacacagtgaaaaactcagaatgcatgtagggtacgtgcggttccctggccctagcagtgttaactatgattacagttactgcggtaaccaaaatggacctgttcccgtttctgcaattcctgttttacagtgttctttattggaggaaatccctccacatacaggtacttggccattaacaaatgcaaggagaccattgtgttgcagaacaataggactctcttatgctcactgtaaaaggattagtgtgttttgtatactcattcctctttcccagttctgacaatagcttccttgaatgcattgggagaaatttgggccaaaagaaaatttaaaaatatcatcagtatagaaatttatttgaattaaaaatatatggctacatttacagtagcatagtacctaatggatatatcatcattggttgtgaaaccatttaaaaaaattcttttgaggttaaaaaaaaacccataataagaatgaaaaaggggggctggtgagatggctcagtgggtaagagcacccgactgctcttccgaaggtcaggagttcaaatcccagcaaccacacatggtggctcacaaccatccataacgagatctgatgccctcttctggagtgtctgaagacagctacagtgtacttacatataataaataaataaacctttaaaaaaaaaaaagaatgaaaaaggaagcaaaaatataataaaacataaatataaaaatataaatataaaacttttataaaatgtaattcccgaggaatgggaatcagacacacaagcttgtccaccagagtctgacctgtaggacgtgcccagcaaggtctccagtctcaaccactggctaagccaggaatcctgggaatgcaagacggcaccgcaggcctaagagttttaaaaatgtttttagtgtttgattttcaattaagaatgctttactggggctggtgagatggctcagcggttaagagtgccgactgctcttccaaaggtcctgagttcaaatcccagaaaccacatggtggttcacaaccacccgtaatgaaatctgatgctctcttctggagtgtctgaagacagctacagtgtacttacatatagtaaataaataaatattaaaaaaaatgctttactttcatcaggcaagatagtgcacgcctgccatcccagcacatgaaaggcggatcccgaagaggatctctggtttgaggccagtctgcgctctacagcaaggcttgtctccaaagcaaaaccaaacctttgctttctagaaatgtgaagtgtgttattaagatctctatttctcttctgtttcctctgtccccttctcacatggcgcatagacaaaggagacaacactgaatgcagacatcactctcaggaccctccaggttacattccagaaggtaccaaaacgttaaaaggtgaagggactcttgcatgggacgagctgtctcttctcctgtaaatggaaactcatgattccagtccgttcctgtcaccctcagttagcacacaatggacttgcttgtctctatggtgctgagggtggagcccacagccttgtgcatgctatgcaaatcctcttagtctccttccttatctggtggatttaaatggaataagcttagaactatagtaggtgatcaataaacatgttttttttctttttttcttttttccactctctgttcccgtctcaggaattccgctctgtgcaccagctacagtatatgtcctggccagaccacggggttcccagcagttctgatcacattctcaccatgggtgggaaggaggcccgctgcctccaagggcttggacctggacccctctgtgtccactggcaggtttaggaaatttgttttatnnnnnnnnnnnnnnnnnnnnnnnnnnnnnnnnnnnnnnnnnnnnnnnnnnnnnnnnnnnnnnnnnnnnnnnnnnnnnnnnnnnnnnnnnnnnnnnnnnnnnnnnnnnnnnnnnnnnnnnnnnnnnnnnnnnnnnnnnnnnnnnnnnnnnnnnnnnnnnttttcttctctctctgcccctcttgctctagcccaaaccctccttgccccacttgctctggccccaagcataagtacactgtagctgtcttcggatatcccagaagagggcatcagatctcattatggatggttgcgagccaccatgtggttgtgggatttgaactcatgaccttcggaagagcagtcagttaaccgctgagccatctcgccagccccagccttccttttccagtggtatttcttgagaagcctctggccacatgttcatgatacaatgagctggaattgctagctggaatagactgcctgctggagagtaagcatagaactgattgttcacaagtctaagtgaataaaaaaggttttcctgtgccgaagaagtgcctcagtgggcaaagtccttgttgtacacattcttgagttcagctcttcattacccagtcaaacccagggcaggtggcttgccccctgtaaccccagtgctgggtgctgggtagagacaagtgaacccattgaggggttgccagtcagtcaggcaagcaaatctgtgagcagcctgtttagtaagagatcctttcttaaatttaatattgacctttggtctccacactgtcaacacacacacacacacacacacacaaaatgggtgcatactaatgtacaaaaaaccccaaaaggttttatttaaagttttaatctagggatcctgcaatttaagaggtactgatctccttcaggtcagctcagaaggggttgtggtgtctgtacagttaggcagtcctgacatcccagcacttaggaagctgaagtcagaggctagcctgggcaacctagcacaagacctgtgggaaaaggaggaggaacagaatggggaaaggggcattgtgggtaggctatgatggtgtctgctctgattcacgattgtcagtgctggctgcggacgaacaggtgtcctgtgcgctgttgactatgtgaggcagttgctgctgacccaggtatgacgtcctctgctctgtgtgcagtatgtcccatgtctgcctaccagggtctggtcacacttcccctctctatcccagacaatccctcccaacttcagtctcttccaagtggtcctggagatgcggaaacagcggcctgcagcagtgcagacagaggtatgtgcttgccccgtcttcctgttcctaaggacgagggaggtttgcttagcttcccaatctccccttctcaatgaccactcaccccaacaggagcagtacaggttcctgtaccacacagtggctcagctattctcccgcactctccaggacaccagcccccactaccagaacctcaaggaggtacagagcccccaatttcaccctttctgccagccatcaacacctatacccttcttgggaacagcaaccgacttactgtgaaaggcacctttgcctcctcagagctccttccccaggctgttccctaagctcacctaggcacccacagtgacctgcagcagggctatggcctcaggaccgaccctgcctgcttccctgcagaactgcgctccaatctgcaaggaagccttctccctcaggacctcctcagccctgcctgccacatcccggccaccaggaggggttctcaggtactgggctcactctgtccctggaaaatcaacctctacagtctgggttagcttttcccttggtcttccagaaggtaattaattaggcaagtacatttttaaagaatttcaatctctctctctctctctctctctctctctctctctccctctctctctctctctctctctctctctctctgtgtgtgtgtgtgtgtgtgagagagaaagagtatgtgagtccttaccttccacgtgttttgagaaacagtctcactgtgtacatcagagcttctggggactcacctgtctctgtctcattgtaggagggttggggtctcacacactctaccacatgcgtcctccctagtcccacttgccaatctggccctgtccctcctgctgtggggattctagggacacggaacctctactttctgcctcaggggcccgccccttccctcnnnnnnnnnnnnnnnnnnnncgctttcacttcctctgcttgttgcccgctgcaggagcatctcggtgcctgcgcccccgaccctcccccatggctgacacttacgctgtggtgcagaagcgtggcgcttcggcgggcacagggccggggccgcgggcgcccaccagcacggacaccccgatctacagccaggtggctccacgtgcccagcgaccggtggcacacacggaggacgcacaggggacaacgggcactgcgccgaggtgagttgaggccctccgggggtgtggagctgaggacaagtacctattagcaactttcccgctctcctaaggctcccgagggtctaagcgctgctcggaggtcagccccagatccagcatggccacgcccctaggctactaaacgtcggggttcaagccccaaaatgagccccaggtcaggtctcaattgggagactgggctgtctaacccaaggccccaaagacagacctccgaacttggacacgcccatggacacgcctcctaccgctacctcgggaagggaaatcggtagctatgctgctctagagtccctggaactcttaaaagcagcttgagctgacccataggggttctcctgccctcagttcctgcggaccaaaactcttccgggcctgatgcctacgaagaagtaacagatggagcacagactggagggctaggtaagtcagagcctagggtgcagctttggagagccccaggacttcgggagttcgggctggggcactggactcaggttctccttcatatacctggatctggagcggtgtgggtttggaggaggttaccctgtcactccttagcttctgcatggagcccttcttcccttaggcttcaacttgcgcatcggaaggcccaaagggccccgggatcctccagcagagtggacacgggtgtaacgagtgctgtgccagttatagcctgccactcggtggtggctggactcctggaaccaccatactgctgtgcagtgtgttatgtatgagtgggacttgtgggcctgattcaaaataaaagtttctcagggcagaaaaaaataggggctttgttccagtgattctagcagtcaaagactggggctaagagaggtaagtgggggaggtggtggatctattctgagacaatttaaggaagcaggtcaggagtggccatcaccaccctcctccccgtacacctaccggagagtgcatcccagacagagtcctagctcacagagccctcagcaggtgcctatcaggatcaacaagctgacctccagctagagacacgtctagatagatcctcagataaacttgcaatgagctagaaagatctctggctggtcagagaaatggaacaccagccaggtaaatagggtgccatccagaaagacagaacttccagccctgactttccttgagatgcaagaaagtagatccttcagaacaaacatatgcacgatgctccagaccccgatcctgccccaaccccacccccaaccccaccccgccccactgccacaatgtcaccaacacaggagggtctgtatggcagttgttcatccagtcagtcctggctatgctttctccaggctcttgcaattcctgtcttgaatctgatgaaggctcctaccatgaacttgcgtatctaggcaaacattaaaatgattttcgtagaattcagtgaggagtgagccaaaaactcaactcaagagccttatgtggcttcatggatctcagaccacagccagctgcaggctcccaggttcatggcggtcctgggaagcattcgccttttagtgttgggggggggaggaggttatgaaacttgtcttatttggccacagtgtctactctcattgtcaagtgctagaagatctgtgccacgaacagctcggccaacaggaaccagggatgactgggaaaccttgggaatctttagcagctcagtgaatctaaattctaaggtgaaagtctcggggtgggggtggggcggctggagagatggctcagtggttaagagcactgactgctcttaaaggtcctgaattcaaatcccagcaaccacatggtggctcacaaccatccgtaatgagatctggtgccctcttctgggnnnnnnnnnnnnnnnnnnnnnnnnnnnnnnnnnnnnnnnnnnnnnnnnnnnnnnnnnnnnnnnnnnnnnnnnnnnnnnnnnntggtgccctcttctggggtgtctgaagacagctacagtgtacttacatataatatttaaaaagagagagagagctgtgggggactgatcatgctgagaggcagctgggagcagagaagggtcagggtgctctatttagagcacgggggctagggctgaccatcctggagtaacaaaaggaaggagaggagggatagggtgacatttggcacataggttaatctcaaagccagaaccattgaattccttgagaccagccaggaaagcagtaaattcctggaaatggggagctgttgcccaaagaggaagaattgctcatcccgaaggatgagaaaccaacagaagttaaccaggatggctgccgttaataggattaattctcagctcagagagcactgtacaggtcttagctgtcctgtttgagaacagggagggactgtattgaagtctaagagtctctgggattggcaggtgggaagactcccgggcaatctgttggctgtcagttcccccctaagaatctaccctgagtcagatggctactcactcctgactggtctctgcggcccgccttcgtagccttcctcctattccccttctgctcagagtaacgcccagattgctcagtttgttacttttattaatactgagtggcagcttgacagaatccatctttgtaagagggtctgtgcattgtgtgaacagaagtgggaggactcactgtggggatggacagcaccattctatggcctggggtcctgggctgaatgataagcaagcagtctggacacccggattcatctctgtttcctgactgcagatgggatgtgaccagctgcctcctgctcctgccgtgagttcctcgccatgatggactgtaccctggcctcaaataaaaccttccttccttaagttgtgtttgtcaagcattttgtcccaataatagcaaagtaagtaatacagggagtaaaagtctggtctggggaaagtcttaggtggtcttggatctccttctgaagaaatgagattctgttgtgttgcttttatgtttgctttgatatacttgagactaaaacttgggcctcatatgtggtagcctggtgctttaccaccaagctagacccccgaccatcttgtagctattcatttatttatttttaaagtataaaaacaatgatctccatgggtgttgtcttagagttttactgctgtaacagacaacatgaccatgcaactcttattaggacaccatttaattggggctgggttaccggttcagaggttcagtctattatcatcaaggtgggagcagggaagcatctaggcaggcatggtgcaggcagaactgagagttctacatcttcatctgaaggctgctagtggaagactccactcctaggcagctaggacaagggtattaaagcccacacctacaaggccacactatccaacattgctgctccctgggctgagcatatacaaactatcacaggtgttttgcctgcttgtatgactgtacactgtatgcagaagccagagaggcctttagatgccctagaacttgcgttacaggtagttgttagctttcaactgggtgctgggattcaaacccaggttgtctagaaaagcaacaggtacttttacccactgagccatctctccagcacctatttacttagctcgttagttgttttgaaacagggtctcatgtaactatgattgaccttgaaatcactctatcaacaaagactggccttcaactcctaattctcctgcctccacctcccaaattctgagattacttacagtaatcatgcttgattcactaaaatacttttattttgggacatagtctcagtgaattttctcaagccagcctcgaactcactctttagcctatacatatcttgagggtttgtttgtttgtttgagtgttttttattttttattttttatttaccagatggagtttctctgtgtagccctggctgtcttggaactctctttgtaggccaggttggcctcgaactcaaatacccacttgcctctgcctcctaaattctgggagtaaaggcttgcaccaccacacctggctataatccttctgcctcaacctcccacagagctaatagtatacctgtgctaccaggcccagctgtttgttgtttcttcttcttcttcttcttcttcttcttcttcttcttcttcttcttcttcttcttcttcttcttcttcttctccttctcctcctcctcctcctcnnnnnnnnnnnnnnnnnnnnttccttcctccctcctcctcctcctcctcctcctcctcctcctcttcttcttcttcttcttcttcttcttcttcttcttcttcttcttcttcttcttcttctttctcttcctcctcttcctcttctttgaaaacgagacacattcttccttttcttggcaacatatggccaaccacatttgctttcttgcttcatcaagcaactattaatcctccttttgagacctgtagtagagattgttgacttttgtaactagtcaggcggatagggaagagaatctttatgaagtcaaagagtaaagtttaatgatgggatccaaatctgagctaatacaatagctagtggggatggcttccagacaaaggcccctcagagcatctgggttggcagtggcaggtctttggttggtgatatgggtgttaccatccaggcctcgggtgttgcttggagctgaggtgggacacacatttgtgttttgcagaacttctttcagaattgtgacagaaacctggaaaggcaggttttagtctctaattctcagtgacccccccccccacacacacacaagtcaagaaagtatgagagaaattggaaacagtttgtggatgtataagcatatgtcaggaggaagcagaggggctaagattttggcaagaactgaaaataagcaaggccaaaaataagtggtttaaagataggcagaaaatagagccaagactacaatcaggtcctgggggaaccagggtatagactgtgatttttccgatgaaagatttgtcagatttgtcagatttgtccgttcatcccctgtgtcagatttgtccgtccatcccctgtgtgatccctacttagaacatttgtctgtctggcaccttaaaattgtaagtgatagctgggcggtggtggcgcacgcctttaaccccagcacttgggaggcagagacaggcagatttctgagttcaaggccagcctggtctacaaagtgagttccaggacagccagggctacacagagaaaccctgtctcgaaaaaaaaaccaaattaaaaaaaaattgtgtgtgacacacacacacacacacacacacacacacacacacacacacattcagcaagcagtacttgactgcattatttttggaactcactctgtagaccaggctagtcttgaactcacagagatctggctgtcccctgcctcctgagtgctaggattaaaggtgtgtaccaccaccattcagcattcagacatttaaaatatatgtgttatgaatattttcctccatgaacctatatccatgggagactctgcatcattttatagaatgatgcctatcaattataatttaaacaaaacaagtagaaacacaaatagccaaattaatgcttgaaaatgtgttcaacatccttagctatcagggaactgcaaattaacactcctttgcgagtttgtcttgtctcaggcagaatgtccagcatcaagaaaacaaagtgcgggtgaggatgtgggggaaagaggactctatgtccaacatgggtgggaatgtaaacttgtgtggcctctatggaaatcaggccggaagctccttaacagattgaaaatagaactgccaaatgccccagctataccattcttgggtgcaaacctgaaggactcttagttgacatgttatggatacttgagcattcatgcttgtagatatacagggtactgtagccagaaattagagcagcaaagagatccatcaacagatgaatggatttttaaaaatgtggtacatatgcacaatagagtccaatgcagccgtggggaaaagttaaggcatgacatttgcagggtgtgattgtgactggaacctattacgatactcaaatgaagccagactcagaaaggaagtagccacatctatgtcgtttgtggtgcttacatttaaaatggtgtgagtgtgtgtgtgtgtgtgtgtgtgtgtgtgtgtgtgtgtgtgtgtgtgtggttaaaggcatgtgtcacttccccggaacacttatcagtttttaaaacttgaaaagcaccatgttttctagataccgagtacaggaagaggaagcaataaatggtcaccgaagtgtcaagtgccaagacatcagtgcaaaagggcagaaagcaaacagaggactgacttaggtctgaccagccgaaggagagacagggtagtggggcttcttctagggtttgcaccaaaaaggagcattaccatagagtgcctgctcctcggggtcacaaaacccaaagctgacggtgttagacccaagggaaaaacatttccatgactgtctgattaagtaagctttatttagatcggccacatggctgccttcccctaagtcggagtttcagagaacagcccctcactggctgctttatagggaagggttagagctgatagagaacagctgttgggatgattggctgttagcacctagccagaaagagcaggagcacagggggctcaaggctgtttgtggggtagatagagcaggaatacatcgggtggaatgggagccaccatgagtgtccaggaatttagcaaggcaatgggggtgggcatccattatggggttacaggttcagcataggttgaaaacagtttgcagggtttcttaggtttaggaaacagaagctgagtcttggaaggtgtggagtgttagtaacaatgtataacaatgtggctcctgttttgttttcagtgagtctaagcacatgtgctaaccacttttctggttgtggtggtcaaattgctgtcaaggagcagtttaagggaataagggtatttgggctcagggcttcagggtccatagtccaccctggtgggaaaggcatgtcagcaggagcgctgaggcagctggcctttgctatggcctcgttattaagaagctgacagagatgaacactggtactcagctcactttctcgttcctttaagtccatgcccatgaggtcggctgcccacattcaggatgggtctttccttctctcatatgcacacaccacacatacatacatgtgaatgaaaaagaggcatgtactcacagggcgtggtggtgcacaattatccttgaaccctaggatgctgaggcaggatgctgagatctagattgaagcccatctgtctcgaatacatagaaacatttctgagtgaagaaacaaagaagtgtaattctctccccccccccctcaggtttctcagtcctagctatcctggaactgtaaaccaggttagcctagaagtcagagatttgtctgcctctgcctttgaattaaaggtgtgccacatcacctggctgcatgtaacttcttttaagctagggacttaactcagagtctcccatgatacacttgtactctaccaatgaacaacactccccaaacacatgacaagtacccactgtttaaaatttgtcttcaatttctaaggtaccctcccctaactctcaaaatcccacatcaggatggggctccgtccttgacttactgtaaggcatgtggccaaacttgtgatccttgccattaagatgggttcttcatgggcagggatttccaagtctctaattctaagtgaagttgaacaggtttgagtgtttacgatgacactcggatcccttgttcatttttccactgcgtttttcatctttttctgtgcatattaagaataaaggttaccaccatctttatggataggaagtgtcttagacacggtgaggggtggacagttagttggcaaggtgaacatctgtatgctttgatccacttatcccacttacaggaatatactctctggaaagagctaaccctttagcagaaggggagagctatatacccagtaatagtcattgttttaaaaatggagaaatcagcgttgaaagtgaaactgttttgagactgtgcaatgtggagtgcttctgagtgcaggaagccacaggcaaagcagctccatgataacaacggccgaagaggaatctgccagtggcctcatgaaaatgacccattcctggaagggaaaatggaaaacagtgggagggagggagatgggactaccggcagacagtgagaggccaaagcttttaaattcagactccattttagagaacctgacctaagtttgaactcaggtagactaacaggctggtacctagcattagtttccaagttgccatctaacaaaacctgagcctagctccagtctctaggttaatccccaacaagaccagcatctccaggttattcccccaacaaacctgcacccccaggttacaagcccaccaatgcagaggggagcagaaactaagtttatgctttgactcccagcaccagccaattatgttaaagaccacatctaattccaattagatgcttgtacacttatcccttgtttgctgcttactataaagccttgctccatagatattcaggggtccccatcaccaaaactgtcctgtgtgatggggagggggctcccaaactatctccaatagaataaagtccctgatgtgacttgtatcagatcggcttctgtctgttgttttttttttgagggggtgggtgggggctcaacccttccctggcactacaagggcatctgatcccgttgctgatggctgtgagccactgtgtggttgctgggaattgaactcaggacctctggaagagcagtcagtgatcttaactgttgagccatctctccagcctccaggaaatacttataatgctaaacagtaagccaatcaagagatggagaggggtacaggaaagaggagaaagatgtgactgggggggggggtctcctaaaactatgtcgtcccctgggctgctctgtgcaacacatcaagcagccaggggctgctcacacctgcagcttcccagtctcagccacagtaacacagcttcctgatatttgtcatgattctcttcatctatttcctgttactatgactgaatgtggttagaataaataaaccttggaaacccgggccagactccgaccatgttccttaacctaacccagtggcccactatcacctgcatcctgataatctggggcaaggcagtctacaacctttaaaacaatcttgtcaggacaaactactccaggagggagaaagtacaagctctcaggccctgcagctgagtttaattcccccaaacctcttatgctaaccccaagcactcccttcccctttggcaagtacccctttcctgctctcgtttctgcctctcgttgtttgaaataaacagctctgtctgctgaggtcagattggtctcttctgcctctttaagccacctcagaagtctaacaaagtccacatgttcttgctggtaatttatagacaataaaggtttgcctgagtcacttagtttatgcaggcagaaatggccaaggtccaggggtggcatttggtaatgccttttctgtagagccttgcgttggggcaagacatggtctggtgaaagggacacaaacaagagacctgagccaaacttttcttcaatgacctgctcctgagagaagcattagcccatcagtctattaatgaataatgtcatgagttacccctgaagtctcccctgggagtcagggagagggctcacctgttaggagcactggctgttcttgcagaggacgtgtttggtttccagaacctgcatggtggttcacaaaaatttatttattatatgtaagtacactgtagctgtcctcagatactccagaagagggcatcagatttcgttacggatggttgtgagccaccatgtggttgctgggatttgaacttgggaccttcagaagagcattcggcgctcttaaccactgagccatctcgtcagcccagcattatattttaatgtgaattttattggaaaggaacataacatcataatactcccaataatttgtttggtctacctagaggtcaatttgtatgtgcgtgcttgcatatgtgcattcgtgtgtgtaagtgcgcctgtgtgtgtgtgtgtgtgttttcatgagctcaggtgtatatgtcggagggtattgtgacaggagttgttcactttgtggttttgaaacagagtctctttcactgggatctagtgttcactgattcatctaggctggctgaccagtgaaccccaggggactgcttgtctctgcctttctaattctgacattgtaagcaaatgtcaccatggccaacctttcctgtgggagctgggggcaagctcaggttctcacatttgtgcaacttcttactgattgagccatctgcagataagcatagctggaggttcggttctgttctgtttttgtttgtttgtttgtttggaggctgaagaccaaagcttgggtctcatgcaacctagacaagttcgctgtcatggagttatatatccttagctcctatttttcttatgatttgccttggagctggttttacatctgataattctttttatatggtgtcaatttaaatgacagtaaaatgataaaaattaaagtttaccttttataaaagcaaaaataaacacatcctctgaaattgccccaccatcctggg

SEQ ID NO: 493 - DNA, 1565 bp, Mus musculus
cctcgcagtggctaaattctcggagtcggatcactccttgtgggagacctcagagcgggtcgcagcatgagtcgccatacggacttggtgaggagcttcttggagcagctggaggcccgggactaccgggagggggcaatcctcgctcgtgagttcagcgacattaaggcccgctcagtggcctggaagtctgaaggtgtgtgttccactaaagccggcagtcggcttgggaacacgaacaagaaccgctacaaagatgtggtagcatatgatgagacaagagtcatcctttccctgctccaagaggagggacatggagattacatcaatgccaacttcatccggggcatagatggaagccaggcctacattgcgacgcaaggacccctgcctcacacactgttggacttctggcgcctggtttgggagtttggggtcaaggtaatcctgatggcctgtcaagagacagaaaatggacggaggaagtgtgaacgctactgggcccgggagcaggagcctctaaaggctgggcctttctgcatcaccctgacaaaggagacaacactgaatgcagacatcactctcaggaccctccaggttacattccagaaggaattccgctctgtgcaccagctacagtatatgtcctggccagaccacggggttcccagcagttctgatcacattctcaccatgggtgggaaggaggcccgctgcctccaagggcttggacctggacccctctgtgtccactggcagtgctggctgcggacgaacaggtgtcctgtgcgctgttgactatgtgaggcagttgctgctgacccagacaatccctcccaacttcagtctcttccaagtggtcctggagatgcggaaacagcggcctgcagcagtgcagacagaggagcagtacaggttcctgtaccacacagtggctcagctattctcccgcactctccaggacaccagcccccactaccagaacctcaaggagaactgcgctccaatctgcaaggaagccttctccctcaggacctcctcagccctgcctgccacatcccggccaccaggaggggttctcaggagcatctcggtgcctgcgcccccgaccctcccccatggctgacacttacgctgtggtgcagaagcgtggcgcttcggcgggcacagggccggggccgcgggcgcccaccagcacggacaccccgatctacagccaggtggctccacgtgcccagcgaccggtggcacacacggaggacgcacaggggacaacgggcactgcgccgagttcctgcggaccaaaactcttccgggcctgatgcctacgaagaagtaacagatggagcacagactggagggctaggcttcaacttgcgcatcggaaggcccaaagggccccgggatcctccagcagagtggacacgggtgtaacgagtgctgtgccagttatagcctgccactcggtggtggctggactcctggaaccaccatactgctgtgcagtgtgttatgtatgagtgggacttgtgggcctgattcaaaataaaagtttctcagggcag

SEQ ID NO: 494 - protein, 260 aa, Mus musculus
ILGVGSLLVGDLRAGRSMSRHTDLVRSFLEQLEARDYREGAILAREFSDIKARSVAWKSEGVCSTKAGSRLGNTNKNRYKDVVAYDETRVILSLLQEEGHGDYINANFIRGIDGSQAYIATQGPLPHTLLDFWRLVWEFGVKVILMACQETENGRRKCERYWAREQEPLKAGPFCITLTKETTLNADITLRTLQVTFQKEFRSVHQLQYMSWPDHGVPSSSDHILTMGGKEARCLQGLGPGPLCVHWQCWLRTNRCPVRC

SEQ ID NO: 495 - DNA, 27047 bp, Mus musculus
  misc_feature (1)...(27047): n = A,T,C or G
ggactgcaacccactgaaaccacgaggcagaataaacttctctgaccccaagtattttgtctctgtcaagtattttgggatagcaatgcaaaactcactgttaggcttgttctcttgggaacttccggtgccccacagggactacatcgatcccgtctgagagcagcacccaatgacctcttttgaaaaaagatgtgtttcttttacgtaattggtgtgtatgagttctgagttccggcatgagtttatgtgcaccatgcatatgctgtgcccttggaggccagaggaactggtgtcccctgggactagagttacaggtgtttttaaaccacttcctgtcagtgctaggagactaagctgggtcctcggcaagagaagcacacactcttcactgctgagccacctccccagtccacaagggtttacctcttaaaggctccactgcctcccaacaccacaccagggaccaagaatctttggaggataaaccatatctaaaccatgacaatggctgtttaccaatgcctgtctaggtgaacttgagcaaaacccagggcaaacagccttcacggggtccttcctgggaaacactctgctgcagagaaggacatatccatggaagatgaaatggaggagagaggataagtcagtggaaggaaggatgagggcaaggagaagcacttgcgggccctcctcctgcagtccttggagactctgagcactaggcagtggctgtcttttttaactgaaaaaccaagacatatcttcttaatttttaaattaaaatacatttatttgtttggtgtgtgtgtgtgtgtgtgtgtgtgtgtgttgagacatggtcttactttgtagagcagtctgctctcaaaactcacaacaaccctcctccttcaacatcctgagtgctggggttacaggcatgggttgctatgcgtggtctctcttccaggttcttgcttggtttgttggtttgttctgaaacagggtctcattatgtaaccctggctctcctggaactccctttgtagcccaggctggccttgaactcagagatctgaccgtctgcctctgccaccacatcctaattcattcatgttcttaaagctcagcagagagagagagacagagggacagacagcaggagcctactctccaggggatgttgaaatcctagctctgctctggccattgcagtgtctaaggattcatggctgaggaatgctaatggccaacaagaggcttgacaatgggcaaatgccagcaagtctttttgttcacagagagactgaagcatggaaagttctagaaggctggaactgaaggtggaggtagttgggtacttctgagactgtgtcgctctcattgttacctaaaccaatcgattgctttcaagtcattcatttcatatctgtcctacccctaagctttcaccacctgtcttagttaccgatctagtgctgtgaagagacaccatgagcaaggcaacttagagaataaagcatatagtcgtgggcttgtttacagtgtcagagggtgagcccatgaccatcatggtggggaacatggcagcatgcaggcaggcatggcgctggagcagtagccgagagctcacattatcggtttgtttttctgagatggggtttctatgtatagccttggctgtcctggaactagctctgtattctgtcccccacccctaatgacacacctcctaatccttctcaaaacagttccaccaactagagaccaagcattgcctatggggggagggggcaatcttttttttaaaagattgattgattgaattatttaatatatatgatgagtacactgtcttcagatgcaccagaagagggcatcagattacattgtggatggctgtgagccaccatgtggttgctgggaattgaactcaggacctctggaagagcagtcagtgctcttaaacacggtgccatctctccagccctattggagacaatcttattcgaaccatcaaccgcatgcacagggtggttggagaggaaacccctttccactaggagttggctacaaaaaaaaaaaaaaaaaaaaaaaagactgtcttagtcaaggtttctattcctgcacaaacatcatgaccaagaagcaagttggggtggggaggaaagggtttattcggcttacacttccatactgctgttcatcaccaaggaagtcaggactggaactcaagcaggtcaggaagcaggagctgatgcagagaccatggagggatgttctttactggcttgcttcccctggcttgctcagcctgctctcttatagaacccaagacaacaagcccagagatggtaccacccacaatgggccctccttccttgatcactaattgagaaaaagccttacagctggatctcatggaggcatttcctcaagggaggctcctttctctgtgataactccagcttgtgtccagttgacacacaaaaccagctagtaaaaagaaatactcttttatttgacatatatgaatgttttatttgcatgcatgtctgtgggctatgtgcatgcttagaactcagggagaccagaagagggtgttggatctcctgaaactggacttacagacagcagtgagctgccatagggacctaacctgggtcctctataggtggagtaagtgctctccacaatgcattggtctccagccctgagccagtcagcatgctttggcctccccgacctggcctcactgccagtaacagcaattgacactgcctgaggacttacggtattgacttggaggactcagtggacccccagagttgttagaatgcccatgaacaagcagaattggtgaccgagacctagtacctaggaacctttggggccctgctaacaggatcctttccctcctaggtaccaggcccacagtctatctcctcgccaccagggggcagtgctgaccaagtttttctgaaggctcccctaaactcattctgaagaatttcagactggaagggaagtaagccaacgtaggttcacattacacaccctttgagaatccaagtggtggtgcacacagctacctaacaaccaactcagttcttcaaggtacttctcctgttctacacttctagagagacccagtcctgacttctgcattagaatggtatacctaaactttgtgtgaatagaagtgtgtgtgtgtttagcaatatgcacatggaggcgtgtgtgtgtctgtgtgatgttctgcatcttcagtgacatttacttcatagtcttgaggcaacaaacagtgttttgtataataatacagtggtcccttggtatccatggagactacttctagtacccatatgggtaccaaaactgataatgctcaactatgaccatcacttccagattattttttctttttgaaacaaaatctcgggctggtgagatggttcagtgggtaagagcactgactgctcttctgaaggtcctgagttcaaaacccagaaactacatggtggctcacaaccacccatcatgaaatctgacaccctctactggtgcatccgaagacagctacagtgtacttcgatataataataaataaatcttttttaaaaaaatccttgggctggtgagatggctcagtggttaagagcgccgactgctcttccaaaggtcccgagttcaaatcccagcaaccacatggtgcctcacaaccatctgtaacgaaatctgatgccctcttctggagtgtctgaagacagctacagtgtagttacattaataaataaataaatattttaaaaaatagataaataaatattaaaaatccttgctagccactactgtgcccctggcctcagctgttcctgcagcttgcattctggcactggagaccccctcctccacctccacctcctccatcctttgtgataacctctgggcaggggccaccgcccataggtgagggtatgttagtgtaacatagtagggatcctaggacactgatggttggactgcccaccagtatcccannnnnnnnnnnnnnnnnnnntctcctcgccaccagggggcagtgctgaccaagtttttctgaaggctcccctaaactcattctgaagaatttcagactggaagggaagtaagccaacgtaggttcacattacacaccctttgagaatccaagtggtggtgcacacagctacctaacaaccaactcagttcttcaaggtacttctcctgttctacacttctagagagacccagtcctgacttctgcattagaatggtgtacctaaactttgtgtgaatagaagtgtgtttgtgtgtgtgtgtgtgtgtgtgtgtgtgtttagcaatatgcacatggaggcgtgggtgtgtctgtgtgatgttctgcatcttcagtgacatttacttcatagtcttgaggcaacaagcagtgttttgtataatagtacagtggtcccttgatatccatggagactacttctagtacccatatgggtaccaaaactgatgatgctcaactatgaccatcactttcagattattttttctttttgaaacaaaatctcgggctggtgagatggttcagcgggtgtattagtcagggttctctagagtcacagaacttatggatagtctctagatagtaaaggaatttattgatgacttacagtcggcagcccaattcccaacaattgttcagtcacagttgtgaatggaagtccaaggatctagcagttactcagtctcacgcagcaagcaggcgaaggagcaagagctagactcccttcttccaatgtccttatattgtctccagcaggtgtagcccagattaaaggtgtgttccaccacacccttaatcccagatgaaaaggtgtagcccagattaaaggtgtgttccttaaactccgagatttaatcttctggaatccatcgccactatggctcaagatctccataccaagatccagataaggatctccaagcctccagataagggtcactggtgagccttccaattctggattgtagttcattccaaatatagtcaagttgataaccaggaatagccactagagtgggtaagagcactgactgctcttctgaaggtcctgagttcaaaacccagcaactacatggtggctcacaaccacccatcatgaaatctgacaccctctactggtgcatctgaagacagctacagtgtacttagataaaataataaataaatctttttaaaaaatccttgggctggtgagatggctcagtggttaagagcgccgactgctcttccaaaggtccccagttcaaatcccagcaaccacatggtgcctcacaaccatctgtaacgaaatctgatgccctcttctggagtgtctgaagacagctacagtgtagttacattaataaataaataaatatttaaaaaaatagataaataaatattaaaaatccttgctagccactactgtgcccctggcctcagctgttcctgcagcttgcattctggcactgcagaccccctcctccacctccacctcctccatcctttgtgataacctctgggcaggggccaccgcccataggtgagggtatgttagtgtaacatagtagggatcctaggacactgatggttggactgcccaccagtatcccagtatctcagttcaggcaggactcctgcctgtgctggactacaggctggcctgggtccccaagcagtctcagcttcacagaggagtcacctatgtggtggtccacacaagtgcactatgtaatgatagagactggacatgtggagggatgactgccactgaggggggccccatgaggtgacaagaagactctgaatagggggagacgggaagtttggggataacaggaggaggtgtggaggcctctgaagcttctctggcaattgctgaccccatcctgggcttgcaggctcacagggcctcaattgcatcctgcaatactgactatagacagcagagggcgccccgatcaccgctgcatttccttaggcaggcctattcgaccagtcttacagatcctgtcctgtcttggaaacaggacttccaaggcaccagcttgatgatagcatccaatggacacttagacgacctatcagaggctatttgtaaaactcctactatgtgccagcccagtcagctaaatatctacaaagagccagtgaggcatcaaagcagcaaagccacatggcggagacggcagaagcttttctccttctttctccttctccttctccttctccttctccttctccttctccttctccttctccttctccttctccttctccttctccttctccttctccttctctttttttatgtgtatgggtgtgtgggtcagaggacgacgtctggaatcggttctcacctaccttagtgtgggttccagagatctcactcaggttgccagggtcctgtggcaagcaagcaccttcacccactgagccatcttcctggaacagtttgtgcatcttgtgcctcagtttcctcttttgtgaaatgggagtggttacaaatagactctttctaaggacttgcctcaaggactgttgagttagtatagtactgaacttatagcaacaatgtctaggagaatatcatggctaggacccttggtacacaagacacaaataagacagggggtgcacacatttctgatcactgtacaaagcaatggcttctctatgccatcaacacacacatctgccatgtgctttggtcatgtttaactcacactgccttctgttcccttccctcgaagccccccccttttccaaagacttccttctagctgagcatggtggctcacacctttgaccccagaaatgtggagcctgaggcagggggattgctctgaattccaaaccagcctggaataaagagtgaaatctgtctcaaggcaacgaagcatcacccacaaggagtcccttatattgtctcccttccttcctccatcactaggagggatggaacctagacctggtgcatgctgggtaagctctctatcggtgacacatctcctagcagtacacaccttactttctaaatttgcattctatatatgagagaaaactgatgacgtttgtctttctgagtccggcttgttttgcttaacgcgatgatcgatgatctccagctctgatcgtttccctgagaatggtaactcctttctttatggctgagtgaaactgcatttcccttatctgcctatgtgcaccttggctgattgcacaactcggctggtgtgaagagttcccaggcacctctgttgtaaagtgcattcatttagtatggatgtgaatttaatgatatgtggagccttccagaaataaaaacccagagaggggatgggcagacaaggatctaccccaagtggagaggttcttggtagttaccgtctgctgagggagggggagtcatctttgttcagggtgtaaccactagaaagtcgcctgtgagccattcagtaaccctgcacacatgcacatgtctgcaggcaagtgaaactaaacttagtgggccataaaaaacaaaacaggaatgaaagctggagagagacctgtaaggaagaagaatgagtcgagtccatatggggtaggaggggacaagaggaacagggttgtcatggagatggtttggttgttcagagcactttactgatcctccagaggacccgcgttgtctgggctcacaactgcctgtatgtccagtcccaaggcaatccaaaggttccggcttccaaggactgccacactcaggggcacagagctacagccagacacatacaatatataggattaaaataataagaataaaatttaagattaaaaccctcaccatatatgtgtatgagactgtcaaagaataaaacataaaagtattttcaaagaaggaaaatgccactgggggtgtagctaagttggcagggtgcttgcctagcaggcatgaagcttgtgtgtgtgtgtgtgtgtgtatgatttgtttagtgggtgtggacatacatgtgccacgacatgtgtgaaggtcagagggcagctgtcagtcttctccatataccatgtgggtccctgggtcagacttagcagcaggtcagggccatctcaccagcactgaagggtggaggcagaagttgagcccacgagtgactgtcaattatagtgaaggtactggggcagaggtgagtgtgaagggatggtgatgaacagggcggggcctagcaggaacagtctgatccagttctcccccgccctgatgtccacggtaagcagggcttgaggagcttggggctggcttcatgggagaaaggtggggggccttcctgtttctgcaaccccccaaatgtagggagcctgtttagaacagcacatcctgaatccagtcagtggggtagctaaattcacttggatgtgggtgtctttggccttgcctttgccttgctggctgctggcgcgagcagactacaggtcctatctggggaccataccacctgcctgctggtctgcagctagcccagtcattttctagaaaggctaaaactgcagagcaggcaccctgattgggcaccacacacctctgttaggggggtgtggctagtcaacaaggatctcttggctccagccctgagcaacccagcaagggaggagcatccacaagtgtccagagactggtgtgcctgccaggaggtgccaggagcctgaacctcttagactgagccagccggggcatcgggggaactgcaacctttagaagccacaggactccggcccaggtgactggcactggctctagagcagctacctgtggtcttggcagaagttatacatctagtgcagtgacaaagggcgctcagcaagggtgtggccggaaaaagaaagtccaggggttacagcaatgtctaaggtaaccagggctacactgatatcactcaccttcccctggccacttcttctcacttaggcaccacatgctggctggaaaaggtccccagaccagaacatcagacctcaagaagaggaagggatctgcataaggtaatacagcagacacaacctgggtctccagccttctatttccctcctcagtcgaaccgaccccctccccagtcctgtctagctcactgccatttccaggtgctcctgttcctttcttttttttttttttaagatttatttattatatgtaagtacactgtagctgtcttcagacaccccagaagagggcatcagatttcgttacagatggttgtgagccaccatgtggttgctgggatttgaactcgggaccttcggaagagcagtcggcgctcttaaccactgagccatctcgccagccccctcctgttcctttcttaaaggggccacagaagtcacagaattgtggctttgatctggaatctcaagaaagacctaatctggcggggagggggggtggggtgggggtggggttgtaaagcccccaaaccaaccttgccactgggcggcctcaccttcacaggtcctaggatttagctcaatcagttaaccttcagcagcgctgcgcaccttctctatgtggggttggacaccatgccggctgctaatcaaagttcctgcatgctcttgaaactcccaatgcccagatctcatcccagaccaggaccaccaaagtctttgttggggagagtgggggagggcgtggcggcggcacgggtgtttactaacatgcgattataattcacagacaagggctgcttagaagtcaaacagaaaaccgtctgctgcagccacagttacagcccctgcttcccttcttatctcagaccagcctgctgcagcagcagtccactgtgagccacgagaggtcatggggaaagtcccggatatcgtcatgcgtgacagcatctaattaatcaacaactctgtaacgtgagctccagcctataaaaggggaaccttccggagtcttgtaaccctgaccactggccttcacagacatcttcagacccagggacttgtgccccaggaggagctcaggctgatgggttctctcctcagccctgaggccagtaagtagatttcccgtatgccttgagctggcttctggagtcctgactgcatggagtacaggtgggaggtctggaaaggggagatcagagacttcattggctcctagagtgggtttctccatggtctgggctgcgcgagggcgagagcttcctgccttcccaggaacccagcagaagcggggtgtctggtccaagatggctgcggagatacacacccctccttcccacccactacctgtaagcagtctttatctaggaactggataagggagaatcaaggctggggtggggaaaaggggagagcttaggaggccggtggaaaaacgagggatttcagccttgccaaattgtcggtggcaatgtggacaagtcatttttgtccctggactcttggtttttttctcgtctgaaggttgggactatgccaccaccctgctgtcctttaggactccaaatgtagatatctaaatagtaatgagataagaagtttctctgagacaccagtacctgtggtcacgtgtccccttagcagaggggcctggtgagtgagcaggaaatagcatgccaccccttagaacagagacggggaccaggcaccctagacctgcccccccaagccaatcagtgcccctgtgtagggcccttggcaagcacccaaggcttgctcacagtgggcggccacgcccagagccacctctgctgtggcagctgtgtttggattcaaggcagggcagtaacaatgccaaaagggatggggtataacaggtacagatgtgggggggggggagtgggagagggagaggagggaggagggagtgggagagggagagggactgaaactgtgtagctgagcccacagtctccttggggctgggaggacaggaagggacctttcttgagcttccccaagctctgcatgctggggtgcagaggggagaacaggattctgcaaagggctgactgggtgcctggcatcccaaagaccttgatgctgaaggtgctggcagttaggaggccatcacggagcaggtggctgagcatccatcactaaaatccccagagccttgcagcagagactataatttgtcttcatctgcccaggcctggagatgaccctacagacatggctggcctgtcccaacttcctagcagtctagatccaggccagcctccgtcagtgcacaaaggtgggggtcactggagaaggactacctctctattgtatggaacctcaggacctggcttaaaaatggggtctagaacaggaattctctagttcttgatagacagtactctgaaccctgtgccaaccctgccaaccaggacacacccaattagagagccacgtttagcttgtgcccacctctgccatagcccagcccagcagtggggtctgtcaggttgctcagtcaaagggccaagatgcctgccagtctctgcaggaggaggaaggcagaagaaaagtgtccacccctttcgtgccactgtgacccagctctaaagccaggaagccgtgctcagtgtaaagggaaggtgcggcttctgtgggggacaaagtcctgcaggcctttgagagactggcagggtaagggtggccttcagctctactccatctgggtcgtgtgctcagtgaataaccaaacaagccatatgagagagtgcgtgtagcaagtccaggccttaagaggccccttgtggcttgccagtggtggtacctcctgggagccacacccagagagggacacaaggcctgagcatgcagaagagagaaggtggtttaactgctcacctagggacccacgggggcagcagcatgtccccttcagcttcttccctgtgacacaggacatggttcccaaagatccctgggaaggctcctaagtggggatggagctttgcccatgcaagctgccaaccaggccaaggctttcttttcctgggactcttgtgccctcagaggccattcctggggcagtcccccttcttctgaactgatatccatcagccatcctcctgcctctcttctgggaagtagatgggggcagtgaactgaaggtctccctctcccagagcaattcttccagtcctctgtcctcctggagatggaacgcacccaggtgaacaccctgcctgcagccagggaggactggccaccattttaagatgagcagtccaaagcctccagaccggaaggggatttgaaccctttccgtggaggctgtagtggctgaggcccggggctcctgcttgctccatttctacttttgtggtggaccagcagggttgcggagggactgtttccagcatctgctcttgtccaggattattactcaagcccctagcccacagcctcacttgagaccttcacatcagtggtggctatgacccagctgagggatggggagggctctggccagtagcaccaggacctcacagtcttatgtttggctctgtaggcaggcctgtgatcaggggtcagccagcgggtgggggtggggttcctctggagtctggctcaagttcagcttgagttcatcttcctttttcagccagcttcctcttctaaccctcctccccacccccttcttaaagaggaaaggcaggcaggtctctgggatctgatcaacccagcctggaaactccagctttctcccagccctgcgatgaagggctgcccagcagggaactttccctcctggctgccaggtgcctttcagaagtcccttggttccaaagctcacttgggtccttgggggaacataggcatctcctgttctcagcttgcactcctgtcctgtgggaaactgctgtgtccccctctcttccaggatcagcgggagagggctgatatagctcacctatgggagaaggaggtcagaggagccgagaggaaagcagagctattgtgggccacctgcgaggcatgcacagtcagtaaaggcctggctcctccaggctaagcactacatctaggggctggcgaaaaggcttcgtgagtgaaggtgcttgcggacaagctggaggaatagatagctcagacccccaaaccagaaggtagaaggagagaaatgacttctgtaagttgtcctctgacttccacccatgcatcccaatacttgtgcactcagtaaagaagtgttaaaaaaaaattcattggagttcacatgtctaagtctttgacttcattttgtttaacaaggttcactgtctatgtagcccaggcaggcttagcctggaaccccttctgtagcccaggcaggccttcacagttctaggactacagcaccaccacacaagcaagctgctttttctattcggtcccagtaataactatggcttgggtggatttagacagggctggtacacatgtaggttcttaaatttttcatgctaggcatcccagggaactgtggtcaggggaggttaatagacacagacaggtagagtgtgctgcccaacggggctttaagcagatccctggggcttgtgagatgaggtctggtttggtttgggaactgggggtgatggaaatggcggtggaggagaccagggcatgctggacgtttcctggaaagccggtgggttagaatggaccctcactgactgctcacctccccgctctgctccacagatgccgaggtgccccgcgaggcccttagtttccacgggaacgccacgggcgcacaggtgcatctggacgatcagcggagcacagcgcgcaggcgctcgacgttccacgatggtatcgtgttcagccagaggccggtctggccgggtgagcgtgttgctctgcgcgtcctgcgacatgaagaaggctggtgcggtggcctccgcgtgggcttcacgcgcctggaccctgcgcaagtggccgcgtcctgcctgccacccttcgtgtgcccggacctggaggagcagagtcccacgtgggcagcgttgcttccagagggcttcgttcgtgcggggaatgtggtctgcttctgggtgaaccgtagagggtggctcttcgccaaggtcaacgctggccgccccctcttgctgcgcaaagacgtgctggtccagggcgccccgctctgggcggtgatggatgtgtacgggaccacgaaagccattgagcttctgggtgagactccttggggtcccgatactgagtgtggcatggagacaaaggtccaaatgacttcatgcgcctgactagagaccgtaatagaactgttcatttctttattctcagtatgccatcagcccctgaccagtcctctctctaaacgctgttagaaggctggccacggttcacaaaggaggaagcatttggatagacccttgcaccttaagtagttcatccatactaaggtgaagcgaaaaaaatcaacaaaagcaaaaacaaacaaaacaaacaaaaacctacaaagacgtgaaagcgcagaaaggttcttaacacaaccaggagaccagccttgaagaagggagcgtgatgccttggggtagcaagtgtgcatgcgtgtgtgtgtgtgtgtgtgtgtgtgtgtgtgtgtgtgcgcgcgcgcgcgcgcgcgtgcatgtgtgtacctgcatgtacatgcacgtgtgtggattcctggccctgaacttccctttctgccttagatcccaaagccaacgcctggattcgtagtggtgagcctgtgccagagtctgaaggtgagtgcacaccccgggaaccccatcactcagtggctgggaagtctggctgttcaaagtcatctttctaggtcccacagacaagtctcccacagtttactgaccaccagagatccagaaacaatgtaatgtttcctgccttctagaacattgaccattttccaaattaggagagtatattcatgaaccacgcccctctctcacaagtctcatatagcctaatctaccctcaaacttattctaaacactctcccaaatgctgggattacagcctagtttaagctttttttctttaaaaaaaaaaatcatctatgtgcctggaggctctaagaaggagttaagctgccacatggttgctgggaatcaaacttggttcctccaccaagagtaagtacctgaaaccgcagaaccgactctttctggtccctcttttgtttttctttttaaagcatactgatagagtgccggttccattggggatgcgcctgcttggtctgaactgagtcctcagaacccgtgtggacagacaggcgcatgctgggaacatggaaataaagaatccctgagactcgctgtccagccaggcgagccaatcaatgagctcctggttcagtgagagaacctgtatcaaacccaaggtggagcatgatggagggaagcccctgacatctattagacagacatgaacacacacacacacagacaagtgtgtatatacacactcgcacacaaacatgtacacatacaaaacacacatgcacatacagacaaatgtgtacatatacagacacatgtacacacacatacacacacactcacacatgcacaatacatacacacatactgcatggacacacatgcacacatgtgcactcacacacatgcatactcacgtacaagcaacacacgcatgcatgcacatgcacaaacatgaacatacacacacatgcacacatgcacacatgcacacacacatgcatggatacatacacatgcacacacaaggcatgcacacacaggcttgcatgcacacatacacatgcacactaggctgatgatacagttcagctggtagagtgtttgcttagcgtgcacaaagctcttggtttgactcacagcactgaataaaatcttagtgataagagtgggtgtgaggggatcagaatttcaaggttatcttcagttacatatagtgggtttggggtcagcctaggctaaatgagttctttgtttcaaaaaagaaacaaacaaacaaacaaaaaagtcaagtgggtatactgcttaggtgtagaggcttgccttgtgtatgccaaggcctggctctggattcagttcccagtatgagaaaaataaataaataaaaggcaaaaccaaaccaaaccaaaatccacccctaatccaaagcttcataggcagtggccacacctttatcacagtgtctgggaggcagaggcgggcacatctgtatgaatctgagttggtcagccagttccaggccagctagagctacacaaagaaagcaaaagaagataaaaaattaaataaaataaagcttcaccagctaagcagactataagcatataaaaaacatgctagactcacttgttatttatgagtgtgtatgagcttgtgtagaggaaatgtgtgggctttgtttttcttgtatacaagctagagctttgctggatccctggaccttctgaggatgtgttccgagaggctaacaatgcccagatctcagtctcccatgagctgttgtttaggctgaacttggatttataaattcatcataggaatagatcagcaataataacttatcacaaaatagaaccataacaacatacagtaaagcaattacttagtactctcgattttatttttctagatctttccatgtgatagtttcagaaaacagatgggaaaccgggaagcaaaagcctagattcagggctgtgggtatattgctggttttcctgcagttgcattgagtgtcttgtcacagggtatcctgtccctcgggacactgggctttcccaccctgtggtaagagacgagacacaccctccatgtgtacccctgacctatgctttcttgttttccagtcatatcaggagaggagtgtgtcatctgcttccacaacactgccaacacccgcctcatgccctgtggccactcacacttctgtggctcctgtgcctggcacatcttcaaagacacggccaggtgccccatatgtcgctggcagatcgaggaggtggctgtagtgtcttcactgaaggctgaggaaggctcctgagaagatgacttcttgggcagatgggacctggctctgaccacactggccttacattaaggactggatggggctctggcaggtccctggactctagttactgaacatggcaggattcagtcaacattcccagctctgagtctgaagactttgcccttccagttgaattctggggacttcaggaggttctgacatgggtggaaggcaggtattaatattagttaaggaagccccaacttggggcttttctatgtaggaacccctatgcccaacatatttgtcaaatttaatcagtttatagtgtttaaactgagactggggaaccaaaaacctttatccttgatgtaggtgatggctatgttccattctatttgtgggagctcaatctcacagtccaacaagattggttcattggtgtgaaggggaaggtcgggggctgagttcttgccaggcaaagtggtagaaaaaatggccttgtgacagagcactgaccccacctacgtctactggcagacgctgagagtttgctgactatggttgaggggttcctggccatggcaagccacttgaagacctctttacacccagttttataaacctgtggccagaggaggtcagagaacctccaaccagtgagtcctggaagggtctgcctgggggtggggagcagggagcttggcccagagaagcaaggcaaagctcccagcctgatggaggttcagagcaggaagcctctgtatccagaagctgtgtgtggccgccttcacccagcaaccactgtggtgattggtgattggctgcaatcatcagcttgcagaatcttggatcacctggaaacggatactcagtaagggagtgtctcctggcggttggcctttggggatgcctatgaggaatttcctgattgggttaattgagttgtaaacccaccttgaatgtggctggcaccatttcatgagctgggcctctagagcaatggttctcagccttcctaatgctgtgaccctttcatacagttccttatgttgcggtgacccccaactataaaattattttgttccctacttcataactgtaattttgctactgttatgaatcataatgtaaatatctgatactcaggacagctggtatgtggcccctgttgagaaacactgctctagactgagagggacagagagcccagggcacaggcattcagtggtctgcttctagacaatgggcacactttgaccagttgtctcaagctctgacttcctggaaatgatggactgggactcggaattgtggggtaaaataagctcttgcttccttaagttgatttggttgagatattttgtcacaggttaggaatagttctgagatcacaaaaaagagaccgccattataattgtgagggtttgtatatgctcagcccagggagtggcactattagaaggtttggcctccttggagtaggtgtggccttgttggagtaggtgtgaccttgttggagtaggtgtatcactgttggtgtgggctataagaccctcatcctaactgcctggaagtcagtcttccactagccgacttcagatgaagatgtagaactctcagctccccctgcaccacgcctgcctggatgctgtcgttttcctgctttgatgataatggactgaacctctcaccctgtaagccatccccaattaaatgttgtccttataagagttgccttggtcatggtgtctcttcacagcagtaaaatcctaactaaggcaataagtaaagtgtcttatctgtgtccttacttttgcacgagttgttacccacctgcaaaagaggtggcctaagctcggggaccgggacgtccttctggtttttatccctgatgcaaaagggaagctgaactgtacctcactgatggaggtccaaccacaagatccagtctttaacgtaaggtgggaaaaaaaaaattaaagcacagtgggtttgttttttttttcttctgtgtgactaaggaggaagtagggtcaggaaacggtggcttagagccagacagaagctgaaaaacagcttgcggtttagcaaggaggaagtggggcgtactgtgaaagaaaagataattgtttgttgcatctgaaagggcaactggaaaagaaaatgagctgaacactgcaccggagtgtagctacaagtttccctttcccatcttgcgaggagtccccagactaacaaagaatctatctcagatgcaagcataagctcacaaacaggagaagcccagagtctgggaaacacgatgtcatgggggggaaaaggcactcagttacacagaagccatgactatctgaagaaacagatagcagagcagacagacctgagtgctcccgcagctatgatcgcatacagagagcgctctgaaaaatctcgacgtcgtgggaattaaagacatgattactgaaaatagtgtaaatatctgatacacacacacacatatgtgtgtgtgtgtgtgtgtgtgtatatatatatatatatgtatatatgtatatgtatatatatatccccatacacacacacatatatatgtatatatataatccacacacacatatatatatacatatatatatatcatatatatatatatatatatatacatacatacatacatacatacacacacacacgtatatatatctgatcagttgatgtgaggaaccgagggtcacagctggaatcacctagattgtcctgtggagttactaggagataaaaaaatagatcgagggctgatgagatggctcaatgggtaagagcactgactgctcttccaaaggtcccgagttcaagtcccagcaaccacatggtggttcacaaccacccataatgagatctgatgccctcctctggtgtgtctgaagtcaactacaatataataatattatacattatattaataatatacaataataaaaataaatcttaaaagaaatagatcgaatgggagagtaatgcagaagttcaaaagcctgtccaccaggaaccacagaaggtaaaaagaaagaaagaaagaaagaaagaaagaaagaaagaaagaaagaaagaaaagaagaaagaaagaaagaaaagaagaaagaaagaaagaaagaaatggggagggctgctccgtggaagactggagcagcatggctcatctgagaggctaaaacagaaggttgttggtttggaaggttctagttggacacagaacatgcgtataagtcagggtttatgcctataatcttaggatttgagaagctgaggcaggaggattgctataagttcaaagagagtctggggtacataatgggtaccaggtcagtcagggatacttaacaagatcttgtctcaaaagtgcccaactctttacttgactctaatacgtgaatgaataaatgaaggaataaaggaggaagaggagggacggaacctatataaagttgtcaaattggtgaacttatatattgattgctggggctcagtcatttttcttccaccttcttcaggctgagatgtccagtctaagggctgaagagatggatcagcagttaagagcatttgctgctcttgcagagggcctgtgcttgatacctatcaccctcatggtgacacaactgtcacttattgtcatttgcaactacacacacctacacacacacacagtacatccatgtaatcaaaacactaatatagataaaataaaataaacctttataaaaagacttggatgtctggctgtaattataaccccgagtagaagactgaaagagtattttctagaacccaagcagtccaaaagagaagatctaaagatgctgacatctagtcagcattcccagagactgcctagccggctctcctgaagtcctcagccttgcttcacggggcttagtgctgaggtggcttatgtatgctttagtcttacatctgaacacatgtcggagacttcccagacatctcaggaaacctctgaaagagaagtaaaaaagtctcagttgaagccagtcgttgtcgtcatggtgactcataccagggacaccaacaaggctacagtgggagggttgtgagcttgaggcaagcctaggccgtgcagtgagcgcttgtctcaaaaacagaagtaaaacgaagcaggttacagtagaaggaagagggagagaacagacagaggaccgggccacccaagccagagctgatgtgttcccctcgagacgctccttcactgggatgaggctttcacccagtaacccagactgggttaaaaacactgtaagtcaaaaatgcactgagtctagctggcctactaaacgccctagcttgctacacagtctacaagtggggacagactcttatgagaaccaatctacctcccaagggaggcattaattcattcctaacccccatggcctagcatctcccacaaggcccccacctccagatgccaatctatttcttatgagtgttggaaggacaaaccacattcaccccacagcaacctacaaatggcccacagggatttgaagaaaagtttaaacttcactaatgacaggaagatgcaaaccgaaaccacgaaaccaattaaagatggccattatcaaagacatcgagggaggggagtttatgagggcgtaaagaaatgagaatcttagtcattgtcactggggtgtaaatagtgtgggggtcctcaaagggtggacagtaaagccgccacgtggtctagcagttctgtggggcttgcgtgcatttcccccatcctcctcatttacttcgagcatctagtaagcccaagccccaccccccacccccattgccatgcttaccacagcaccattcatagtagccaaagtccagggacaacttcaatgcccaggtaacaggtgagtggatgaactaaatgtgaaggggatggaatgttattcagccttgggaaaggaggaatccattcacatgctaagtgaaataagctaggctgagcagagtaactcccaagcaagaagtctctggaaggctgatgcccagcaggagactacagtcagtaatgggggactgtgtgattggggctttccaagatcctccatcttcccatcccaaccacaaactggcaactgtgagaaacaagagagatgctaattggcttgatatatccacattccaaaacatcacattgtgtaacataaactttttgcctgtcaatcatagttcagtaagcttgaaacaaaataaagatacatagtttcagtggccgagtgaggggtctggcctgagacccaagatactgtagcctgctggtcctggggagaggggtcaacatctcagggccttggttagtcagtgtggaggtggggtagaggtggttaattccagccactccgtttctttcagacagaaaccctgccatcgaaacactggcttttctttctgaggcttctcaactgtgaaacaaaggctcaagtttggttcagtgggaatgtgagactgaatgaagctttagctgcctggaaaagggggaatggaaatgagcttatagcttgtttggtttcaggctgcctttttaattgatagtttacaggaagaaaaatgatctgtcttgcttggctacagcagagacctggtacctctaatgatgtcatcactggagagcagatctgaagatgatataatgttctttgttgttttgtggttcttcaagacaggttttctctgtgtagccctgattgttctggaacttgctctgtagaccaggctggtcttgaactcacagagagctacctgtctctgcctcccaagtgctggtgttaaaggcatgtaccaccactgcccagctgttaggttttgttgctgttggttttgtttgtttggttttaatgttaacagtttaaaccagaaggtgatgtaatgacttaaaatggcttcaagcctcagctttcgtaagtgctggcattaccggatacactaccacattcagggctgcttgtgagtattttcttctggatttctatgtttcctttcgagttctttttttctcctgttgttgttgttgttgttctccccctcccccatccacctcctcctcctccnnnnnnnnnnnnnnnnnnnnnnnnnnnnnnnnnnnnnnnnnnnnnnnnnnnnnnntcttcctcttcctccttcacagtaaagtatttcttaagtaaaatggaagccgggctggtgagatggctcagtgggtaagagcacccgactgctcttccgaaggtctggagttcaaatcccagcaaccacatggtggctcacaaccatctgtaacaagatctgacaccctcttctggagtgtctgaagtcagctacagtgtacttacatataataaataaataaataaataaatctttaaaaaaaaagaaaagaaaaagaaaatggaagccgagccagtaaggtggagtgggtaagagcccttgccttgaagcctgatgacctgagattgatccccaattccatggtggaaggaaagaactgactcatgaaagttgtcctcagactttcaaatgtctaccatggcacatgaccccccccccacacacacacactctgataataaataaaagttagaaaggacattaatggaacaaagaaaaacttgtgaaccttacccaatgcaacacaaatttagcacgcactgtggcctagcagatctggagagttgctatggtgaggaggttatgagggtaaagcaaatgagagcatgcgtaagaatatctgccagaatgttccagaagaggctcttgtgacaggaatgcacttgggaacaaactggttatgctcaccagaaggcaaatgctgttgatataactgcagtttcctacagtgtttgtagtgagaattttggtttctctaaagacccagttatgttatgagaatgtgcttttgctttaactccaggtgtgagatgagaggctgctcacagcaggtgattgtgatttgcctatagctctagcaggggcctgtttttgccagctgcaaaaaaattaattctggggactctggagggggtgtaaatgggagcaccctgagagggcctgaggaggctgctgttcccccttctgcttcccctgctcctcttccctcggctcctccccctgctgcttcccctgctcctcttccctcggctcctccccctgctgcttcctctgctcctcttccctctgctcctccccctgctgcttcccctgctcctcttccctcggctcctccccctgctgcttcctctgctcctcttccctctgctcctccctctgctcctccccctgctgcttcccctgctcctcttccctctgctcctccccctgctgctccccctgctcctcttccctcggctcctccccctgctgcttcctctgcttctcttccctctagctcctccccctgctcctccccctgnnnnnnnnnnnnnnnnnnnnnnnnnnnnnnnnnnnnnnnnnnnnnnnnnnnnnnnnnnnnnnnnnnnnnnnnnnnnnnnnnnnnnnnnnnnnnnnnnnnnnnnnnnnnnnnnnnnnnnnnnnnnnnnnnnnnnnnnnnnnnnnnnnnnnnnnnnnnnnnnnnnnnnnnnnnnnnnnnnnnnnnnnnnnnnnnnnnnnnnnnnnnnnnnnnnnnnnnnnnnnnnnnnnnnnnnnnnnnnnnnnnnnnnnnnnnnnnnnnnnnnnnnnnnnnnnnnnnnnnnnnnnnnnnnnnnnnnnnnnnnnnnnnnnnnnnnnnnnnnnnnnnnnnnnnnnnnnnnnnnnnnnnnnnnnnnnnnnnnnnnnnnnnnnnnnnnnnnnnnnnnnnnnnnnnnnnnnnnnnttggaggaatcctgatgcagattagacttgcccccaagaaaccccaatacccttagtcagcaggaagtagtctaaagaggtttctgcctctttcccccctctagccttctttctctcctacttagtttcggcaggttggaagggatcagggtggaataaggtttggtagggagatagaagtataagaacctaataaaacagctaagcagatgttccaaaagtgtgcacggtgcttacaaggactaacatatctctccccttcacctcttcctttctctgtttttgcttccttcctttctactgttttttcccccctctggcattgatgataaagtcttcatgtgcaaagtcctctactactgagcaaacccctgctttgattgttataagacagggtcttattatgtagcccaggatggccttgaactttaaatccttttgtcttagactcccaactagggccgtgagatctggcttccctgtttctggcatcctgaatgtggtatatagtcaatgtcatgtagattaagatgcatagagtaatgcatgcaggtacacttgcaggtacgtgttaatgtgtaacaaagtgaaaggtgccactgggaaaagagaggagagtggctgaatggtcatgtgcattttactgcaatgccatttttcttatgatgagaatgcattcatattttgtttaagaaataaggttattcgctctggaagacactctgctgattcctcaaaaagtgtagttagcatatacgccagccattctgctaatcgttctgaaaccacatacccacgcagagcagagttcagagaagaaccatcccttcacggtatcccagagatggaaacacccaaatgtgaaccagccgataaagagacggtggagcaatgccggaaccacagcagtggggtattgcttggccaacacaactgtgggaacaactgactcgtgctctgaggatgagccctgggcacacactgagagaaggaagtctgtcaccaagggccacatgggggctggagagatgcagctgcagtttaaagcacactcagttctcagcacctatgtcaagtggctcataaccggtttacctttagctctaggggactgacagctccctctagcacccacatatgtgtcacacataagcaacaacaacaacaaaaataaatgaggctggagagatggctccaaaggttgagaacgtttgctcttgcagaaagctccacatttgattggcagaattgacatggtggttcacatccatctgtaactccagatatagaagataactgacatctttgacctccttgagcaccaggcaggcaggcaggcaggcaggcaggcacgcacgcacgcacgcacgcacgcacgcacgcacacacacacacacacacacacacacacatggtacacatacatgcagcaaaacacacacataaatcttaaaatatagaaataaaaaacaaagggtcaggagttccatgaatccatgcacataaatatctataataggaagcacagacacagaaactagtggtggccagggctgggtttgagggaaacatgggcaataaaaactaaacagcattcattacagcgattgcctagcagacatgaggctctggggccagtcctcagcgctacagaatcctggcgtggtgctgcactcctgcaaacccagcaaggaaggtggagacagggggacgagaagttcaaagtcacgaagtaagttggagatccacatgggttagagaccttgtctcaaaagaacaaaaccaagggttcaggtctcacaatgagacaaggaacagtggctgttcaaatttaatggcactgaagccactaaatttaattgttactttaaaattttgtttctgtggtccggagggatggctccgaagttaaaaacactggatgtacttacagaggttctgagttcagttcccagcaaccatgtggtggctcacaaccatctgtagtgtaatctggtgccctcttctggccacaagcatacattcaggcagaacactgtatataaataaataaatctttaaaatgtttttgttgttgtttttgttgttgttgtttgaggcagggtcttactgtgtatcctaggctggcctcaaacttatggctatccccttgccttagcctccaagtgctgggat

SEQ ID NO: 496 - DNA, 757 bp, Mus musculus
acatcttcagacccagggacttgtgccccaggaggagctcaggctgatgggttctctcctcagccctgaggccaatgccgaggtgccccgcgaggcccttagtttccacgggaacgccacgggcgcacaggtgcatctggacgatcagcggagcacagcgcgcaggcgctcgacgttccacgatggtatcgtgttcagccagaggccggtctggccgggtgagcgtgttgctctgcgcgtcctgcgacatgaagaaggctggtgcggtggcctccgcgtgggcttcacgcgcctggaccctgcgcaagtggccgcgtcctgcctgccacccttcgtgtgcccggacctggaggagcagagtcccacgtgggcagcgttgcttccagagggcttcgttcgtgcggggaatgtggtctgcttctgggtgaaccgtagagggtggctcttcgccaaggtcaacgctggccgccccctcttgctgcgcaaagacgtgctggtccagggcgccccgctctgggcggtgatggatgtgtacgggaccacgaaagccattgagcttctggtcatatcaggagaggagtgtgtcatctgcttccacaacactgccaacacccgcctcatgccctgtggccactcacacttctgtggctcctgtgcctggcacatcttcaaagacacggccaggtgccccatatgtcgctggcagatcgaggaggtggctgtagtgtcttcactgaaggctgaggaaggctcctga

SEQ ID NO: 497 - protein, 249 aa, Mus musculus
HLQTQGLVPQEELRLMGSLLSPEANAEVPREALSFHGNATGAQVHLDDQRSTARRRSTFHDGIVFSQRPVWPGERVRVLRHEEGWCGGLRVGFTRLDPAQVAASCLPPFVCPDLEEQSPTWAALLPEGFVRAGNVVCFWVNRRGWLFAKVNAGRPLLLRKDVLVQGAPLWAVMDVYGTTKAIELLVISGEECVICFHNTANTRLMPCGHSHFCGSCAWHIFKDTARCPICRWQIEEVAVVSSLKAEEGS

SEQ ID NO: 498 - DNA, 30466 bp, Homo sapiens
gggaggctgaggcagaagaatcgcttgaacctgggaggtggaggtttcagtgaactgagattgtgccattgcactccagcctgggcaacaagagcgaaacaccatctcaaaaaaaaaaaaaaaaagtcgagccatccttgctgtatctgtttgagttcctaacccacaaaacctgtgagcataataaaatggctgttcttttacttcactaaatttggggtggcttgttatacccccaaaaaataactgggacacttcgattgcatatatttcctgtgggttccatttccatcttaccaatatatatcctacagttcctatagtaattatttcagtgaggatcttgagtgataaaacttgtttttgtctgcaaatatcttttcccccttactcttaaataataattttcatgggtctggaacttgaagttcatggttgtcttccctcagcacattgaatatatttatgtttattgtttttggcagatattattaagaaaatttgtctccaatctaattattgatccttttaaattaagctgtattttctccctagttgcttttaagatctacctttggtgttctgcaatgtctatttgtatatttatttttatcatgctcagtaatcaatgggcctcttcaatctgaagatttatggctatttcttgttctagaaaaacttcatgcattatttgtttgaatgtggcaaatattatcactttctgattcattttgactttttcttctggaactcctattagtggtatattggactttctcgttttattatccatgtcttttagcttttctttcaaatattctctttgccagagttctggtgaatttctgcagatctgccttccagtacacctattctcaattcaactgtgtctaatctgctggcttgccagtatattgtgtttacaaattcaataaccatattcttttgtctctgtggttcttttccaaatctgttgttttacacagtatcctgttctttatcatttttattccttcctttgtatttttaatcattttaatatgctaattttatatctcttttggcttgtcctattatttcaggttcttagaggtaatgattttctttttccttttttttttttttgagatggagtctcactctgtagtccaggctggagtgcagtggtgcaatctcggctcactgtaagctccgcctcccgggatcacgccattctcctgcctcagactcccgtagctgggactacaggtgcccgccaccacgcctggctaatttttttgtatttttagtagagacagggtttcaccgtgttagccaggatggtctcgatctcctgacctcgtgatccatctgcctcagcctcccaaagtgctgggattacaggcgtgagccaccacgcccagctggagttaatgattttcttgtgtgttgtgcctgctggctctccttcatggcagatggtttcttcatgtgatttgtagctgttgtttgtgaactcatctgcagtggagttgttttgttccatgggagtcctatatattctggattgtgaaaatggcctcagagatgttttgtatttgtttctgacaactgctcccaagggctcatgggggagcatttttgtgtaatttttcatcttgggaattctttgccatatggatatcataaatttggctgccaccttcatgaatagttttggttttcagttttgatttttcccaggaaacttttcttccacccagaggcctgggcaaagacaaaattcatgtgtcacctcctagttttgtgggtaattcttttctgaggggccatccttccagggttcttgctttatacagaggtctcagttccagttctccacaaggccacacctctggatcctagtgggtgttgaaccctcagctcccgttggtggggcccccgtccatgtccagtttctcactgggccccctgggttaaagcccaaatctggctctaagttctctctgtacactcgacacctcaatgcttctccactcctttttcaagttccactgttgttctaacatctttcacttatatttggtactgagtttctcagtgttggcaggggaggtggcatcagcattagctgagtccatggtgttgccagaatctgaagtcagtggtcttgatgtttagcagagcacctcagggagatttgggggcacgcaaagttaggcctggggataatattagttcagagggggagctgtactgctctgcatgagaaatagatttgggggtgaggagatttgaattggctccaagagagggagaatgagggggctgggggtggaggaaggctctggcttatgaagaatgaacagtgtgatgtcatgttgacacaaatattgcagggcccttgaaaataggggttgggggtgcatggtggctcacagctggaatcccaggactttgggaggctgaggcaggaggattgcttgagcccagaagttcaagaccagcttgggcaatatggtgagaccccatctccacaaaagttttttaaaaaacttatcaggcatggtggcaggtgtctgtagccccagctactcagaaggctgaggcaggaggatcacttgagcccaggagttcgaggctgcagtgagctatgattgcaccactgctctccagcctgggtgatagagaaagaccgggtctctaaaagaaagaaagagagagagaaaataaataatggttgcctgagattcagtttaacttggttctctgtgctgtgagctgcactgtaagccttgcctccctgctcacactttgtgtgaccctaaaccttcagtaaaagttgttgctcacaaatgtctgtgtcagtgctacctgagtaaaatcaaggggaaagaggctacctgggtgcactgggctgcagggaagaaaacatccgcaggaaaggagacaaggagaaggagggacctagtgggagatgattgaatcatggcgtgggggatctttcccgtgctgttcttgtgatagtgaatgggtctcacaagatgtaatggtttttaaaacgggagtgtctctgcacaagctttctcctttgcctggtgccatccatgcaagatgtgacttgctcctccttgccttccaccatgattgtgaggcctccccagccatgtggaaccgtaagtccaataaacctctttcttttggaaattgtccagtctcgggtatgtctttatcggcagcatgaaaatggagccttgcttaccccatccaccctggagtccctggagcccttgagcaggaggcagtgggcttctctctgaatggagaaagaggatccagaggatccaggcagtctccttacttcggctcaaataaatagcacactaccctcagctaatgcactcacctgcagcctccacgcggagtgactcatgcaaacatgcatgctatgtctgcagttccatccaaagcctgcagccccacacccacccagtagcctctgacttagccacctggatgatccagaacaaacctgagaacaaagaagtgtggcttaaaaatgatacatgtcgcccagtacatgtactgtacttttgcacattttcaaaggacatgtgagatttcactcaggaccctgatctttattttatttttatttttatttttatttttattttttttgagatggagtctctgtcacccaggctggagtgcagtggcctgatcttggctcactgcaacttctgcctcccaggtttcaagtgattctcctgctcagcctcctgagtagctgggattacaggtgtgcaccatcaagccaggctaatttttatgtttttagtagagatgggtttttgccatgttggccagtctggtctcaaactcccgacctcaggtgatccgcctgcctcagcctcccaaagtgctgggattgcaggcctgagccactgtgcctggccttattttttattttatttttgaaatggagtcttgctctgtcacccaagctggagtgcagccgcatgaacttggctccctgtagcctctgcctcctgggttctagcgattctcgtgtctcagcctcccgagtagctggcgttacaggcgtgtgccaccatcacacccagctaatctttgtatttttttgtagagacagggttttgccctgttgtccaggctggtctcaaattcctggcctcaagcaatccacccacctggcgcctcccaaagtgctgggattacaggcatgagccactatgctcggcctcatctttgttttagaattaacaaaacggtggagaactttggggtcagtcctggtttgacctatacgagtcactcagtctttctgagccccagtccccatctgtaatacaccccagtcccacagccagtgggtggtagagtccccactctgtgctgctgactgtgctaggctatttcatggcacttgcaaaggctcagcacatcatgggcccccagtgtgtgctgactgtatggctgaaaggattgatgagacactaaagtcccccatgaaggcacaaaccagaaggtaagtactcgtccagtcacaatgaaaggaatgaaagcataaggacggtgtgcatgcacgtgtggcgccggggacccatgctccaggttagctactggaagacacagagcctaacccaagccaagacaactcagatacactgacaggatttgaggaccctgtctttcttccctccaccgaatatcttcacacacaaggaggagcagagagaggcagcagcagcccagtcagggcagaggtagtgcttcgcttcagagggaagggttgactcttagcttgcttctcaaagctcaagtcgggggctgggcatggtggctcacgcctgtaatatcagcactttgggaggccaaggcaggcagataacctgaggtcaggagttcgagaccagcctggccaacgtggtgaaaccccatctctactaaaattgcaaaaattagcctggcatggcggcatgcccctgtaatcccagctactcgggaggctgaggtgggaggattgcttgaacccgggaggcagaggctgcagtgagccgagatcgtgccactgtactccaccctcttgacagagctagacctcgtcaaaaaaaaaaaaaaaaaaaaaaagctcaagttgggagaggagaggctccttaagacagaatgggctggagtccactccactctggcagggaacatttggccctagctctgccagggtggagggggtgtcaggagacctagggaatggtcaatccctgcctgtggaggatggactgtgcccaaggcctgggcagtagagacaatgacaatggctgcaatgagctttgacaatgggcaaaaactcagaggagtggaaggaagatattttcttcctctctgcgctattttggctttggtgagggaccagaaggaactccagggatctggaaaaattctactggagaagttggtgatttgtccttctggccagtagaggtggttctcagctacaacagctcccctgcccacccacccacagtgcccccacagctgagttcctgcgggctgggtgccaggcgatgtgcatgcagcacatgtgagtcccaggggcatggggtctcccagcgctcagagcctcccaccaccctgcacccagggtgccatgccctctctctttccctgcaccctatggctgctgttttccctcaatatccattctctccttctctattgtaatattggaacactccaatttctgtctagctgggcacatgattgcccagaatgaagcctacacttcccagttccttgcagctggatgtggccacacaactaagctttggtcaatgggattcaagctgaagtttgggccatgtgtgctctttctggctgtgccctttaaggaaaggggcatgccatggcctactctggccccttttccctgctggcaggaggcataacacttctcttgacccacctgtctggggctgcagatgcccctgtccaggaggtttggcagagccaggggctgccctagccatgctgggttggaggtctcagggtcctggagaggcacagtgcttgtgacctcacctgagcgatcccacacagggctccacgggccccaccttgcagtgagaggactgtcgggcacagtgaatggccccaagaaaggcactgatgtcctcttcagtaagtggggggcgggggggtggtttactggtaagagcaggtatttactggttagtgcagttccctgtgtgggaatgtgctactcattactcattcagccctcctatcagcccgcacagaaggcctctttatttccattttgcacatgagaaaattaaggcttagaaagtgttgttagccagcccacaggcttatggctgttaaagtctggatttgaacccagctctggcttcaaaatttatgcagttggtcactccattgttctccttccccagtaactccgaaagatccatcagagtcctccagctgaacgactggatccctgcctggctgatcccatccaccactgtatgactgatcgcttcatctatgttcccagtgctgtcatctcacctgagcttccacttggattctcagttgcctttgagccacctgacttgatggttaacagctgcctcagacacagctatctgctagtactgtgttcctcccagactaccctcagtagatctgtgtccctccccggggccctggcatcacctcccactgttgccaggcttagccttggctctcctggggtgcccttccctgcctcgtgcccttattaacttctcacagttcccttcccctccttgcatgcttccattttctgcccaatggttctttcccccaagcagacagttccaggttcctcaacccttggctcctgctgagaatctttcagcaatcccctatttgctatggaagagtccagcccctccacggcacggcccctgtgatcaggctgccttcctgcccccctccccacaagttgaaggaccactgctccactctaccctgggctaggcagtgctggcttcccaccaacatccagtttctccttcttccttagtgacagaccccaatttttagctgctcttcccgataaagaccacatttctcagtttcccttgcagctagctgtggccatgtgacaaggttctggccaatgagctataaatgaaaacgttacataggccctccagtaaatcagcttaattgcaagctggcttggcttagcttagaggagtgcccatttgagtctttctcttccctgatgcttggagctctgatgtactggctggagttccagcagcacttttggtacatgacgtgaccttgaggccagtgctagaatggtggagctgaacagcggagaaagcctgggtcccctatggctgcagaggtgtcatgactagctggactgcctgtcttcagcttattttatgtgaaaaagaaatgaacatgccttgctcaagccactgtccttttggacattctcttgcatgcaagcaatcctaatcctacctgatacaaccatacagcacagatcatgtctcctttcctatgcttttgtgtgtgtattccttctccctgaaatgcctttcattcctttcttggctgttgaaatcctatttacctttcagggcacaattttaataactcttcttccacaaaaccttcacccattccctgggcataacaacccctcgacaccgctggttttcccagccctcagtttggccctcttgtagcacttacctaaattccagggcatgcacaaagtggctgaaggatgaggattgggtttccttcaatctctggttacccagaactgggacagtgcttggcacatagcaggcactaaatcaattcctgttgaacacacatgcatgcacacatgcacacgcatgcacacgcatacacacaccccacacagggcaggcaccaccagggcaggtaccaggtgtctttccaggacagacaccctgacagttgtgtatggggtgagggggcacgggaaaaaggaaaacaagaaaccaaaagaagagagggcacacctttcccttgacccttccctcacgcacaggcatgagcagccacgccaggcctggaagctgtgcctctctcccccagctcccctctctggcaggctccccattcatgcccagtgggcgctcccgtgctggctgctggcggggagaaccaggagggaggaaggctgtggaggcgctcggcagaatcaggacccaggaggaccgcagcagagcggaagtgacagcacagacctgttaataactctgggctggtactgtgctacaggctggcctccctctcctccctcccacccccaaggccccgtgggggctgcagctattggtccagagggcttgttggagttgttgggtgctcgagaggcaggccgacttggtggctgagggcggcgcctaggacacaggtgcagtcctggcggagcgtttgtggcccattccctccagggcaccaggcctgtggtcagttccgctgccggccaccgggtggcagtgctggtcaagccctccagcctccagagccggtcttcccaggcggcgtggatgctccctgactcaccagctccgccagaacgacattgttagggctggaagggcttagccaacataacacgaagacgcaatttatgtatgatttgagggtccgattggaagggtttttttgtacatctacacacctgtgtgaccacgatcaaggtgcaggacgtttccagctccccagaggcttcccgtgtccctgccgatcactacctcccaaaggcagccttgtcctgcttcgaacaccacggatgggttttgcctgaacttcctatgaatggcagcacgcggtgctctttgggtcttcccttacatcagcctcacggctgtgaggtttatcctcgtcgttgcaggtagcagtaatttgttgtcattggcacagtattccatggcgcgcatatgtggcagtttaggtcctgctgatggttgtgggaagctgggccgggagcagcctctgagacagagatcagggacagggctgcttaggcggcagacccggggaagcataggcctggactgggtgtgggtgggacactggccttggcctccggggaatgggccctgcattcccggggatctgagcagttcagctcccccagctgagtgtgaggtggacagcagtggacattcgcttgtttccaggctggggctgttgtgcagagcgctgctgtgggccagcacacttggttcacgggggtggcatggctgggccatgaggctggcagaggggtgccttgtgcaaaagctcccaacgctgccctgtttggcccctgcgcgccctggccgaccgcccacagcgcccgcggccctgatgttctggggctggtttctaggcagggcagcccctgccctctgagattttggcccggcggggaacggatgagggctggcaagtgtcataggtaggcgtccctgggccttaatggcagggcccacgagggaccgggctgcctgacagtgccccaggttgggctgggctcccggtcccgctgggccgcacgctggagtgggcgcggggcagcagtggcttcctcgtgtgccaggctcttcccggagcgcgggttgagtcttgagagataacctgcgtgaagacatgtgtagtgatggggctctgggcaagagaggccgactgcaacagaggggtcccagtgaggctaccacccaccctgggagacgggtgtgtgggagctgcggtatagtgagcctcggcgccgctcacctccctctggggcgcccctcccggctttgggggctcccgggccctcggcgcctcctgcagtactgaccgccgccagcaggggccgcctcagtctctgcacagcggagaccgccccgcgcttgagggcacgggcccgcccctctcagagcaaaggtttgcagcggggctggcgggtgacatctactgcggggcagcctcaacctgacactcagcagcaagttaggcctatctacaaatctcctgctctgtgcccgcgcagtccagtggaggagatattcctaattagggggcacttccaaggggcggagtctccgcggcgagtggccgtggaggggcgcaaggcagacggtctccagccacgatacctgggccaatcccagcctgtcacgtcatgcctagtgagctgaacaagctgcgtaactgtcgtgtgcctcagtttccccacgtgtataatggaaatgattacaataaacaggacctttttgaggagttgccatgaggactgtcaggtaagttctggacttagaacggtagcattccgggccaggagcggtggctcacgcctgtaatcccagcactttgggaggccgaggcgggtggatcacgaggtcagtagatcgagaccatcctggccaacatggtgaaacctcatctctactaaaaatacaaaaattaactgggcatcatggagagcgccacagtcccagctacttgggaggctgaggcaggagagttgcttgaacctgggaggcagaggttgcagtgagccgagatcgtgccactgcactccagtctgggccacagagcgagactccctctcaaaaacaacaacaacaacaacaaaaacggtagcattctgcaggggaggaaaagtacaaaagtaaaatctttccccacccattgctcggttcatggctaggacacctataacaaaagacaggtcaacaagagaaaagcacacaaatttatttcatgtaaattttacatgacacaggggcctttggaaatgaagacccaaagaaatggggacatgtatttttatgcgttggtttcatgaagagtgggcatcgtggagaagtgattggctaaagggggaaggggtaataaaccggggagagtcggccagcctgttcagattcttctctctgtccctgtgtcttcagaggtaaggatgggtcttatggcctcatggccctacttcaggggattcgggcaaagggaaggtgagcgaggccttcctgcttctgctgttttcttaaatgccaaagtgccatattttggggtggcatgtcctgaaccctggcagtttgttcaataaacaaacacagagtgtgtggcgggtatgcctgtaccctggacgggaggctttaggcaggttttttagctcctcagaatgacctcctctgccccccagctgcctcatggcccaaggtcccactgatgcaactataccaccccagcctgctggctttgggtggcctgagggccatagcttgccaggtaattttccagacagtctgaggctcagagttgacttccctaataagatgccatacatacctctcatgagagtgtgatttattaacaagatgcatggctgcagcgctctggggaaccacccaaggcagcctgcactaaggtggagacgtacctggcactagccatcccttagccgagcagtcactgattgtggccttgatctggggtcttgggaggggcttagcccacaggttgagggtcagggcactcacaaggctccaaacccaccaggcccttgcccccgaaagtggggtccacttggccaggtgcggtggctcatgcctgtaatctcagcacctggggatgccaagatggggggactgcttgaggccagaagtttgagaccagcctgggccacatagctagacctgtcttcacaatatcagaaatattagctgagcatggtggaatgcacctgtggtcccagctactcaggaggctgaggtgggaggatcaattgagcttgggagtttgaggttgtagtgagccatgatcacaccactgcactctagcctgaatgacagtgagaccctgtctcaaaaaaaaaagtcgggtccacttatctcaggtagggcctcaggctttctgagtcaatctgcattttaacaagatccccaggagatttgagagtatgttgcaatgtgagtgaggagcactaggttagagtaagccaccttccctccatgatcctcagttttcctaaccgaaataaatattgacgggctagaatacctttggcttcttttccagtgctaacacattgggagctagacctttgcagtgactgtctgtagggctatttgcattttgtggcagttctgggaaagtggaattcccagaaattccagtgagaaaggctggagggaccatcagctcctctcctcttctgtctgctttacccctcctttctgttggaggtgcacaatttcccaggtcctgggatacagcaaatgcaattcaatctgcttcagcaacacagattgagttccttctgtgtgccagggtctgctgcagtgaatctccatcctggctgtacattagaatcatctgcgttgctctgtaaactcctgatgcctgggttccaccctaggccagtggaaccggagtctttgggggcggggctggacataggtatttattaacatgcttggaccattacaatgcacagccagcttgagattggtcagaagtgagaaagaaggctaccgtaagacctacccaggccagacccccattcctgtttccttctcttaggccggccagctccagcaggtcagtctgcgagtcaggagaaatcactgggaaatcccctggatatagtaacacatgacagcaccattgaattaatcatcaactttgtaacgtgatctctggcccataaaaagcagacctgctgaatctttggtaacctgtccactggccttctccaggcagttccttctagacctggggacctgtgcccgaggaccttagactgatgggtgcccagctctgcttcgaggccagtaagtagacctcctgcaagcctggagcttggtctctggactgggggtacaggtagcagagggtgctctgtgtcattgctggagtagagatgtggtcagtgtaaagtttagggggctggtggggtcccagttctgccaagttgagctatgggaccttgggtaagtcactttgtccctgggcctcagtttctacatctccaggccagggacgatgcctgctggcttacagggatctttataaaatcaaacgcacaaatcaaaagagtgataggcacaaaggttctctgcaagcctcacctgaggccacaggtgtcccgtagtggaagagccatatgtgggggagatagaggacctggtctttttttttttttttttttttttgagacggagtctcgctctgttgcccaggctggagtgcagtggcgtgatctcagctcactgcaagctctgcctcctgggttcacgccattctcctgcctcagcctcccgagtagctgggactacaggcgcccgccaccacacccggctaattttgttttgtatttttagtacagaaggggtttcaccatgttagccaggttggtcgcgatctcctgacctcgtgatccacccgcctcggcctcccaaagtgctgggattacaggcgtgagccaccgcacccggccttgaggacctggtctttcagcaccagctattggggttgtgcatctctggacctaccctcccaggtaaagagctgggagcctgggctcagggtcctctgtcccctggtgggcaccatgggctcacagactagtagttggctgtgccaagagccactgctgctgtcacagtaatggtgtttggcagggaaatgatgggccttaaaggaggtggcatgagagtgaagcagccaggagcagcgctgggatcccccactttctggctgcaaaaacacagatgactagcacagccttctcaagctctgagggcttcccccgaggcgggatgaggagaaaaagaggctgcaaagtgcttatgggtgcctgacaccctgaaaggcttgacacctggaggagtggtgaggatggagatccctagaggctcttgctgagcaaggggccgcccctgccccactcagattccaagatcttagagaatctggaatctgactctacctgtcctggagtagagacaccccagaggccctgcttagcccgcaggcagtccaccccctcagcagtggggaccccggggcaggtggagtaattggagcgatcgcccatgggcagggcactcagcttctctgagctcagggtcctgcctgcaaacaggacccatagaaagagcggctgcctctaggtgtgagggtgcttgggcaccaggatgatctgaaccctgtgccagcccagccactggggacaggtctgcttggagagccacatgtggcctatgcccacctctgccactccccaccctgggagtggggtgtcccgggctgcctgggtcaaagtgtgggaggacccctgcaggcctcgtgggaggaggcaggtggagtggaggtggtgatcacacccgtcaggccaccccgaccctgctccagacccaggcacagagccctgtatgaagtcggtggacacggtcctgtgggcccttgccaggctggtgggtcgggggtgggtttcggccccactcagccttggtggtgcacagtgaatagctgacatgaccatgcagacagaccaagagtcttcatagatgagaggctgtgccctaagggaccttttgctgccctgccaggtcccagggggctgcccgaggtagggggtggagcctgagtgagcagcacagaggaggctgcttagatgccccggctgcggaatgacctgtgcagccaccacgtcccctcggcacccaccagccctggtgacatgaggacttagctccatacagggctgctgagaaggctcctgaagcagggatcggggagctttgcaaactgtcaaattatcctccagggcaaggcctgcttctcaagggctcccagggcctcatgcaccctcaaggccattccgggggagttcccctcctccctggactgcctccagccagccagttccctactccctccaggaagtggatggaggagtgaggtcacctgccgtcctccacccctccttgcccccagagccagtcctgcatggagccagcctctgtcccgggcacctgcctagagggtagggtggaaactccatccccaatgagcacgggctcatctctgctggttcccgtctaggcccatggtgctgagcatgacagggctccagctcccctgaccccaggggttcccctttctctgtaggggctgcactgggtgaggctgggagaactcctcatcaaccctagttctgcccctgattgctgtggggtggggctagccacttgcccactgtctgcctcttaggatggcagcaggattgggtgtggcagtttgtagagagggctcggatgccggccaccatctccggcaccgcccctcgtccagggccattgctccagcctcttgccaagcccactccagggcttctctccagttcccacctcagggatgggcagtgacccagccaaagggctggcctctgccctcctagattgtggctggttgtgccaagaggccccacttgccctgtcacccccagccccatgcctggccaggtaggcagtgaacaagactccagacaggtgtcctgagactcctggccttgctggacatgcacttcactgccgtttgtaggtgaggaggctgggccctggaggacagtgacctgcctgggccagcagcagggcaggcctggaatgggggtgttagccatggcccagctggtatcccactgccctccatggagcagcctcaaccatgggcacaaggtcaggttcactgatgtcagggaccccagcatggctccggctctccatgtgtgctggctctgggacttctccttgcctaggtgcagccttgaggcacagggagctgggcaggcctgctgggattcgcaggaagggatgagtgcatcatgggaaggcacgggcggggcgcaggcgaggggtgaatgcggatacacagggctctgtgagagtcccaaggccacggtgagcactggtctttaatgctggggaaaggtcactgcaggtaggcttacctttggcctgtggaagtcagggacagagtcactgtcaccgcaaacgtgtcctggtgcctgaccagatggagcctcctggccctgggctctgctagagggtgtaaacctgtgtgtagtcagagtgcctgccttgccaggggagtgtgacctgatctgggaggggagtggccttgctccttaggatggggtctggcttaagttctgattgaattcgccttttattttcaacagcaaacagccagccagcctccctcccccagcccagaaagagcaggaccaggaggggaggggcaaggccggctaaggcagttctggggtaggaagccccaccagcttcctgcaggctgagtggagaggaagggctgctcagtgaggtgctttccccttctgaacatagccaggcagagtcctgtgggaagtcccctggtttcagagcccatgccagagccaggctggaccccacccaggattctgaggggctaacctgggacttcctctccagcctgcacccatactctgtggggagcagccaagcccctttctctcccaggacaaggatgtcaccattgctgggggccatggtcttcacaagtgatgcagttccccatgggaaaacaagagagacaagcagagagggaatagcagacagcctcctggagcagaccacagtcagcaaatctgtctgtctcctcttccgtcatttttaggtgcatatggaataaatgtatgggctgggcgcagtggctcatgcctgtaatcctagcgctttgggaggcagaggcaggaggatcacttgaggccaagagttcaagaccagcctgggcaacacagcaagaactcatctctgaaaacaaaacaaaacaaaacaaacaaaaaaaccgtgtataacaaacatatagatatttatgcctgactaaccctactctttctcttgaacaataataaccattactagattggtcgcaggaagagtacaaagagacatcagttcctatagttttcataacaaccctgcaggaaccgagagaggtggaaatggtccctaggggaaggtcaaggtgctcccaggtgtgagggactctgggatactgggggctctctggggagctggtgggtccagacccggttagcactgacactccccatcctcaacccacagacgccaaggcgccccgagaggcacttcgcttccatgccgaggccaagggcgcacaggtgcgtctggacacgcgtggctgcatcgcgcacaggcgcaccacgttccacgacggcatcgtgttcagccagcggccggtgcgcctgggcgagcgtgtggcgctgcgagtgctgcgggaggagagcggctggtgcggcggcctccgcgtgggcttcacgcgcctggaccccgcgtgcgtgtccgtgcccagcctgccgcccttcctgtgccccgacctggaggagcagagcccgacgtgggcggccgtgctgcctgagggctgcgcgctcactggggacttggtccgcttctgggtggaccgccgcggctgcctcttcgccaaggtcaacgccggctgccggctcctgctgcgtgagggcgtgcccgtcggcgccccgctctgggccgtgatggacgtgtatgggaccactaaggccatcgagctgctgggtgaggcgaccatggggaccccgcaggggaggtggggagatgggggctccagtggcaccccacaccgatccagagccacaggaagaacgttcacattcagttattccatcagcccctgcccagtgttagctgtgaagatgggcactggagacgccagatagacaaggctcagtcgtagggagggcagtcttgtccctaaagaatgataagcagataggaccagcactcacaccatctgttactcaaacacctgttagagtgtccatctccttttacaaaggaagaaacatttgggctggctttgcagcctaaataggagttcactagatacaaaggtggcaagcaaagggaacacacaggtgaggctagaggtgcgcatggagagtgcctgcagggagaaagctgagcctctcagtcagtgggggggaaaagagagccatccctttagccaccccagaagaaggtggatttcaggagagcacagagaggcagtaatacccataacaagaaatattggcattcctgggccgggtggtggtccactccccgcctcctgccagcaaatttgttaaaaccatttgtcacagctgccagcgcctcacacctgaagcacctgatttgctgggtctggagtggagccctgaacctgtgtttgtccaggctcttgggagatgttgatgcccatctgggttgggaatgtggctcggccgagggtctccactcaggcagcggctggagggcaaagaagaggggcctgaaggaaggtggctcaggaggaggaatctccagccccaaggattctcggattctcagctgggtcaagctggggaagggatggccaggacagggtcttaaaatttggggatgggggctcagcattgcaacccaggaaagaaaggagaccggacactttgctgcggggccaggggcggggatgggggggcacctgggcttgccgtcctggacctgagtttctctctctgcctcagatcccacagccagccggctcccaacacccatgccatgggacctcagcaacaaggctgtgcctgagcccaaaggtgagtgccttcccaagaatcagggactccccgggaatccagcacctgggagtggagggagaagccccacgtcctactggttgttcattcaagtctctcacaggctttgggccaaaagatttggctctgcctactggaaacctaaaagcaacctggcatctctgccttcgagagcatttgcctactctgtgagttataagagcacttttatgaacagacagtgttattttgttcttgctttaaaaaatcatccacattcattgtaaatgctttgccaatggaaataaagatgaaaggataggtggggtgcagtggctcacacctgtaatccctatactttgggaggccgaggcaggaggatcgcttgggcccaggagtttgagaccagcctgggcaacatggcgaaaccctgtctctacaaaaagtacaaaaattagctgagtgtggtggtgcatgtctgtggccccagctactcgggaggctgaggtggaaggatggcttgagcccagctggctgaggctgcagtgagctgtgatcacaccactgcactccagcctggatgacagagtgagactgtctctaaaaaataaaaaagattaaaggataaagaggaaagttaaaaaaaaagcacccattacctcttgggtggatttcctcccagtattttcggtcatcgatatagacgtgtgtatatagggacttgtctgtgctgcgttttccttctctctaaattggaattggaatatatgtatataaaaaatggttttcttccccctttttttcacttgattacactgtaagcatttcctcactaggtaacattcttcaaaatatagctacatgtttctctgtcattctctgtggtcacattgtgagcgggttgcccaccccttcccccatgtgccctgacctgtgttgctccctcttccagccacaccaggagaggagtgtgccatctgcttctatcacgctgccaacacccgccttgtgccctgcggccacacatacttctgcagatactgtgcctggcgggtcttcagcgatacggccaagtgccctgtgtgccgctggcagatagaggcggtagcccctgcgcagggccctcctgctctgagggttgaggaaggctcatgaaaggaggcttcccagtatgagtggcagcccgggcctagatctgagtctggcccctgcagagaggaaggaggcgcagccctaccttctttctggggaagagtcagaaaggctgattagcaagaggtgcggcagagagaggaaggcagggaggtgctgtctgctgcctccacctgttccccaacaggatagcaaggaaaaacccctctttctgtccatgccagaactatccttctgatggggtgctttgtttagagatggggtggcccaatccccaatcagttttacatctgagggagttcaggtatctgttgtgactggtgaagccctgtacctcctgggtattgaagaacctggacttgaagcaggaggtatctgcaaggaatgtataaagttccacatggaagctgggttgcctcccacaagtccccagtagagtggatctgtagttacccgccctgcctccctttcagggtggtcatgaggtcccagagagaccatgcatctgaagatgatttaaaacatgaaagtgtattgttgtcactgtggtaatttccttgccagtttctgagatatcaaaataaagtttgtgtttcctgaatgattttgtagtgcctgtatcctcttgcttgcagtctgggagtggggtaggagctgtgggctgttcgggatgatgcagcatttggagacatgccattctgtcttccccacaatctgggcttgtaggtggcctgggtgggcctctgggcgctcgggcccatggactgagcacatgaagggggtagtcttataatcccagtccttaagtcccaaccagactttttgcccttgccacccttgattttggggcactgcctggaggctctgacccccgactgaaggcaggagttggccggcctgggagcccacctcagcaggtgtctggcagtggcaggctgtgcctgtgactttgctgttgtcccctgctctgtggctgctgtggaggccactcctgggggagagggctatgtgaagggaatccgaacctattgtgccccaaatggaaagtatgggcacctccacacactgcctttctgcccatcgcatagccaaacagaaggtcaggatgctggatttgatgacacctgagtatctttcactctggagtgggatcccctcactaccacccacaagtgctctgacctggggcatgtgagttgacctccgtgagcctcagtttcatcatctgtaaaatggaagtaggataattttcttgctggtaagttgtgaggagcatgaacattcaacttctaacttagaagaaggactcaaaactggcagctccctttccctggaaaaggcatctcccaggggaagttcccaagagtgcactggaatggttgtcaggggccttgtgtgagtcccggtagcccactgacttttaccaagggcctccaatcaccccaatactttggaatgatttctatggatcctaaagcaagtattttcatcctttaaatgtcttatttttcccccctatgcccagacagcttcaaggtgagggcagtactttaatcctaattccagtgaacactaccttattaggtaacatctagaaagcctgattttagaaaacatctctaaccagaggtggaccttctggaatggtggagtaaggaaggacttctgtaaacccattgttccataaaaacaacaaaaatactggcaaaattaccaaaatcaactttttcagaactctagaaattaaccagaggctaacaataatctgaaggatgcttatctgagataaactgctgtactttggtaagaacagtggggtttgtgtggttaactcctcccatccctctgcctctagctccacagtagtcctgaaaaccagcagccttgaagccactcagggtggatggacagactcagttgggagctcctcgggaagctccatccctagactattgtcactatctgaactacatcttcgttctctggaaaagtttcatttacagggcgttgtcattctttaaccctacttggggccctctccatgggaaacccctatccctgggacatttgccaagcataatcagtttcaattgtttaacattacagctgcctaagtctgtgatactagctgaggcaaacaagagcctggccagagatttaaaaggaagatctgtgaaacgagacgtccgtagagaactttgaaaagttatgatatactcctgggtatctacaagactgtgtacacactcaggaaagactaagaggaccccaatctctcactttggctgaccttgaggccctgtgaaagtaggaagcgaagggtaaggcagagttagaaacttcctgagcattgaaggtgtgccccaacccacaaacagagctccttgtcaaaaggtggaagatttactagctcaaggcatttaaggaaatctctgtctgatcattagctgaccactaatctaactgggcagagacttcagttggctacacattacgaggagtgtagactttacggaattagtccaggaaagtgagcaaaaaacaacagaaaaacaacaacaacaaaagccccacagaaacagcagcaacaaactggcaacgacaacaagccctggaagagtgagtgtctgattatcagggcttccaaattatattacctaaagagctctagtttttaaagaaaaattatgagatctgcaaagaaataagaaagtattgcctatgcacaggaaaaaatcagtcactagaaactgtccctgagacagccttgatgttagatttactagacaaaacctttaaatcagctgttatgaatatgttccgtgagctaaaggaagccatgtctaaaaaaatttttttaagtatgtcaatcatgtctcaccaaatacagaatatcaatctatcagaaagataaaaaaccaaccaaatagaaattctggagttggaaagtacaatacttgaagaaaaattcactaataccagcggggtccaatagcagatttaggctggcaggagaaaggatcaatgaacttgaagacaggttaatagagatgattatgatttagtctgaggtatagaaggaaaaaaagaagaatgaacaagccccagagacctatgagacacagtcaaatgcaccaacatacatgtaaagggagtaccagaaagagaacaggaagataagggggaagaaagaaattgtataagtaaagtccaaagagttttcaaattttctaggggaaaaaaaatctatatatatatctatatgtacatatttgagacagaatctcactctgtcacccaagtgggagtgcggtggtgagagctcagcttactgcatcctctgcctcccgggttcaagcaattctcctgcctcagcctcccaagtagctgggattacaggtgtgcaccacgaggcccagctaatttttgtatttttagtagagacagggttttaccatgttggcccacctggtcttgaactcctgacctcaggtaattcacctacctcagcctcccaaagtgttggaattacaggcgtgagccaccacgcctggccaattttctgaaaatattaatctatacatccaagaagctcaatgaactccaagttggattacttaaaggctggtcctcactctaatgtgctactctgcctccaccctaagaaggataaactgaaagagatccacaccaaggtatatcgtagtcaaattgtcaaaaaccaaagacaatggaatctttaaagcctcaaaaaaaaaaaaaccacttaattgcatacaagttatcctcaataacaactaacttctcatcagaaatcatggggaccagaagacagtggaatgatgtaagtactggaggaaaaggactgtgaaccaaaaattctgtatccagcaaaactgtccttcaaaagtgaagaagaaattaagatattcccagataaacaagaacagaaaattcattaccagtacatgtgctctacaagaaatattcccatatttctttcccatatttctttaagactgaaatgaaaggaatgatctctaacatttctctaattttatagataggaaaactgaggggcaggtagaaggaatcatcttataaatgatgggataagaattagatccttgttataaccacactgatgcaatcatttcttcattcatcaaattaattccaagaatattgaaacatctgactctagaagccatcttagtatgagcacagacttgcctatgtccttgggagcaatactggggaataaataattatattcaatgtggtaagtgttagaatagcttatactggctgggtgcggtggctgacgcctgtaatcccagcactttgggaggctgaggcaggcagatcacaaggtcaggagtgtgagaccagcttggccaatatggtgaaaccctgtctctactaaaaatacaaaaattagccaggcgtggtggcgcacgcctgtagtcccagctactcaggaagctgaggcagaagactcgcttgaacctgagaggcagaggttgcagtgagccaagatcatgccactgcactccagcctgggcgacagagtgagactctgtcaaaaaaaaaaaaagcctatactaagagcttttcaacttccatttcaagatgatagactgagcacatgtagttgtttccttttattccaagtctctatacattgctcagaatgatttaaacaaatatatttcttccctataaaacaatatagggaaaatctggtgaactaaaaccacaataaaaggtggaaaacaggtgggatcagattaaatatggaaaccgtgccagaggagaggactgccgcaaaaggtgagagcagctctaggaatgcttcaaactcaggacttgtgaactgggaaccgcaggtggtccatgatcgactgaccgtgactggtagaggctcacagaatagacagccaggaatgttcacctcaggccacacagtgagtcacagaggtgtcttcccatgggcaggatcagtgagaggtgaacaattgggtgtgaggcaagacaaagccccagagattaacagctcccaaggatagcaggaagcttccacatctggaagtttcaccattggctcatgctgcccagcagcacatcccatcccttcattccactttacacaggtacaccaagtcatagctgcatgtcctgcacctgtctgcaagcaggccacttaggctaacaaggaatttcagatccaaaggtgaactcacagccaagaaaagccaaatatttgaaaaaagtgaatatcatgatggaaaggactgacagcaaaaggagttcatacctgaaaaaatagggttaataaagcatacaaacctgggctttaggataactataatcacatatgaaaggatattgcattgaaaaatctagatacctttggaattagaagcttgactattaaaatttaaaataacttatttgatagagtgagtagcagaaagtatgtagctgaaaaatgtattaatgatctggaatcaaccagaatgcattccaaaattaacaagagatgaaatatataaaaagagaataaacagaatagatgaagttcaaataaccatccaatgtgaattccagaagaaaaaaatagagaaaatggacaaaagagaaactcaaagaaagattagagctgggcatggtggctcatgcctataatcccagcactttgggaggccaaggtgggaggatcgcttgtggccaggagttcaagaccagcctggccaacatataagactcccatctctaccagaaataaaaataaaagaacaatttctcagaattgaagaaagacatagcttttcagattgaaaaagccccccagttgccaaacagaataagtgaagaaaagactttcattttgacacatactggtgacatttcagagtaccagggataaacagaaaacccaagaagaaaaaaaaaacaccccaaaacagatcacacacaaaagtattagaatcacattatcagtaggctttttctcagcaatacttggtacagaatgacaatagaacaatatcttcaaagttcagggggattttctttaattgaagcatatttactataataatatgcacatatcttttttttttctttttgagacaaggtctcactctgtcatccaggctggagtgcagtggcacaatcatggctcactgcagcctccgcctccctggcctcaggtgatcctcccacctcagccttcagagtaagctgggactacaggcacatgctgccacacctgactaattttttaatatttagtacagatgagatcttgcaatattgcccaggctggtcttgaactcctgggcccaagtgatccacttgtgttggtttcccaaagtactgagattataggcatgagccactgtgcctggcctatgcacagatcttaagtccccattttgatgaggaaataattttgaaatctaaaattctgcagacagcgactctctcattcaaaggtgagcgtaaaatgaagaaatattcagatataaaaagactcaaagtttatcatttaacagatactttataggcaaattattagaagaatcacttcagaaaaaagaaaaaacaagaaaaattagtatgattgtaaccattaaaagcaaaaaaagttgaatctaagtaaatgttaattgtaaaaaattaataataatttgaaatgaaaaccacagatgatatcaacatgggtggaatggcaaaaataaaaagcatgctaaggttcttttcttatcaagaagagggtttttaaaatttttttagtttttttgagacagagtcttgctcttgttgcccaggctggagtgtaacattatgatcttggctcactgcaacctctgcctcctgggttcaagcaattctcctgcctcagcctcccgagtagctaggattataggtgcctgccaccatgcctggctaatttttgtatctttagtagacaaggtttcaccatgttggccaggctggtcttgaactcttgacctcaggtgatttgcccgccttggcctcccaaagtgctgggattacaggtgtgagctaccacacctggctaggaagaagttatttttaacaatataaatgagaaaaaaataagtttaatttgtatggtaaagaacatacaaacaaaatgtagaactacaaataaaatatataaattccaaatcatgtgaaaataatagaacttcaattcctgcatcccaacaaaagtcaggaaattggataaaaggatttttaaaaatgtatatagtctagccctgtcatccaggctggcacaatcgtagctcactgcagcctcaaattcctgggctccagctatcctcttgcctcagcctcccaagcagctggtactccaggcatgtgctaccatgcctggcttcttattttgttttattttttatttttatttgtagagactgagtctcaatatgttgcctaggctggtctcaaactcttaacctcaagtgatcctctgacttcagccttctgaatagctgggattgcaggtgcaagccactgcacctgctgagacaacacactttctgattttgaattatactacaaagctatagtaatcaatacagtatggtactggcataaaaacagaaaaatagatccataaaacagaataaggatcctagaaataaacccatgcatatatgatcaacttatcttcaacaaagcaccaagaatacagaatagggaagcgacagtctcttcaatcaatggtatggagaaaactggatagccacatgaaaaaggataaaattggaccctatcttacactatgcacaaaagtctactgaaaatggattagacttaaatgtaagacctgaaaccgtaaaactcctagaagaatgattttttggatatgacatctaaagcatgagtaacaaaagcaaaaacaagtgggactgcatcaaactaaaaagcttctgcatagcaaaggaaacaatcaacaaactgaaaaggccacagtagaaaatatttgcaatattttgtatacaataaggggttaatatccaaaatatataagggactcatatgactcaatattagaaaaacaaataacctgatttaaaactgggcaaaagacctgaatagacatttctccaaagaagacataacaatggccaatacgtatattaaaaggtgttcaatatcactaatcatcaagaaaactgcaaataaaatccacaatgagatatcacctcacacctgttagaatgtctaatgtcagaaagtcaaaagataacaagtggttgtgaggatatgaagaaacaggaacccttatatactgctggtggggatacagactgctacagtcattatgaaaaacagtgcgtttccaattgcatggcttaaaaaataggaacacagtatgcaggttcctcaaaaaattaagaatagaactatcatatgatctaacagtctcacttctgagtatgtatctgaaggaaatagaagcaggatcttgaagagatggctgccctgctatgttcactccagcattattcacaatagtcaagatatggaaacaacctaagtgtccattgataggtgaatggataaagaaaatgttatatctatgtatttatttttcagccttaaaaaaaggaaatcccgtcatttacaacaacatggttgaacccggaggacattatgccaaatgaaataagccagacacgaaaaagctgaactcatagaaacagagtagaagggtggttactaggagatggtggtggggaaaatggggagatgttgatcaaagggcacaaactttcagttataagatgagtaagttctgaagacctaaatgtataacatggccactatagttaataataataaggtattgtatacttgaaatttgctaggctagtggatcttaaatgttctcaccacacctccaaaatggtaactatatgagatgatggatatgttaattagcttgattatggtaatcacttcacaatatatacatatatcatatatacatttatcaaaacattatatcgtataccttaagtatatacaattttatctgtcaatcatagcttaacagagcagaatgaagtaaagagacacacacacacacatatatatacacacacacatatatatatacacacacacacatatatatatatatatatttttttttttgagtcagagtcttgctctgttggtcaggctggagtgcagtggcatgatcttggctcactgcaacctctgtcttctgggttcaagcgattctcctgcctcagcctcctgagtagctgggattgcaggcgcccgccaccacatccagctaatttttgtatttttagtagagacagggtttcaccatgttggccaggctggtctcgaactcctgacctcaggtgatcctcctgcctcggcctcccgaagtcctaggattacaggtgtgagtcaccacgcctggccacatgtattttttaaagccataaaggagagattgataaatttgattacgcaggatttttttaaaagcttatgtgtgacaaaagataccatgaataaaactaagaagcaagataatagatgggaagtagagactttcaacacatataacagaatggaatgatgttgaaacttacaaaacacttactcctacaatcaataagaaaagcacagatagctcacagtgagtgtccaagatcacatacggagaaatcaatccaatcacttatggggtcaataaacatgagaataaactttgcaagagcctgggaagtgcaaattaagacagcagcaagacaccaacaaaatagaacttggttggatggtgaaatggtgaaagggtacaacatttcagttagaaaacttttacactgccgggcaaggtggcacaggcctgtaatcccagcactttgggaggctgagacaggaggatcacttaagcccaggagttcaagtccaatctgggcaacatagggggaccttatctctacaaaaaaattaaaaaattggccaggtgtggtggcctgtgcctgtggtcccagctacttgggaggctgaggtgggaggattgcctgagcccaggagattgaggctgcagagagctatgatcatgccactgcactccagcctggatggcagagtgagaccctgttcaaaacaaaatcaaaaacaaacaaaaaagaaatcaattacacaaaaacattggaggcattatctactaaaatttaaactattcatacactatcgcccaccagtgtctactccagaaagtcactcactgcttgcaagaatgacctggcagcaattctcatgacaggaaagcacttggaaacaaactttatatatttaccaataggaaagtggttatatcaaccatggtttatccatattatagaacattgtgctgtggttccaaggaataagtttttattttttgatttttttactttattttgtttggaactagggtctcactctgtcacccagactggagtgcagtggcgtgattatagctcactacagcctccgcctcctgggctcatgcaatcctcccacctcagcctcccaagtagctgggac

SEQ ID NO: 499 - DNA, 577 bp, Homo sapiens
ctggccttctccaggcagttccttctagacctggggacctgtgcccgaggaccttagactgatgggtgcccagctctgcttcgaggccaacgccaaggcgccccgagaggcacttcgcttccatgccgaggccaagggcgcacaggtgcgtctggacacgcgtggctgcatcgcgcacaggcgcaccacgttccacgacggcatcgtgttcagccagcggccggtgcgcctgggcgagcgtgtggcgctgcgagtgctgcgggaggagagcggctggtgcggcggcctccgcgtgggcttcacgcgcctggaccccgcgtgcgtgtccgtgcccagcctgccgcccttcctgtgccccgacctggaggagcagagcccgacgtgggcggccgtgctgcctgagggctgcgcgctcactggggacttggtccgcttctgggtggaccgccgcggctgcctcttcgccaaggtcaacgccggctgccggctcctgctgcgtgagggcgtgcccgtcggcgccccgctctgggccgtgatggacgtgtatgggaccactaaggccatcgagctgctgggt

SEQ ID NO: 500 - protein, 170 aa, Homo sapiens
MGAQLCFEANAKAPREALRFHAEAKGAQVRLDTRGCIAHRRTTFHDGIVFSQRPVRLGERVRVLREESGWCGGLRVGFTRLDPACVSVPSLPPFLCPDLEEQSPTWAAVLPEGCALTGDLVRFWVDRRGCLFAKVNAGCRLLLREGVPVGAPLWAVMDVYGTTKAIELLG

SEQ ID NO: 501 - DNA, 1673 bp, Homo sapiens
gcctcaacctgacactcagcagcaagttaggcctatctacaaatctcctgctctgtgcccgcgcagtccagtggaggagatattcctaattagggggcacttccaaggggcggagtctccgcggcgagtggccgtggaggggcgcaaggcagacggtctccagccacgatacctgggccaatcccagcctgtcacgtcatgcctagtgagctgaacaagctgcgtaactgtcgtgtgcctcagtttccccacgtgtataatggaaatgattacaataaacaggacctttttgaggagttgccatgaggactgtcagacgccaaggcgccccgagaggcacttcgcttccatgccgaggccaagggcgcacaggtgcgtctggacacgcgtggctgcatcgcgcacaggcgcaccacgttccacgacggcatcgtgttcagccagcggccggtgcgcctgggcgagcgtgtggcgctgcgagtgctgcgggaggagagcggctggtgcggcggcctccgcgtgggcttcacgcgcctggaccccgcgtgcgtgtccgtgcccagcctgccgcccttcctgtgccccgacctggaggagcagagcccgacgtgggcggccgtgctgcctgagggctgcgcgctcactggggacttggtccgcttctgggtggaccgccgcggctgcctcttcgccaaggtcaacgccggctgccggctcctgctgcgtgagggcgtgcccgtcggcgccccgctctgggccgtgatggacgtgtatgggaccactaaggccatcgagctgctggatcccacagccagccggctcccaacacccatgccatgggacctcagcaacaaggctgtgcctgagcccaaagccacaccaggagaggagtgtgccatctgcttctatcacgctgccaacacccgccttgtgccctgcggccacacatacttctgcagatactgtgcctggcgggtcttcagcgatacggccaagtgccctgtgtgccgctggcagatagaggcggtagcccctgcgcagggccctcctgctctgagggttgaggaaggctcatgaaaggaggcttcccagtatgagtggcagcccgggcctagatctgagtctggcccctgcagagaggaaggaggcgcagccctaccttctttctggggaagagtcagaaaggctgattagcaagaggtgcggcagagagaggaaggcagggaggtgctgtctgctgcctccacctgttccccaacaggatagcaaggaaaaacccctctttctgtccatgccagaactatccttctgatggggtgctttgtttagagatggggtggcccaatccccaatcagttttacatctgagggagttcaggtatctgttgtgactggtgaagccctgtacctcctgggtattgaagaacctggacttgaagcaggaggtatctgcaaggaatgtataaagttccacatggaagctgggttgcctcccacaagtccccagtagagtggatctgtagttacccgccctgcctccctttcagggtggtcatgaggtcccagagagaccatgcatctgaagatgatttaaaacatgaaagtgtattgttgtcactgtggtaatttccttgccagtttctgagatatcaaaataaagtttgtgtttcctg

SEQ ID NO: 502 - protein, 254 aa, Homo sapiens
GLSDAKAPREALRFHAEAKGAQVRLDTRGCIAHRRTTFHDGIVFSQRPVRLGERVRVLREESGWCGGLRVGFTRLDPACVSVPSLPPFLCPDLEEQSPTWAAVLPEGCALTGDLVRFWVDRRGCLFAKVNAGCRLLLREGVPVGAPLWAVMDVYGTTKAIELLDPTASRLPTPMPWDLSNKAVPEPKATPGEECAICFYHAANTRLVPCGHTYFCRYCAWRVFSDTAKCPVCRWQIEAVAPAQGPPALRVEEGS

SEQ ID NO: 503 - DNA, 49232 bp, Mus musculus
  misc_feature (1)...(49232): n = A,T,C or G
gttataaaggaaccaactctactcagatgatgaagctggagaactgatattaaagagactaaaatgtaaggatttaatgcagttaggctaggaaaggaactggcaaggacatgaaccatctgacactcagtaagaacattagttgggctaggctagaggaaataatggctggaatcatgtgaccatgcccagaggaagctaaagtggctgaagggacagatagccctttagggcccttacaagtttgaagccacagtcagaactctgtcagaagtttgaaacgattttgaaaaaaattaccctacccttcttcttttctatccttcaatgtactgtttggtcacccacaattgtcacacaagagaagcatattaatgattcgtttattgagacggagttgaacaacaagagaataactggcagatatataacagcaaatctatggagccaatatccaaggatagaagaaggtttaaataattatgctgttaatcgttctcagaaagaaagaatgctgtggaatcaggaagctcaaaagagaaagtgaccaactccacccggaggagaacaggatattcctttgttgtcctgcaagtaaagtccctctctctcaaactcactctggattattataaatagttagtctgtggtcggtggtgtattctataatcctagcaaatacaaggcacaagaggccagcctgagccacacagggagtctgtctcaaacaaacgaaatataacattccaactagaagagtcacatgcacaacaaaagtcagtatgcatagtctcatccttcgaccaccccagaccaccctagtcattttagcctttctatatctccagatctttttccaagtgtgtatgtgcatgtgtgtgtatgttgtgtgtatatatatattcagaaaaaaacactgaaaatgccaaagaattcatatatatatatatatatatatatatatacatacatacatatatttataaaacagtatctatatgttcaaaaatacaatattcaaacatttatatgtaaatatatacaatataaatgttatatttggaacatatataaactctcttgtaaattgtattttttggcgaataactcataaatactaatttttgaaagagatgccattgttcagcatttcacaatttaaaaactctttaaaactttgtttaattgtatccagttgtgatggctaatcatgtcaacttgactccatttgaaatcaactaaaactcaaattgctgggcactcctgtgaggcattttcataactagattatttgaagcaagaagctccactcccatctgggccacaccttctggaggcagcccacataaaagggcatggaagaaggaaacattgccttttgcctgcctgtccttactctcaccagcaagctcacctcacctgctgctggagtattaaacccaacatcatcagggctccaacacagacccaagaccaacagctctcctctagcattccagtgccagatagggagtgctgagacgtccaaccttgtgggctgcacaactacagtattgtcagcctttttgtgagacagccgttgttgaactactctgaccacatcctataagccagtgtaatacatcccacatctacatccattgtatcagttctgttcctttgagaacctcaactgatatactgcttataactactctgcagtctccatttctcagacatttcatctggtgtcttgtcttgtcttagcaagcacacatgatatactgcttgttagatttgttcactctgtctttttggccctgcagccaatttcaggccattgacctgtttgtacagcctgtaaaccatttttacaactgtaggttggtttttgtttgtttttggttttgttctttacagcacacatagaaaagacaagggataaagacaaaagtggactttaaaatgtaaaatatttatcatacagcttttctcacacacacacacacacacacacacacacacacacacacacacacacacacacacaaaatgtttgttaacccctggcatggagaatttctctattataaatccccagaagtgtaacttttagtcaataggtgtgaatatttgttattacattctaccaaattctcctcagaatccttgagccaattcatgcccttttcagtaatacataaactttgtcagttgctacaatgtgttccccatgagtggctgactcaaatcacaccttctgaatattattttctcttggccaacttgatagtgaatcattcaaggtttcatgtcccttaacaatgtttggtcattgtagttttttttcttcatgatttaactaactcacatctgccccttggcgaaagaacattttcattgtagtcataagacctctttcaaatgagaatgttactcgctaaccttttataaattacaaatgttaaatatttttttctttatttttactccgtgtagtttttagataaaataagtttaaaagcccactggtcaaattgctgcattccttagtaatttttttctttgctctacatttaaagaattaaagattctttgtgagtctttaaccatctaagggagtggatctcaatcttcctatgcttcaattctttagaacaattcctcatgttttgtttgtttccctccctccaactctctctcctcctaccccagcatccccatagactcaagtgtttgaatgcttggcacatagggagtggcactattaggtgtggccttgtttgaggaagaatatcactgtgggggtgggctttgaaatttcctatgttcaggctctgcccagtgtggaggagactctgctgctgggtacctgtggaagagagtcagttcctggatgccttcaatgttcaagatacagaactcttggctcctctggtactatgtcttgcctgcatgattccatgcttcccgccatgatgataatggactgaacctctaaaactataaaccatccccaattaaatgtttttctttataagagttgccttgctcatggtgtttcttcacaataacagaaatcctaacacagaagttgctaccaggaatggggtattgctgtaataggcctgcccgtgcttttgtttggaggaagttggaatttgagactttggaaagcagcggaatgctttaaatgaggcttaatggccataccagtaggaatatggaagtcatttgtgctgaggttgatttgaactctggtgtcctgtctcaagaggtttcagagaagaggaattttattatgttgcccagagagcttttttatgatgttttggtgaagaatgtggctactttttgtcgttttttttggggagtctgcctgaggctaaggtgacgagattcacactggtagcattaaagaaagaggtctcaaaaaagtttagcatagactctgccttgtggtttacccttctgaagagcattttgatcaagcaagctgaaaaaggaaaaaaaaatgtatgattgaagtattaaaaggacaccaggaagtagaatggagctgaattctgtgttcaaggagataaacagattaagagagtggtgactttggggctaaatctcacccagctaagattgtttatttgtttgcagtttaacaaaggatagttatctcatgttaggagttactttaacatggttaatgttttcatttggaggtttagtctggaatgaactacaatccagaaatggagggcacacctgtgactcagatcttgaggctcaacaacacatgcttttgattcagatcttgagacatagtggccatgaaacaattaggtccaggcacagtggtacacacctttaatctcagcactccagaaagaggcatgaagatctctgatttcaaggtcagtttacagagcaagttctaggacatccaagcctaggcagtgaaggatgtagtagaatgatgggggaatgttccagtcccagaaagcagcagaactcagcagctttggccacatggctctaggactagattcaagaatagaagagattacagggccaattgatgttggagctaaattagaggttgttgtgtccggccagcagaccacaacctgggttctagcctggaaaggcattttggaaacctggaagagaagaggggctaggtggcgagagaaaagaatgtagccaagacagttactctgatcaaggctcaaattttattgttgcgacactagttatgaaggaaaggggaggggacccgattcccgccgaataatctctggtccagtagaaaggtgcaactgtgtggctcctcaggttccagcagtgggcgtggcagaacgaatgagcaggaagctccacccctgagcaagcaggtttcaggctgggggaggggagactacaagaagtgattaagaagagaccagcatcactgcagtgaaatcttctaagtgttttctgagagcacaaagaagctgtgttccagatacatgcaaggttataccttgtggtatagctggggttggtaatgtgtaagaatcacccaggtggtactatttttgaaggcatgaaaaggtcaaagcgaacagctcaggcttggcactgtgagaggctaggtaaggacattggtgaagtttagcctcagttgcagttgacagcccaggactgaaggagtcatgcaaagtagctgatgctaaacaccatgaagagagcctattagaggctattggtgaagtctagttgcagcaatagaccccagcatattggagataccagtaccatgggttgaccaccaagaatagtggcaacagtggaatggactcaaccagaacctagactgctacagagggcagagctggagaagtgggagtcccagactttggatcaagaagctgtgaagttaaagttgggataccccaagatgttagagatgccaaagccatgggatacctgccaaggaaagttgctaacagggagtggaactacctcaagagaaagaattgtgttgcagtcaactggagttggacatggagataaaaaccagcaccaactaaatgttttcccttataagagttgccttggtcctggtatctcttcacagcaatggaaaccctagatacagtgatcctccccaacattaaaattatttttgttgctatttcttaattgtaatttgttggttatgaatagtaatgtaaatatctgtgttttctggtgttcttatgtgacccctgtgaaagggtctctcaattcctatgggggttgtgacagtggttgagaaccactgtctacaactttaaaaattcaaaccttttatttttctcaagagtgatgaattacttctattagatacttttctcatccttgtgatcaaatgcctgatagaaactactctaggcagaagaatctctttttggcttactttcattaaatgaaggtatggtagagtcctggtagcagtgtgtggtaggtacctgagaaaagccaagaaagagaagggggaaaggaagaaagaaggaaggggcagggagagagttctcaccagaagcagagctgtgttataccataaagtcccaccactatgacttttcctccataagggaggccccatgttcagaaagtttcagaacccccccccccaaagtagtgcttctagctggggactgaatattcaaacacagaagggacagcttatctttgaaccatagtatttcattcctgtcctataggcttatcatcagttcatagtgaaaaacagattctatctatctgcaaaggtctacattgtcttatagcttcaacacttttcaaagccaaagtccacagtctaagtaagactgccagcaatttcttaattataagtaaagggggggggggagcaagtcacctattcttaacataaaatggcatagggcaaaaacatcctgtcctgaaaggggtatctgagaccatagcaaggaaggactgatccaaagcaaaatgaaacccctgtatgccaaaccctgcagtcttatatggtacaacctgggatcctgtggaatttgataacccttccctacagcacatgtggtctttcttgggccaagtccagtctctggctgcagcttccaatggcagatatttcatgtttttagtatctctagcatccttaaatccactgttacttaagcttcaccttctaagcttcctgaactacccacaaagatgttgtttcattcacgggtccaatcctgatccatattatctgtccccagcaactgtctagaaccttggtgtgaacttctaaaatagtataactctggaatcttgcatgcttgtaaaatcagtactaaatgctgctgtgggcccaaatacataggctggctctctctcaactcagctgtggcagcctctgattatcaatatggcagaacccaggaagatagcttccatgctgggtgagatgagtaggtggcctggagctttcaatgaagtgctgtcttgtactggaggagcgactcctcttgcagcagggagcaaggaagttctctcttagctgtgtcactcattgttaacaggcagcagcatttccagcagtgactttgttcatgattgtaaatttactctccctcctttcctggcccaaatgcatatctttacatggttctgcttcactttctgctaagagctctcagtgcaaatctagacaaatgcaacaagaacaaatcccgtgctgcactgaaatttcctccacaaaataaattcatcctttgaatttgaattactcatttgaattcagtgtcacttgtatttgctggaaatgtgcctagagtctttgtgaaactgtaacacaaatggcctccaggccagttccctccccttccccaccaaaacctcctgagacctgtctgtctgtctgtccttctattggcattctgctcccctacattcccaccagaaggcctgctaagctctgcatggaccgttctgaggctcgtctggtctacagctccaacttcttccacattcggaaggaaccccatcgctcactcctctgctctcccagtgagactgcacccccactccctcctaacagttctgaaactcatgaaaatagtgccagaaactgaggctgaaagctccaatgggtgagctggcgggtaacatttttacagttaaaccatgcagtctgagaaaggtttttaaatgatgactgggtaataccacgtgagtacgagagccaaatttctaggttcaaacttagcctcaccaaacactactacaagtttgagtaaactaacccctttacaacttaatttttttataactatttctttacaatatactataaagatttattataatgactatttataataatgatgcagttgtttttttaaatataaaatgaagataaccacaactctcgtatgttcatagcagccttatttataatagccagaagctggaaagaacccagatacccctcaacagaggaatgggtacagaaaatgtggtacatttacacaatggtgtactattcagctattaaaaagaatgaatttatgaaattcctaggcaaatggatggacctggagggcatcatcctgagtgaggtaacccaataacaaaagaactcacacaatatgtactcactgataagtggatattagcccagaaacctaggatacccaagatataagatacaatttgctaaacacatgaaactcaagaagaacgaagaccaaagtgtggacactttgccccttcttagaactgggaacaaaacacccatggaagaagttacagagacacagtttggagctgagacgaaaggatgaaccatctagagactgccatatccagggatccatcccataatcagcctccaaacgctgacaccattgcatacactagcaagattttgctgaaaggaccctgatatagctgtctcttgtgagactaggccggagcctagcaaacacagaagtggatgctcacagtcagctattggatggatcacagggcccccaatggaggagctagagaaagtacccaaggagctaaaaggatctgcaaccctatagggggaacaacaatatgaactacccagtaccccccagagctcgtgtctctagctgcatatgtatcagaagatggccttagtcggccatcagtggaaaaagaggcccattggtcgtacaaactttatctgcctcagtacaggggaacgccagggccaagaagtgggaatgggtgggggatcgtgtgggggacttttgggatagcattggaaatgtaactgaaataaatacctaattaaaaattattttttatgattataactgtgtgtatgtgagcacacaggtgtgctgtggcgcataaatggaggccagagcacaattttggggagtcagtcctctctattcaccatgtgggtaccagaaatccaagtgagttcatcaggcttggtggcatgcacttttacctgctgtgccatctcatcagttatgaggtaagacttaccagttatccagctcttatagctgtgtgttagagctgcaagagactgctgcaatagcaatggcagccataaacatggaattctaaaagtttgtggattgacatctagatccggtttggtaaaagggtcactaagtgtgagtggcaaagttgacagtgaggaggaggaaatgtgccttgatcaccagcagtttgctccaagtgttaatagagatcagagcaagcaagtgatccagtgagatacgtattgtagggtggtctctgcacctgcagagaaatgggctagagtcatagctcctactctagcccctccccagttctgctcctagatacaaatctactcccatttccttatggtaaatgtcacatttatattattccttgattttgctgtcatggatatgatttcataattaatatcagctgtaacaccaagaatggacttaagagaatggaactaaaggacaatatgaggatctaggcatggtagcacccatctgtactcccagcacccagaaggcagaagcaggaggatagcgaatttgaggccagcaagggttataaagtgagactcttaccaaaaacaaaacaaaacaaagtaaaagtgagaaagaaggctgaatccactgaacctgtgagtgaatggaaggcggatggggaatggaagtgggtgaggtgccatcgcagtactgcgcataaataaatgggagcttggggagaggttgatgagaaagcctgcaggctagaattgttgaagtgcttcccagttccagccacagaataaatcacagggaagccggataaatcttaccaggacagaagggcccagagcactcacagagactctgagccccttctatcccaaagttgaatgttgccctttttaaaattcttacccttgctgccctttgtccatcaccacccatttctatttccacctaccactcccaactatatctttaagtcacactgagcattagtttaaaagggttgcagcaagagatgagtttcccacccaacatgtgcttcttgcctggctgggccttgacccacaactaataaggtccagaagacactgctttgactaaacaaacatgtaggaacctagacgcttctattagaacagggggactcattctagcaggaagtccaacttcacagcttcaaaccatctgtcaaacccataacaccaagggttcaaatgaatggaggaggaatattctcaaagactttttgggtgcttctgaagaaacaatgcacaccaagaactgtggttgaggcaaccctgacctttctggccctctcaagcaaattgacaaagcttcacttgtgacgtcgcggaggccagactcaggctggctggcgtgggatgccctcgcccgccccagaagcaagaggccacccgccccgggggaaagaggcggggccgggacctggcagaaactgggctgcactgctggagccaagagaggcagggcgcctccccgccttcgctgcggtgaccttccggtgttttcctggcggcttgccctccggctgtgcccgccacaggaggattgcgccaggtcccagcgcgaccacctccaggcgttggcactcccttcctcctctctcgcccctcctccgcctcttccgtttctctgggaaaggctgtatcctccttggggctctgcatcctcgcttaggtaatccgctttcctgctttcgccacccctccccggtgtccagcgtctccacctccgcgcatttgggtccccgcgagcctcgcgcgctccatcgcctctgcagagggcaggtgagtcggtctccggccgaaggctactggcctcggcgcctgggcctgcgaggtaccgggtcgctgcatcgaggcctctccggcctgcccgtgcccacccacacagagcccgaaccccgaaccgagaggctaagctcgcggatcacgccgcccccttagctctgcagaagccaccgaaagaaatccaatcgcccgcagagtagcttcttctgctcggttctttccattcctaccactagcctctaggttgaatgaggtgatctgagaatggtcagaagcagaggcccaggttccacgggtaggtggcgtagctgtcaagaagtaggggagcagtttgcctgagagatgcttctaacgtggatccacgttgactgtctctagagacccattggatgggtgtagactaaacagtccgggggtatattttttctacattttgaagtatggttttgtgagacatgtctaggcagtgggtgtggacagcatagaagggtgtcatctaaattatctaacctggctttggtaaaaatcatatggactgtcagacatgaggtgtgaaagaaaaatctagggaatacacgttaacaagcgcggtgtgtactttggagatttctgtccttaaaactaggaccggaacacgtggaagtttgcccactgtgtgagggtgttcgcgtcaaaaggactgcggcttgaggccgtgcggacaggactcttaatatatatgtatcccatgcagaatgaatctttctgttttgttttgttttgctttgcttttttggctccttgcccttaattcccagttttaatcagatggtaagacttaggtccacccacctggtaacaatctaaggaagaaaacaaccccagggactacttttggctgatggactagcaagatgacctcagtcaggcatctgaaagtacagaatgaaagggaaaatacaggcaacgggaaagccgattttaacccctgcacgtgcctgtttgctgttttcttaagaacttacatttaaaggacttttataatacttttgcagttaattcttagcaatgaagaagactgtgtaagacacataaagttacacttcagtttttgaatagactaagaactcttctttgcaagtttttgaactaagccaccacttgcaccttagactctcactctgtagtgtgaagttcattattgcacatttagattatacttgtacttggagtaattggagaaaaaattctaatttatttttagacacagaaggccaataaaaatacaagcaataaaggtaaatcgttatataggtatttcctcttttacttcgatcttgaataataattagaaaaatgatgctttattctatttcatgttacaccaaaactgcctaaaagataaataagtaatcaattaaaaacaaacatcttccattttaaagagtggcacagatgtggactttccccaggtgggagtcttgtataaatgtcttccttaaaatacttagggtgtcctaagaagctcagaatgactcaatgttgggcttttgtctgggttagtttggaaataaaagtgttgcttcctgtttctcacaattagtatggagttgtgtttcctaaacgtagctgtttactaacaatggaagataatagtagaaggctagacagaggtggggaggggcatggctcactgaagaagtagtccctgtctcaagaacccatacaaaaggtgggtaggcctagccttcatctagcactaccagcattcgggaggcagaggtggattcttaggacaggctgactagctagggtagctgtagtgagctccagcttcagtgagagaccctgctacaataaataaatggagacaccaaacttcagctttgggcttccaaatgcatgcacacaggcatctacaaacactggaccatgcatgcatgcactcgcacatataccacaaccacctacacaaaaagatacttggttgcaacttggtcgcagtgtttagctacaaagttagggtctcaggtgtcccagactggactcaaaccctgggaggcagagggtggccttgagcttgagtttcctgtttccccctctccagtgctggcattacaggcgagtgccaccacactaggtgattgtgcaaggttggggacggatcccagggccccaggcatgtttggaatccaccttactgactgagctccctccataccccacaacttagtactttacaagtcataatttcaaaaatacaattaaaatagacagcgatggtaactttttaaaagcataagcaatgacaaatacctaggcagtcctgaaatctgcaggtgagagtgcactgttgccaaactgtgaatagctgtgaatcattcaggattcatctatataaaaggttctttaataaaactgaggttttatttatataatatttatttatgtaatattgcccatttaagaaatctacatatcttattattctggtgattgttgtaagtgtatgcttgtaaacatattttggtgatttcatttccatcatgatatgcacaatgttaatcgagtcttttcatattattaagtttttccatgagtggattttaaaaaagatagtcttatgtagtccaggctgcctcaaataggcagctggggttggtcttgaactgattctccttcttttgtcttctttcctccccagagtcctagggtcataggaatgtcctgattactgaatcttttattgttgctgttgtgtatgtgtggtatatttgtatgtaaatgttccagtgtgtgtgcacacatgtatgctcattcatggaaaccagaggttgacttcaggtcatcttcaactattctccaacttcatttttgagacagggcctcactgaacctgagttccccaattcagtgacgcttgctacagatcccaggagctctctgctcccgtccccgggttggaattacaggcgtgcccagctttttatgtgtgtgccaggaattggaatccagctcctcatgcttgcacaacagacatgttactgaaggagccatcttcctgacctccttattaatgcataattaataaatgcatctttaatttacaatgaccagtagtccataggaaaccattgccccgatattatcacatagtagatgtatgttacctctttctgatgaaagaagaaagtcagcaaatcagcatgcagtttcaaataatttatctatagcttttgctgaaatgacttacaaacctgtccaaaaacaacctatatttgaccataaaaatagccatttatataaaaacaaataacatagaattaaaaatattcattaaggttgattatcacaatggggaatgtattcgaatttattttcctttccatttctccttccttccctccttccttccttccttccttccttccttccttccttccttccttcctccattgttagaaagggaggttaattgcatgatggttttaaccttaagcgactaaattcttttttctgttttttggatttagggcttttctatgtagctctggttgtcctggaactcgctgtgtagaccatgctagcctccaactcagagatccacttgcctctgctcccaagtgctggggttaaaggtgagcgccactatgccaggcttacagctgaatactttaaatctcttaaattaattatctaagtttaaactaatttagctaactttaccagtgctatttaaatgtatgtgacaatgctaagcttcccattggtataaataaccagtggagaaaactaaaatgaccaaatcttaattttgcttcaggaaaacataatttggtaaatggtgatgccctggcttttcttattagcagcttacctttttttatgtgtttggtgttgcatttgatcacactgggcatcccaagattgtattatttaccggaaaaacctgtttttagttgtagtgtcgctcagccttagcacacacctttaatccaagagttttcagcttgaatattgtaaacaggattaaataaaagcatctaaagttggtgaagaggcagagcaggcaactagatgacagggtgtgagcacaggattactaagaaaaatccatagtgagtaagaaggggtcaggaggatggatagagagacacacaggaattagaaggcaggggcatgcagtttgaaaaaggtttttgtggtggtgtgagaaaaggcattccttctgggacatctgctgaggaaggtcagctgggtgcttcctcttcctctctaagctagcagactttccaccccagcatctggctcccaagtcttcattggtaaaatcgaatgattgagatttttattagaaaatgacctacgaatatttacaccccctcctctctctgtctgtctgtctgtctctctctctctgtgtatgtgtttgagagagagagagagagagagagagaatgtgtgtgtgtgtgtgtgtgtgtgtgtgtgtgtgtgtgttcatcaattcatgtctggtgctcagggaggctacagagtgtcagagcccctgcaaatggagttacaaacagttgtgagtcacatggatgcctcaaatcaacctctagaagaccatcccgtgctcttagctgatgctctgtctctccaggctagctcctagagccctgtagcagtcttttcaatgaggagttgaactaccaaacttcagaacttacctctactcaactccttagaatttacaggacttgtgtacaacctcagtttgtattaggaatgagtagaagtctgttttagagatatgagtgatagctaagaggtggtggtggtgtacacctttaatcccagcacttgggaggcagagacaggcagatccagcctggtctacagagtgaggttcaggacagacagtgttacatagaggaaaccctgtcttgaaaaaaaaaaaaacaaatgaaaaaaggagatatgagtgattataagcctcattaatagaaaatgggggaaataaaaataagaataagatcagggagataaatattaagcagtttatggttaaaattagcaggaatgcaagagtactctgtggttttaataagccaggcatattgtttagtgctctgatctttttaaactaatgatgttataaatactcttttatcagttcctttactgataattcaatggaatttcatgttgctctcttccatatcttgaaacagctgtttaagtgagcacctggttctgggtagtgggaacaaagatggtgggttctgtcctgctaggcctggcaacagcactttggagcctatgatctgtaactacctgcagcttttgggatgggtgttttaggtcaagttatttatttctacagaaagaaatcatcaccatcaccatcatctagggaactctttgaagcattccttcagcttatggcttctaatagttctaaggttcgaataatgaatactcctttccaggttcagttttggtgtaagaaaatcccttcaaacatgtctaacagagtgaaaatcagccactgctgacaactccttcagtgtatcttggggagatgagagtgtgtatcctgtttagaaggcatttgaaagcttcggagtgaggagtatgtgcccagaaggtgccctagtaaagccctttctgccctctttttatctttttatctttttagtaacctgttcactcataattaaatccgggagtataacacagggcctattaaaaatcagtgtaattgctgtgcaaaatcaacactgagacctacaacaaagttctttgtttaacacacacatacacatacaacacacacacacatacaacacacacacaaagaacattgttaaacaaagaatacacacacatacacacacacacacacacacacacacacacacatatatatatatatatatatatatatgtatatatgggcaaggtcttactgtgttaacatggctggactcaaactcacaaagatctgcctgcctctgcatctttagtgctgagattaaatgtgtgtactactatgcccagcctccctacatatttaaactcttatcccaactactttttaaaaaaattcaaccaacaaatattccttataccttcataggtaggtaacaaatgtcaaacacatttgagacaggcatgtctgtggccaagtagttttgttttagagggggtatcatttcagccattttctcagatacatttttggcgccatgaacatccacaacattgtgtagccatcagcactgcccatctgcagaaccagaactcattaaacactagtcctccatcattctttcctcctagcctttgttgctatgagcatgactagtataggtacttcatttagatggaatacttgtacattagggtgggcttatctaacagcatagaaccttcaaggctcattgcatcaagctttggatttcattccctcttaaggctgagtgataactctcctacctcttttacacaaaaagtaactgtaaagatcaaggaagttttgaattggaacagactatggccatcatcctttccaatcagcttctttgatattttccttttttatatttacaaaataaagccaacaaatcctctatagtgtaagtcatatgatcatgtgcttcggactagactcagtgagtccctcaaccctcagggaaccaggattttggtaatcaggtggacaaggagttggtgggatgacaagcagatatggacaccagagacagtgctgtatctgaatgtaatttctcaaagcgagcatcagattataatacagaagagaataaggaagttaggtgacacatcagccaaggtacattgaggttaccggatgcttaatgactctttacacaaaacagaggaatgcaaacacaaagactggcaggaatgaggcaatataacaactgagacaaagtcagctttatctaaggtcagctatattcttagaagccaggtgtgaggtctttacactcctggggcaagggctttcacgctcaagccatagttttaattagggagttccgctctagccacacttctcatgaataatgcaatactgtagttcctccttaaaccacagcccaaacttcttcctaaaccattgtaaattcctgtttatgggagtgacttggctgttattctaagtgattttgtggggggctttcttctattaagtaatgtagtcttccatacataactataataagaattctaaacttacgttgctaagcttgccctgagatttctaactctatgtagtagatagtaatgcctgatttctttcactgtctctcttacaatactagaggcaattatgaatgttactgaataagcaacattcttactgaattccaagcccagggttggctcaaggactgcctaggacattggtgaaggccaggaagcaaagttcaattttgcttaggtatttgacaaatcattgcttggaggcacctataataaagcaatactgaaagaaagcacacagatccattcaccgactaatgcaaggacaggtttggagcattcgtgctatgggatgccaaggctccaggagaccaagtttccgagaagctttttgcctcaggactgtggccaagcttttgggcttgccacgaaggcttcaatgcagtgggtgtggcagtcatgggcatacagtcatcaagaggtaaagcagagcagggtaatgtagtagaatatctccctagggaaccatggtcctcactccagagctgtaaatgccttctaaacaggatgtacattctatcttcccaagacgcatgctaggatttgatgtgttgactagaagcctcttcctgtgggctacactgggtctttttctacaacacacttgatgatctatgttgacagtaagaacaattgttaaatgagttggttcttccagtcagtgttgggagagttcagaaggacttgggtagcttcaacttgacactcctgagaagagggaagctcagctgtggaattgccaccatcagattatctagtaggcaagttcgtgggacatttttactaattgctagtagatgtaggaagaccccaccccagtgagtggtactatacctgggcaggtggtttatggctgtagaaggaaggtagctgagcaagccagaaacagcaagtcagtgagcagcttttctccatggtctctgctttagtttctgcctcctagttctgccttaagttcttactctggtttgcctgcatgatggtagattgtaatctggaataagccctttcttcctcgagttgcttttggtcgacatttcaaggcattcatagagaagcaaactagggcaaacatctaaatgtggccaacaacaatcaaaactataagtcaggcttatgcttctagcacttgggaggttgttgaggcagagggatctcatgagaccagactgagctgtatagtgaagccctgttggtggcaaaggtgagaggagagaggaacagaggctaacatagacctttagcttcttcagaactacagtgagttagactaacctgtttttataagtgccaggtgtgctatcaccattcgagagttaggagaaaagggaaatactagtgtgaaacacattcacatctataatcccttttgtttgcttttgatgcaggccatcgctacatagcccaggctggccttgacctacagatctcctgctccagtctccaagtgcctaacagctcctggctaatgctgataaaatccaagtatgctaaacaccaaggcaagggcgaagtctgtactgataaaaccaagggaaattcatcagtcagcacttattgaacacctcggagtatgccctgagagttgttagaaatcacgtgtgttttcagtatcttgccaaacagaacacggatagttaacaaatgtatcatgtatttggaatctaggttagagatatagcacactcctgttctgctcattccaggaccagagctgaaggattcagaaattgctctgctggaggctcttttctttccacacatgtagtaaacacacacacatacacacacaatgacacacaaacacacatgcatggctgccttctttaatggcagaatgctttgtgagcagcctctgtgtcgttgcctgttgtaggcattgatcgccactgctgtgtgaatgctatgttcttggcttcattttattattggtggatatttgagttattgccagtgttagctcactggaagaagagtgctcgtgaatactcttgaacacatattttaatgtatgtgtgcatatattatttgttatatgcgaacaaaggaaattgctggattaaggattatgtttacattcaacaaagcagagtgagtttccaggaagtagcactagcaccattcatgctaccacctcttaagagttcattgctccattccttcagggagatgcagacttttccatctttttaatgccagtctccctggacatgtgttaatgctgagatttactggaaaaaaaccaattacaccatattagaccaaaattaaagcaagagttattaaatattaaatactgactaagacatggattttggtaaggacattccctagaatttcccagctgaatggccctgagacatgtgtcccaggggtttataaagattatcctataggcaaccatactcccctgcatagcttgtttttttcccaagaacctacaacttccagaattccaggaagttacctggtcctcgggcaggtgggacttacaggttgattttgggaattccacatgtaatgatagcctggtgaggttgtaggtgcatgtctaccttccttccaggtagtttctcacctggttattgagcatgtgttgtcagaaatgcgctatcttttatgaggtgcttatttaagtttcttgcccttgaacaaattccaagagtagtagacacataaaggggtagagaaagagagaggagagcctgtgaaccagggagaatggcatatgaaagtgtgcagtgtgcccagagcacagagacagtgtcatagagagaccatccaggtcacagaacaggcagtgctcctggctcttgataaagtccaaccaggaaaagacattttagcttccagaagctttaaaggattgtaagtctctggtgatgcttgtggttgcatttcttctggcccaggtggccaggtgagcacttgagcatctccacgagcaccagcccagttactgttaacaacctggacacaagattgtaccctggttgcctggcttctgttcccctgacccctttttaattttttcttaaatatttatttttgtgtagcaatgttttgcttgcatatatatgtgtgggcactaaatgcatgcctgtggaggtcagaggagagtatctgattgcttggaactggatgtatggatgtttggttgtaagacacccatgtgagtgctgggaattgaacccaggccctcttaatccttaagccatcactggccctgtccctttccctttttttcaagacagcctctaatcattaagcctcagagatagcaaaagtgcagagtctatccccctctcccccaaatagcagagtggagctgagcagagccttagccacaccttggcattctctatgctagagggactcctggatagctgcattcccttgagagagatgataacaagcactcttttataaaacacccaggtactctatgggccccaaaccgttcctccttctgccatagctgtctattgagctgggcatctgtatagccagttgagatcaccattgcttgggaggtagttaaaagagtgactaggatgtcgagttgtgtggggttgggatgcagtcggtgtataaggggcatagacacggcctctgtagactcagattatgtcagaaggaggggatgacaacagagacaccgtgaactattcagccgtttgtgagggccctcatagagatgaagtcttgtgcttctctcactgtggacaacaaagacgcatggccagcttctggcagagccagggtcttctcatgagaacagatgcctgggccctagaatcctcaaagagtctcctaacaaaacatgcccttcatagaaaagtatctctcccaggccaccctcagatgatttgagatgaggccagagtctccacatggcatccaggagctagagtttctacccataactcagaaactgaagtgagcagatctggccttcataaaggactttattctaggtttttcaaagcattataaatagttcccaggctctgggatttaatgaactagtaaattctaagtgaatgtttcagtgacccacataactcgcctgcctcgtactttctcaaggaagaacataggactgtggtgtctgggagcttggacttaatagagctgccatttagtacctactgtgtgcaggtagtctgagctagggcctttccagctacctcatttcatcttcagacatcactgcgaggtaagctttatccttcaattgcaggtgaggagaggctcagagaggctgaggaaactatcagatgcagctgaaccgtgtttagaattcaggtcagtttgattgcaaagcttgttgtgcctttcacattatattgctcattgcctcttaagtttgtgtaaagtattctgataattttatttttcttttcacacgggggatcaaactcagagttcataccttctaggcaagtactctaatgctatgctacatccctaggcccagatctgattttaaacttctgaatttgttatcttttgagatagggttttatgtagcataggttggccttgaattcaccttaagctttcccataatcattctattactacctcctgaatgccgggaccacaggcaagcctacagccaggtctgacttgcctgcaaagttttaatgagacaagagaataggtagaaattgaacatgagtcttgtctttgtaagtaaggctttttgttttggttttttttagggggtgggttgtatttgtgtgtgtgtgtgtgtgtgtgtgtgtgtgtgtgtgtgtgtgtgtgtgtgtacagctgcaggagcatgggaaatcaaaggacaactttgggtgttttcagttactctctgccttaccctttgagacagggtctttcagtgaaccttgacctctctgtttccacttatctgcctgaccagtgagttccaggaattcacctgtctctcctgcctctctcctacaagctagggttacaggcatgcaccatcatgatcggctctctgaatgctgaggatcaaaattcagctctttctggttatgtggcaagcactttacagactgagccagcccagtccccactctggtttgtttgcttgttttttttttttgttgtttttttttgttttttgttttttttttttgagttttgtttttgactgacctacttcattatttttttcaggtttttttttccaactagacttgaaaatttccccaaagccagagattctaattctgacattgtgacataattttatgtctgtatatgcttttatgtattggcatttgtgtgttgtatgtgaagaatgaagcttctccaagcctttttcgctgagccatgacttggtagatcattatagaacaaggcttgtaataaagatgttctcactgtgtccctagtggactggcctctaggggctggctgctagaatagaatagcagccaactggaaattttagctcatagaaataaacttcttgaccacacaaatgaagaagaaaaggtatcccatttttactactatctggccagaaagcaaaggacagaggggtgggttgtgttggcctctcccaggagaggtgctaagaatgggcctgggctcctctaaaactggaatattgaagtcctgatgccaatacctcagactgtgactgtgtagtctagcgcttttacccacccttctgcccctggcttcaatcaaccctgagtgggaaacatttgacgaatgtatgtatgggttgaacacacacaactgcttccctgtcattatttcctaaatacggttggacacctatttatttacagtgagctagattttgttagtaatccagagattgccacagactaacctctattgggtctccgatctgtagagaatgggtttctggttgcaggtgagcaagggtcggtgagaattgacagacacggactcaagagagagctgaatctgaatgtaaactgtcaaattaagtatcaaaactttttatacaaaagaaaatagggaagttaggtgacacatcggcaaggtacaatgaggataccggatgcttaatgactctaacacaaaacagaggaatgcatacacagactggcaggaactgggcaataaaacaactgagacaaagtcagctctatctaaggtcagctatagtcttagaagccaggtgtgaggcctttacactcccgggggcaaggactttctcaagtcgtggttctaattagggagctccactctagctaaccttctcatgaagaatgcaatgctgtaaaaccatagcccaatctacttcctaaaccattgtaaattcctgtatatgggagtgacttggcttttattctaagtgatagtgtgtgtgtgggggggggctattttactaataagtaatgtagtctgccatacataactataataagaattctaaacttactttgctaagcttgccctgagatttctaacgctatatagtagatagtaatgcctgatttctttcactatctctcttacaatactagaggcaattatgaatgttactgaataggcaacattcttactgaattccaagcccatggtcagctcaaggactactagggcactggtgaaggccaggaagcaaagttcaattttgcttaggtatttgacaagtcattgcttggagattcctataataaaacaatactgaaagaaagcagacagacccatactctgactgatgcaaggacaaaattggagcatacatgctatgggatgccacagttccaggagactaagtttctgtgaacttttcgcctcaggactgcatccaggcttttgacctgtcatgcatgtcactactggagtggatgtagcaagagatgatttaaagtgtcaggggatgtgcctaagttctatgcaaatattgagccatcttacacgaagacctgagcacacatgtattttggtgtctgtggaaagtcaagtctctaagaacactgagaaatgactgtttggaggaaggagctctctagaggtggcatgaggtcacatgggtgggtcctagttcagtctgactaagtcattataagaagagggagacatgtcagagtcgaatgcccacaaaggagaggccagctgaggacacagaggatggtgaggaaacacatttctgacctggaggccacccagtctttaacagcaaattgaatacaagaagaattagggatttgtcacgatggaagcctctgtctatgcgcaccaccattaccatgcagttggtttagagggacatcactgtacagtaaacaggtccctagtaaggcacttgacagtgagaacaatcagctgaggaaagggctttcctgagagtaagagggaaaccaactgccattagtgacaaactgagctcaaggctagcttgagctacaaggtgagtcactcacaaaaatccaaaagccaggagtgtagcttggtatagagtatttatcaggcatgcttatgcctttactctaataacacaagtgcatacacgtgcatatgtacacgtgtacacacacacacctacacacctactaaaaataaaagcaannnnnnnnnnnnnnnnnnnncaacaaacttgcctaaccctgaatgtgagtcatcttccctgtaaggtttcactaaggctcctaccaacagaggctgtatagagtgagtaaggcaaataaattacatttgcgttttaaagttatttgaaagataatttccatagaaacctgaagaaatttgtgccagtgttgcccccaattcttttcatatacaactcgtcgcaagaattccaggtatgggttaaatgcccaaggctattttcttacttgcttgaatgaacttaagataaatgggcagagataaaaatggagtttacagaaacccttaagggtgagtttgggagaagaaatgagctttcctcccagcaagtagtaggtcaaccatctaattagaaagttgtacacggagacaaagaacttgctatgttatcccagctggccgaaaactacccacctgctttcatctttcccaagcaaggactacagacttggagcactacagacatggagcactacagacgtggagcactacagacttggagcactgctggaaattcagaaagttctgtatgtaggttgttttctggagacctggggccccagagaaaggaagtgagctggagaagtgccgtgttggttatgctggctggagaaagtctcaactgaaactggacaaggaacttggagtctgacaaaatgtgacagtggtatcctgggccagaagaaaaagagggtacagttgacacagcagggtgactcaggacctgaaaactcagaagtggaactatgaacgtctagagcccagacctctggagcatcagtgtgcagctcacagctgagcattctcgcctcgtggcccaggttcctatacctgctacatcctgtacttgtaatatccgctcaggcagggaaatgaccattactaggagaagtcaggaccaaagtgggggaactctgggttccctggggtggctgggtggaaacttacccagtattttcttacccgaagcttacagtattttttcagattaaaaaaaaaaaaagatggggggagggataaagattagatttaatgctgttgaatgtgataacttgctcaagtccggagtgtattcctttgtgtcaccatgcttcttccaaatgagaaggaacttacattatatacccttggttcattggctctttgctcttacaataatgcagaatgtttgctaataaatcaagttatggtcaccacctttctactcttgtggctcatgtgctacagtgagactatgcatgcatctctgtgttgttctatgacatcatttgtggctagtatttatataatggatgcagtaaattatttctgagttcaagtggcttggctctatgaatgccacttttcttaatgtataggtccagaacaaagtacatgaatcttctaacaggtttgaatctgaaataaagaataaagggcttttaaggagccctgtttgcttgaattcttctatattatctagtagatctgacaacgtgagagcgaacctgccccaaaagcaaaacaaaacatgtttatttaacatctttgctactttaaataattttaatctaccttgtatgaagatattttaactcttattttcttaccagagattagggaaagacttaaggttactgactgaggaaagagggccctgggtgggatttggtacagttatgacagcagctccctggaagcctgtgtgtttccagtgtcagggagttagcacctgtctactactgccttccagagacgaccactggcagtaaagcaactgcagttgtgacaagggacatctctccgtgttggtcatctttcctttatttctgttgaggaacatatttcctcaggaagaaaaaaaaattgttttttgaacagacttaagacaagcaggctctaacagtttgccacacccccacatcagtgttttcacagctgagtggttcccagcctcaagcttcttttcatagaggaaactgttgtgataataaagaaacctgatgtggggtgtgtgggggcagttctgagccccatgttttagtcttgtgtaaccttttttagaagttgctcaaccctctaagcttccgtttccaaactgtatgtcacacagggcagggtaatctcacgacagaggaagcagaacgactcaggctttgaacaggaagaggaccacagaagcattttgaggcagcaccagtagataggagccaggtgtggtgcacacacctttagccctagcatttgggaggcagacgcagacgaatcttttgagttccaggctaccctggtctacagaatgagttccaggacagccaggtctagaaagaaagaaagaaagagagagagagagagagagggagagagagagagagagaagaaataaagaatagaaataatgatgtaggcatactacatggttcttagaagacagaacttctcaagtccaacaaggtgtaagtccccttgctttggtgtgtaggctgctacttggtggcagatggaatatgtccctggaatgtttgagtggagttggctgtgagctgctttatagtgcttgcccaagaccggcctcagagtctggaagacacaatgcctgctgctcatccacttagcacatggatctggcagcatgattgtcatccctcaccattctcacagagaagagaattacgtcaatgtaattgagataaagctgtgtcatgattaaggaccttgtagcaatctgcctttcctcggacgtcgtgacactctgtcttgctatggccctgtaacataaattctaattcaaggctttttctttttctttcactgaacattcagtttctttaagagtgtaattggtttacaagacttttgagaaatacgtttgtttcaatctttagattgtaactgcagtcttgcacgctgaaaatgtgcggtgactcactagcaggtcagcttccctgacaggttgctgccagctatgtgttagtgggagagacgccctgacatcatccctgaactgctttctctttcatattcttgtgttcttgcagctgtgagccagagggtgggtgaggctgagaaagaagcaggctttagaaatgtcagacatcctcctggagctgctctgtgtctccgagaaggctgctaacatcgccagggcgtgcaggcagcaggagaccctcttccagctgctcattgaggagaagaaaggtgcagagaagaacaagaagtttgctgcagatttcaagaccctggcggatgtgctggtgcaggaagttataaaacagaacatggaaaacaaggtaagaggtcaggccacggtggctgcaggacacctgcctccgtgcttcctctggttccctcagaataaacagcaggccttttactgactcttatgttctcttaggtccaaacaaacaccttgcagccttgccttatttttattacagtattaaaatggtctttgcaggaaatcattgaagtatagaaaagcaaacaggatgagagtgctcagattcctaacctgagtatatggtattgaccctcttacttattgatgggtttcttgttaataaataatatatgctctctgcaccagagcacactgagctacatgctcccgagggccactgacgcttccttctgtgtgtccacgctctgacccacttatttcagagcagtgtttggcttctcagctaaaccatttatctaatgttttgctttggttatgggcttggaattaggcgaactctccctttattctactataaaaatatggtcatgacaaacactgattgtgattctatgtgtggaaatggctagaaaaagccaggcttcttgagtcgtagcagtaacaccagcaagcagtgctcactgaggctgcatggacttgactttgttacccctataagaattctgtaaggttagagccattgttctactgggatgaagctgtcacagagagctggagtaagttgcctgaattgacgctgcccagcatgacagcttgagttcttcaacataggaaatggtttctaagtctgtgtcactgggcattctgtcgtcttttatataactcgccccaccttcttttttttttttttaaatttgggaggatggaactttatgatagaaaataatataaaacacttcaatatctttattgaactttttaaacctgaggactactgtagaattcagtaaaatcttgaccaccagtgtgagaagagaatacatgaattatacaaaatctccatagactatatattttttcatgccctttactacctggctttggtgagctaaatgaaggaagcttgttttctgttgttaccagtggagacccttggatacaaaggcgggttgggcaactggactggatatatgtcaacattttatgggttgatatgtgcctctaaacaatagaacaagcccaggcaattgttcatgaagtaatgccagaatttattaaacaaatactttccatttgagctgctttagatacttctatttcaggccccctctgtctgcattcctctgaatagctctgtaagcaggtgtgggggctggggaactgacagattgccagctcttgtaggcctgttctcttctgcaaaagagaaaaaagagtagcaggcggtgtggccattggtggtttgaccctctgggatgggcaagtttaaggctgtcaagcaactccttccccaaaccagcaacatctcagtcagcagtatttgggggcgggggtggggtggggggagtcttctcagggtcaggaatgaactgtgtttatctgagcatgacacagagatgagacaaaagcctcatttggtcccctgttcactctgtgttgatgcttaggtcacaggttactacagtatttctcttcttttttcttcttgttctcttttctgtcatcttctagcctgaaaggtaatgacattcctgacaggtgcagagatgcaactgaaaatggaaataaaacctaagacctaataattccaataataataattctaattaatattaatataattctaaaacctaataattccagcctcttctctccatctttagattattttaggaactggagagatggcttagtggttaagagcactggctgctcttccagagaacccgagttagattctaagcacccacgtgacattattataatcatctaatgggatccaatgccctcttctggtgtgacatacatgcagacaaagtacccaaaggacatcaggaagccaggactcagccgctttcctggcaaaggagcagaaaaatattagaaaactaaacacagaatcaagctgacttagttccatgttcaagttgacttctgcaatgggtgtttttgagtttcagatctaactctgcttatggaactaactctcttaggacctgattgtggaggggtggggggctttgatgttatttattttttgtttttgtttttgtcaaactctgactcattcagtttccaggcttggggaaaaaagtttttggagaagaatccaatgagtttacaaatgatttgggtaagtataagaatcttactgtgttatgtagtaattatcatattattccaatctctaactcagaccataacataagttaatgctaggaagcttttgggacaaagagcataacatgcttaagtacggagctttatttagactctacctcagaataccatgacatttaagttagagagaagcaaggtggtttcttggaataattcagcaacccatgaatcattctaaatttaaatgtgtagcatcttagtaagtgtgacttagcctttaggaaaattctatagccttttgacaatctaatgtgtccattggtgccccagaaagatgttcatctacatgattgagaagatattgtctgggtggaatttaagtccatttggggtcccctggactctacagctcttgactgagtgtagcagatacctcagtcctggattaatgcatggtgttgctccagtcgcccctgcacttcatctcagaaccttggtaaatgtacttggctttaccagaaggttcctttcatacaagtttttaattttatttttctgttgttctgtttgatgtgacccccctgctgtgttttccaggcttgtagcagagactgcaggcatgaactgcccacttggcttctagcaagtttttagtatacatttctatgactctcagaagacagaaatcttatttaaacttctaaaagttacaaataagtattgtgattaattcaaaatacatttaatttgcaatcctacatctgactataaacagttaaatgcttcatttgtctagaactaaagaggcaaaaaacattccattttcattttcctgtttgtaaaaggacagagaaactgggagagagggctgagtctgtggtgcctgctggcactacagtggggcttcccgctaagtgtgatggagacagctggccaagctcaagcatatgatatactcatttgactggcccatgattttcagtaagctggaagcaccactaagtgtgtggcagttagctccccattttaacagcctaacaaaacacaaatgtaagtatatttcagtgactgatagctcagtcactgctgtgggctggagaggcagctttgtggttgatccctgctcggcattcctgaagagcctgctctcaaaccccagcacccccaaaacaggcaaaacatgaggagttattactgtgatcaattgattcccactgagccctaagctgtgctgagcctatcagatcttagactttcctgaaagttcagtacatccaggtggtgcctggagcatttccaaagagctcgcaggtgctgctggttggagctgttggggtaggtgggagtgtggatctgtaacccctttcccaccttttctttaagaggtctcactaggtagcacagcctgccttgaacacaagcaagccttcctctgagtactgggattacaggagtgtccaaccatattcaactcagctgtcacttttcactattaaatctggtataccttttacttctgtggagacagggtcttgtgtggcccaaactgactttctaatttctgtgtcaccaaggctggatctaaaatcctaatcttctgacatccacctacaacgtgctggggttttaggtattgctaccatgtccagctaactttacctattttcccagcctcctctttcttttctcccaggaggttggcaaccagactcatcaggggcccaaagtgcatattttaagagctgccaatgcagggcctcttttctctgtttccattggagaggtggccagctaacacctggcttccagctgccgtcacagaggggagtttttgtgtcattttgatccactaagttttattgcattcaaaattactatgtttcatctgatattacggaacataagcaatatttttgttacaagcagtattacagaaggaagtagaagcatttctgtatgtggatacaatctacctgttcttttcagtagcattctgaaatgggcaaagcaacctacacgcttgaaaagtcacatcaaagctaagtaacagagcaatcatcaaaggctgaagaaagccacgtggtctgtgctgccccttaaatagaatgcagaactttgtccatgtagacatttctctgggcagcaggcttagtcctggaacctagcctctctgcggagttgaagagtgtggtgccactagcacccacagctttgtaaagtatggctggtgatctggcagttggcaaggtttcagaaccattgctgtggcacctaactgatgagttcagctcagctgcccaaccctctccgtgctcgatgccgcctgctgttccttctcccagactgcctgggaagcagtggctccagtttgtctttattccaggggaaaagatcacagtggagctgcagtccacggaggaggagacggcagagcttctcagcaaggtccttaacggcaacatgccggcatcggaagcgctggctcaggtggttcatgaggacgtggacttaactgatcccacgctggagtccctggacatcagcatccctcacgagagtcttgggatttgggtggatcccattggtaagtgtagagccgctccatgtgcgtttcctcattcgttctagcccatagtgttcttcttagggggtcaaggcagctctaagaaatagagactgtcagaacaccagatctcctggaagaattttagttttggttttgttttttattatttcatacatgtatacagtgaaatgtcttcatacccccaacacttcctagacctccccaacatgttcccctcctaatatcatgtctttatttttattttagaaactcactaagtctaattactgctgcccaactaggtacctaagtgtggggatatccactgtcatgtgggagcaacccttccccaaaaaaatacttttcccccatctagtagccagctgccaacagctcctcatgagcccctcccatgtgctggaaatttggctagcttcatcccatgagcacttacatcagtggtcactgctgccgtgaggttatgggtgccttagtcatgccatggctaagagaagttgctttatttcttttctttatttttattttacgtgtatgaaaaatggccaaaaatactcatatactatgtgtgtgcaatgactgtggaggccagaagagggcatcagataccctgggactggagttacacatagttgtgagccatacacacacacacacacacacacacacacacacacacacacacgcacacacacacacacacatacacagtgtgaactgactaatctgtaaatgacttcagactggccaatcagtgagactgtgaatggcagcagtgtgattcagctttctgccatacgtgagtacagggtagatcttcagatttcaaaacactaaacccaaacctgactttaaatcattggccactcattcagttaggcaacagtcaaaactcaaggacaagccaaacagctaaacgtgtcttggacgacttgtaagccaatataaaccttattaaattcttgtccttttatggtagaattgtaattataatgtgttgctttttaaatgtagcccctttcctcaatggcactatcaaggtcctaggagcaaagtctcctcactttgctatctctctggtaaattctgcttcacacattggaagtcctcattatactgagccagacaactgtgttagcacctatcctgcatgcgaattgacacaacacagtataacaacagatagctgcataaccttcagccagcatattctatatgaacactaagaattttcccccaaatctctggtcatgaaagggtaaattgctatctattataattctgagggacggtgattttctgtatcctacttctaccctggagagatgtttgttggtttgctgggtcattggccagacacatctttcactgtgtgctagttcatgggatggcaaagtaccaatagaatgaataaatactacaaagcagatttatttgattggtagggactgagtagtccagcaatggctgtcatactctggagaggctggtagctgctcagtctacaatgctggatacctcaatagtccaactctgacactaagagtctggagaattcccagaaaccactggactttagaccctgatggcagcccagagaagcttagattctgaccttagtgaaggatgccaccaccaccaccagcagcagcagcagcagcagcagcagcaaggaggaaggcagacaggcaaaaccagccctgtttttccttagacctctttacagctaggctactggcaggtgccactccctctgtgggaagattgtacccaccttcaaataatgattccagctaatatctccacagacacatgcctcttagttgatcccagatctagtcaacttgacaaccaagatcagccctcacaagcactgttaacttcttctctgctatgctgacttcattatcccctttcttgcatcttggggaggcaaatgataacaacaataataggccatctcaggtctgatgaactcctagaaggctcctgttcacagggcacatctgggtcagacttgtagactcattcctttcccacctcactggaagctcactgattccgtcagactggctgtccagcaaaccccgggggtccttttgcctctgcatcctccacactgggatttttaagagtgatgtactttgccccgcatcttacacaggtgctgcaaatccaaacttaagtcctcacactgctaaagcaagcactttatccactgagtcacctccccagccctgactgcccttgaggaattgtgatgtgcaaggtgctatgctaggtcccataggattgtaaccgtgtcctcagcttcaagaggcagagggataaagatctccagttaaagactagcctgtgctccctagaaatcctacttcaacccaattaagacaatttttaaagtcctcatacactcagagtgaagcatactgcagcacaagcaacttaagcatgagtgttcaaatgtttcagtgcaggcagtgcccagaggtgagatctgattggttactaaattagaagggaacttacacagggcaaagctcctagagagtcgccactacttctaaacaaactgtccatttgcttcttctttttttttttttccagattcaacctatcagtatattaaaggttctgccaatgttaaatccaaccaaggaattttccccagcggacttcagtgtgtaaccattttaattggcgtgtatgacctacagacaggcctgcccctaatgggagtcatcaatcagccttttgcgtcccaaaacctaactactttaaggtaaaaataaaaaaatggacgttttcagtcttgatcatctagcctttgctttgctttcagtcttgatcatcaagctttgcttgttagggttgtcgctgtacatggcattcccatgcgtggattctgtggggtgtgcccactgtgagtccacagggctggattaaaaaatgccttctatcttcagtcccagagttggcatagttttattagggtttaagtacacactgatactctaagagaaattaatactgccttggagaaatcatagctttgcatctgagatacagcaattctattcctgtttctagaattcactcaaaaccacacaaacagattaatgctacacagtgtcttcagatacacagagacagggtagataccaccgctgtgttgccagatgaatttctgtgttaggatagaagaattacagaacaacctgtgcagaatgttcagtgggatgattggcagacatggccaggatcaactccatctccttctaaatactgccagggtcagctttcttcctcctgatagctccctgccttaccattgattccatcacagcctggagaatggccaggaggctctgtgccgaagcaccgactccagagcacagcgagtttgaacagaggcggtatcttttgctctccattagaaaaaacttgcagtctctgtcacataggactgtctgctctaatgaatcttcagcttacttcagagaaagatggagctaaagtttaagcctctggagtttattctggttttcttcagaccaagtatgttttggtagttttttaaaaggtcattaaaactgggcatggagatacacacctgtaagcccagcactccagagactgatactccagagtcaggacttcagtgggtcacagattcagggaagagaccctggctttgaatgcagcttccaccacttaaggatcctggtggccttagcaagtgatttcctttccccgcccctagcctctcatctgtagattgagtacctgactcagaggagaaatagattaaacaaagttgctatctattgttgccaaaaataacaacgtgagtccattcttcgagtcaaaagccaaagtgattcagaataaaaacgaataagccaatgacgggaggcctgcaagggaaactgagggacttataagactcagatgttcatctctttctctcggagactttaaatgacagaagcagtactgagctttgccattgttgttagaggccagaaaccgcatccgtactttactgctatcccagctagatatgagagtgctctaaaatgttagtgcccctctctcactatcacaggccgctctgtgcttacacggcactcttagagttaattagtagctcgaagttcgtttataggctcaggagcattaaaactcattttgctttgaggcatttgagtaaaacaaacatgctaatcagcacctaacctgtttcctgcaggtggaagggacagtgctactggggcctttcgtacatggggaccaacatccattccctgcagctcgccatctctaaaagcgacagtgaaacccagactgaaaactcggacagagagttctccagccccttttctgcagtcatcagtaccagcgaaaaagacaccatcaaagctgctctttcgcgcgtgtgcggaggtagcgtcttccccgcggcaggggctggctacaagagcctctgtgtaatccagggcttggctgacatttacatcttctcagaggacaccacgtacaagtgggactcctgtgccgcccacgccattctgagggccatgggtgggggcattgtagacatgaaagagtgcttagagagaagtccagacacggggttggatttgccacagctgctgtatcatgtggaaaataaaggtgcttctggggtggaactctgggccaacaagggagggctgatagcttacaggtccaggaatcggctggacaccttcctgagccgcctcatccaaaacctcgggcctgtaaagacacaagcataagactcatctcagggcccttcagccgaactgcatcttttcctgttatctcttgaagatagttttgtcccactggttaaaattcaccttcctgttttgaggaacattttctcattatgtgttcatgatgtgaattttagtaaattagtggcatttgtgtcacagttaagttggtatatgacatcgttatatgaacattgtgctgttattgttgcttggaacccttcaataaaataccaagggaggagcaaaactgtacagttcaagtggaatgactaaatgacccagctgtttggatccaggcagcttgggtatccatggggttagcctgaggcagaagatttagaatattatagctaagtttatgtactttctttctcttcttttctttttctttttttgatttttcgagacagggtttctctgtatagtcctggctgtcctggaactcactctgtagatcaagctggcctcgaactcagaattcctcctgcctctgcctcccgagtgctgggattaaaggtgtgtgccactacgcccggctagtttatgtacttccaatacttgtgtttcttattttaaaaaaagaaggctgataactgagggtttctactcactgaagcagggtgggaattagaaatcaggaaacaaaacggcaaagacatacagagactggagaaagagaagacagagcatgtaataataggtggtaggtaggtaggtaggtaggtaggtaggtagaaagaaagaaagaaggaaagaaaaggaaggaaggaaggaaggaaggaaggaagaaaggaaagaaagaaagaaagaaagaaagaaagaaagaaagaaagaaagaaagaaagaaagaaagaaagaaagaaagagaaagacatagaccggtgatagttggtagaacatacatacatacatacatacatacatacatacatacatacatatacaggcaggtgatagtagatagatctcgtatatacatactacatgcatacatacatacatacatacatacataggcaggtgacagatggaaaagcataggtaaagcagaagggggtgtaacaaagagctccctgtatgttttgcatgtttactactctccactacaatagcaatacaaccttctgtttgccatactaacttctcttagagctgtgcatagaccacatgtgctgtgctctttagaagctcaggtaacccagggagtgtcaactggagggattgtttgatccctctgtgctctgggtactaatggctgtttctgtagcatcctcacggtcaccgattactggtaataagtcaaccatatttatttcatctcttattcttcaactcaagaaatgaattgacaagtaatttatgcatattatgttgtacatgtatgatgctttgaagtatgcatgctacattgagctaaaaagggtgagctattatctcaccttctgtggtgaggacatttacaagccattgctaggattcatgcagtacatgccccactgttagctatagtcaccacattggacagtagacctcttgaagtttttttctaactgaaatcctgttttcttttatcaatatcttgctaactccctcctatatggggacttttctcagacgtgccagtgatttaaataatgacataggcactttttaatattctaaagcttaggcctttcagttactctaaccctcctaatcctggcactatgtcctatcacgtgaccatctctacctgtctgttctgctctctgatccaatgttcagctcatctggctgaatctcctgcctctgaatcttctcccagcatccctctctctgcccaaaagatctcccctccacttcctgcccagctattggccatcagatctttattacaaccagtcagatacaactcaccttaggcaggtgaggaagagtgaatatttacaaactatgggacccatgatgggccatagaaataacaatgctaagatcctgccaggctttagctctctgcccctacagaattaacaattgacactgcagagacactccttcacacagtgttaccctttctccctcctgagttctctagagcagtgagaatctagctctataatggcaaagccatccttactcagtcatccttgtaggaccagtaacatacaccaatgggcacttaggtgatgccatagtcctggctgctgtactcactcctgtgataagcatggaacagctgcttctttcacatgagtcagccatcattgttagaacttagtgtcatgcagcagatccattagtgatgcaggcagagctttaaaagtctacgctgggctctgggactgaagtcttgcaagttgtgtatttctgttactattcttttttatttgaaacagggtttcactgtgtagctttgactgtcctggaacctgctctgcacaccaggctggcctcgatctcagagatcctgagtactgggattaaatgtgtgtgccaacatggcccagctctgttactaattttaaaggttgatttgaagataagttcattcttcacgaaacacataagaaattagaacttaagaacttgctcccatatgcactggcatgaagaaattgcatgttatttttttaagagcaagtaatgttagtatgaacatcttaagagtatatagtcaataacatacagtaaaagcagacactttccaagggatttgaatgggcagttccctagttaaaaagagaggaaaaaacccaaagagaagcgagagacgatacattttagatataaccagccctttatctgtacctttcataaccacaaacttaagtaatgttagatggaaaatgctttttagtttaaattgtactgaatatgtaagaagttttcatgtcgatgttttccagatactgtggttgaacatctattatacatacgtgtacacacatacacacacacatgcacatacatgcacacttacatgcatacaatttacattgaatttaggttttataggtgatctgaattctggtgcatacaggagaaagttaagtaggttatatgcaaacattctgtcattttatacaaggaacttgagcttgtgagaacttgagtctctggggtggttgctttctaaagtcgtttgcaggaagtctggggcaagattatttgacattcttgtcattttcttctatttctacaactgttttatattcaatatttttataagaatcccattatcattacctacagaagccttcaattctttgttttcaaactcaagtttcattattttctgttatgtttaatctatgaactctctgtgtgtgtgtgtgtgtgtgtgtgtgtgtgtgtgtgtgtgtgtattacctgactttgcaggaagtacaggaatacaacttccaaaaattatagaaatgacagatggctgattgcctggacagtccccagtattctctatagtgttggagcatctctcttcagccttctgacccagaatgttttacagaccttttatgaagcaagaattttgaaggacttgcttactctgtcttggtagagcttggcagttgacttcctgcattcgttgtcctttctggacagcattctgtctgcagataaagttagagcattttctttgtccagcagctaatttgccacattaaatttaatgcttatcatctttttgaagtggaatggggataactgtcaggaacagacctgtctcatagtcaaaaaaatcataaattaataaaattatatttaaatgctatattctgtaagtctctgagatttttgaagaacaattatttatttatactatatgtgaattgtcaaacatagtttatccttagctatctactttttgaataaccttgaatacatcttattataattatctaaactagtatctaatataaccatgagtttgactatctgactattgattttatttaactatccctaatagttcataatttgtattattatcatctaatatattgtaataacaattttcaaaaggactagaactttatattgtaactttaaaaattatatgagtatgatacctcaaataaatgttaaacacatatattatatgtataaaaataatttaaatttgtataaatatacaataacctataccaatgtatcaaaaataactttatttctgtatcaatacacaaaaattctgtaccagtgtaacaaaatatgaccttgattttacatcaatatataaagattttaccaatgtaagattatgggtataaaatattttttggtttaagagtagattcaataatccacctctacttgtataatgccttataatatttctatatcctttttcttttcaaactcctactctttaagaaagaaagaaggatagagaagaggaaaggaaagatagaaatccctgagtccaagcttcttacttagtttcctccctgtctaggactgtcattacttctaaataattccttaaaatgacaatatatgtataatttataaaatgaccaacaccatccaccccaatttaagggatttcgatgatggtctctttatagttgcttcccaatgaactggaaagaagaattcctgtttgggggcccaaaaggaaattggaaaaatggttcagtcaaaagaaagctatttgctgtccagtctctatgtgctgagaaagctcaggacttaaatgaattcctgaacagtctgaaaggctggatgaaccacagtcatctggagtcagccacccttcctgaggctgttctggaagctggctccagagggaacagaaggcactctgaagctggatcacgcatctcagtgtgctggagggtgactctgatcagagctgcagttttggttgctatttttttatgaacttaaaacttttagaggtaatacgtgtttctatattaatacagcatgaaatgtgcagtgtactcagattaattaaagatgaatttttgttgctagtttgaaaaactgaaagacagctgtccttctttaggtgttagtttgatcatataactaaactgtaatattaatcttcattcatgttatacaaaagtatgacatgatgaattttgaggactcttgtagccaacgagattcattgatgatgaatagttgaagttatggctagggcctccccctgagctggatcccaatttgggcctgtcagtggacctccttttcttcaggctgttctctggttttgtcctttgagttctttcacacaggaacaattctgggtcagagtttttgactgtggaatggcaactcatccctccctgtttttctattggaggtgggctctacaagttccctctgtctactgtagggcagatgtatttcatctaaggtctccctttgaggcctgagagtctctcacctcccaggtctctggtacattctggagggttccctacctcctacctcccgaggttacctgtttccattctttctggtggccctcagtgcttcagtcctgtccctccccaataactgatcatgttccccttttaccctccccgttccctctcccacccaaatccctccctccctccttcatgtgattgccttcttttccctcacaagtgggattgagatatcttcacgtggcaccttcagcttgttagccttcttgagttctgtggattgtatcctgggtattctgtacttttttgcctaatatccacttattagtgagtatatacttgaatgtcttttggggtctgaattacctcactcaatattttctagttccatccatttgcctgtaaaactcatgatatcctcattcttaatagctgagtagtattccattgtgtaaatgaaccacattttctgtatccattcttctgttttaggacatgtgggttgtttccagcttctggctatcacaaataaggccactatgaacatagtggagcatgtgccactgtgatatggtggggcatcttttgggtatgtggtcaagaatggtatagctgggtcttcaggtagatctatttccaattttctgaggaaactccagattgatttccagagtggttgaaccagtttgtaatctcaccaacaatggaggagtgttcctctttcttcacatccttgacattgggtgctgtcacctgagtttttggtcttagccattctgattggtataaagtggaatctcagtgtcatttgatttgcatttccatgatgactaaggattttgaacatttcttttaagtgcttctcagccattcaaaattcgtggttgtgaattctttgtttagttctataccccatttttgattgggttgtttggtttctcgggggttagcatcttaagttcttaatatattttggatattaaccctctatcagatgtgcggttagtgaagtttttttttttttcccccaatctataggttgcctattggctatgtcctgcggggccggtgggtgtgagggaaagaggggagtgggagagaacccgcatccctccagagttccggtgctctgggcgggcagagtcgggatgactgctgcacgctttccacatggccagctcggcaggtggtggacacaggcagtcctaggcaccaggttcccagcttcaggcatcccatacactggtggacaccacggaagagctaagaacagaatgagggccctgggagcggctcaccagccctggggcggaagagaggagagggcagggggagagggcgcttgatggttcccacacgggtgagagtgcttggtcctgtcagtggctgcagcgcaggatggccttctgacgggaggttagacatggctcattaagagaaagcctctcccattgttcaagcacagccagccttgatgagcagagacagtctatggttttagagctttattgtagaaaggcagggagaaggagagaaagtagaaagagagactggccatggccacatggagagagggggaagggagagagagaagaagggctagagagtaagaaagttgagggcttaaagaaagcgaggaggggccaagcagcccctcttatagtgagctgagctatcttgctgttgccaggtaattgtggggaggagcatacctggctatagtcaggtaactgtgggggtggagtctagccagaatgccagaagcttgtgatattgtctccttgactgatagtcacagaattatggagttgggggctctgtggtttcaggcaccagattctgggaacctggcttgcttttccatcccttgtagagttctctactgggtctccagaacaagcaccattcaaccaaaataggctgcctatcacagtcccacagtgtcctttgccttacaaaagttttccagtttcatgaggtccatttatcaattcttgatcttagagcctgagccattggagttctgtttgggaaaatttcccccttgtcaatgaatttgaggcttttccccactttctcttctattagattcagtttatctggttttatgttgaggtccttgatgcatttgaacttgagctttgtacaaggtgacaaatatggatctattttcatttttctacatacagactgccactgccagttagaccagtaccatttattgaagatgctttcttttttccactgtatatttttggcttttttgtcaaagatcaagtgtctatacatgtgtagttttatttctgggtcttaatttgattccattgatcaacaagagtgtctctgtaacaataccatgcaagttttatcactactgctctatagtatagcttagggtcagggatggtgattccttcagaaattcttttattgttaagaattgttttcactattctgggttttttgcttttccagatgaatttgcgaattgctctttccatatctttgaaaaattgttttggaattttgatggggattgtgttgaatctgtagattgcttttggtaggatttattttatgtattcaccattgctctctttagacacaccagaatagggtgtcagaccccattacagatggttgtgagccaccatgtggttgctgggaattgaactcaggacctctggaagagcagtcagtgctcttaaccactgagccatctctccagcccaggatggccatttttactatgttaattttgccaatccatgagcatgggagatatctccattttctgagatcttcgatttctttcctgggagacttgaagttattgtcatacagatctttcacttgtttggttagagtaacactaagatattttatattatatgttactattgtgaagagtgttgtttccctagtttctttctcagcctgtttatcttttttataaaggaaggctactgatttatttgaattaattttatatacagccactttgctgaagttgtttatcagctgtaaaagttctctggtagaatttttgggcttatgtatactatcatatctgcagatagtgatacctttatttcttctttgccaatttgtatccctttggtctccttttgttatcttattgctctagctagaattttgagtactatattgaatagatatggggagagtaggcacccttgccttgtccctgattttagtgggattgctttaagtatctcactgttaaatgtgatattggctgttggtttgctgtaaattgtttttattatgtttaggtatggtccttgaattcctgatctctccaacacttttaacatgaaggggtgttgtattttgtcaaatgctttctcagcatctaaggagatgatcttgtgatttttttttctttgagtttgtttatatattggattacattaatggattttggtatattgaaccaaccgtatacttctgggataaaacctacttgaaaatggtgagtgatggttttgatgtgttcttggactcagtttgtgagattttttattgggtatttttgcatcaatattcatgatcaaaattgtcctgaaattctcttttttgttgttggtggattattgtgtggtttaggtatcagagtaattgtggctccatagaatgaattagatagtttcttctatttctattttatggaatagtttgaggaatattggtattaggtcatctttgaagatctggtagaattctgccctgggcattttttggttgggtttttttttaataacttcttttattttctttggggatatggacttgtttagaaagtttatctactcttgatttaactttggtttgaggtatctgtctacaaaatcattcatttcatctagattttccagttttgttgagaataggcttttgtagtaggatctgattttttttttttaatttcctcagtttctgttgttatgtctcccttcatttccaattatgttgatttggatattttctctgggccatttaattagtttggctaggggtttatctatcttgttgattctctcaaagaatcagcttttggttttgttgattctctatatagttctctttgtttctatttggttgatttcagccctgagtttgactatttcctgctgtctactcctcttggaagggtttttttctttttgttctagagctctcaagtgtgctgttaagttgctagtgtaggatctctccaaattctttaccagggcacttagtgctcacaatttttctcttagccctgctttcatgtgtcccataagtttaggtatgctgtgtcctcatttttattgaattccagggagtctttaattgctttttaaaatttcttctctattgaagttagcattgagtagtgagttgttcaattaccatgggtgagttttctgttatttttgttattattgaagaccagccttaggccatggtgatctgataggatgcatggggttatttcagtcttcttctattggttgagggttttttgtgactgattatatggtctttggagaaggtactatgagatgctgaaaagaagatgtattcttttgtttcatggggaactattctgtagatatctgtttatatttgattcataacctttattagttttaccgtgtctctgtttagtttctgtttcaatgacccatccattagtgatagtagggtgttgaagtctcatactatttttgtgtggtgttcaatgtgtgttaggagcttaagtaaagtttcttttatgaatctgagtgcccttgcatttggggcatgggtgttcagaattgagtctttcttttggtggatttttcctttgaattgtcctttctcctcttgcttgataacttttggttgaaagtttatcttactggatattaggatggcaactccagcttgtttcttgggaccatttgcttggaagacttttttccagccttttactctgaggtagttcctgtctttgttattaaggtgtgtttcttgtatacagtaaaattctggaccatgtttgagtttcagtccgttagcttatgtctttttgtaggcgagttgggtctattactattgggagatattaaagacagatgattgttagttcgtgtgatgtttgtttttataagtagcattatgtgcatgtgattctctccttttggctattttgtgagatgactaatatgctttttttttttcctttggtgtaggtaccctacttgtgttggagtttcctttctaggatcctcagtagggctgggttggtagctaggtattgtttgaatttggttttgtcctagaatattttggtttctccatctatgtttattgataattttgctgggtatagtagcctgtgctgacaattgtgttctcttagagtccgcatgaccgctatccagactttctggcctttagtgtctctgttgagaagtctgttgcaattcttataggtcttcctctacatgtgacttggcccttttcctttgcagcttttcatagtctttctttgtactgtgcatttaatgttttgattattatgtgacaagaggatttttcttttctggtccaatctatttggtgttctgtaggcttcttgtacatttatggccatctctttctttaggttgggtaagttttcttctatgattttgttgaaaccgttttcgggtcctttgagctgggaatcttcactctcctctattattattattcttagatttggtcttttcactgtttcctacatttcttgaatattttgggtcaggagatttttatgttttgaattttcattgacagttgtgtt

SEQ ID NO: 504 - DNA, 2729 bp, Mus musculus
cggtgttttcctggcggcttgccctccggctgtgcccgccacaggaggattgcgccaggtcccagcgcgaccacctccaggcgttggcactcccttcctcctctctcgcccctcctccgcctcttccgtttctctgggaaaggctgtatcctccttggggctctgcatcctcgcttaggtaatccgctttcctgctttcgccacccctccccggtgtccagcgtctccacctccgcgcatttgggtccccgcgagcctcgcgcgctccatcgcctctgcagagggcagctgtgagccagagggtgggtgaggctgagaaagaagcaggctttagaaatgtcagacatcctcctggagctgctctgtgtctccgagaaggctgctaacatcgccagggcgtgcaggcagcaggagaccctcttccagctgctcattgaggagaagaaaggtgcagagaagaacaagaagtttgctgcagatttcaagaccctggcggatgtgctggtgcaggaagttataaaacagaacatggaaaacaagtttccaggcttggggaaaaaagtttttggagaagaatccaatgagtttacaaatgatttgggggaaaagatcacagtggagctgcagtccacggaggaggagacggcagagcttctcagcaaggtccttaacggcaacatgccggcatcggaagcgctggctcaggtggttcatgaggacgtggacttaactgatcccacgctggagtccctggacatcagcatccctcacgagagtcttgggatttgggtggatcccattgattcaacctatcagtatattaaaggttctgccaatgttaaatccaaccaaggaattttccccagcggacttcagtgtgtaaccattttaattggcgtgtatgacctacagacaggcctgcccctaatgggagtcatcaatcagccttttgcgtcccaaaacctaactactttaaggtggaagggacagtgctactggggcctttcgtacatggggaccaacatccattccctgcagctcgccatctctaaaagcgacagtgaaacccagactgaaaactcggacagagagttctccagccccttttctgcagtcatcagtaccagcgaaaaagacaccatcaaagctgctctttcgcgcgtgtgcggaggtagcgtcttccccgcggcaggggctggctacaagagcctctgtgtaatccagggcttggctgacatttacatcttctcagaggacaccacgtacaagtgggactcctgtgccgcccacgccattctgagggccatgggtgggggcattgtagacatgaaagagtgcttagagagaagtccagacacggggttggatttgccacagctgctgtatcatgtggaaaataaaggtgcttctggggtggaactctgggccaacaagggagggctgatagcttacaggtccaggaatcggctggacaccttcctgagccgcctcatccaaaacctcgggcctgtaaagacacaagcataagactcatctcagggcccttcagccgaactgcatcttttcctgttatctcttgaagatagttttgtcccactggttaaaattcaccttcctgttttgaggaacattttctcattatgtgttcatgatgtgaattttagtaaattagtggcatttgtgtcacagttaagttggtatatgacatcgttatatgaacattgtgctgttattgttgcttggaacccttcaataaaataccaagggaggagcaaaactgtacagttcaagtggaatgactaaatgacccagctgtttggatccaggcagcttgggtatccatggggttagcctgaggcagaagatttagaatattatagctaagtttatgtactttctttctcttcttttctttttctttttttgatttttcgagacagggtttctctgtatagtcctggctgtcctggaactcactctgtagatcaagctggcctcgaactcagaattcctcctgcctctgcctcccgagtgctgggattaaaggtgtgtgccactacgcccggctagtttatgtacttccaatacttgtgtttcttattttaaaaaaagaaggctgataactgagggtttctactcactgaagcagggtgggaattagaaatcaggaaacaaaacggcaaagacatacagagactggagaaagagaagacagagcatgtaataataggtggtaggtaggtaggtaggtaggtaggtaggtagaaagaaagaaagaaggaaagaaaaggaaggaaggaaggaaggaaggaaggaagaaaggaaagaaagaaagaaagaaagaaagaaagaaagaaagaaagaaagaaagaaagaaagaaagaaagaaagaaagagaaagacatagaccggtgatagttggtagaacatacatacatacatacatacatacatacatacatacatacatatacaggcaggtgatagtagatagatctcgtatatacatactacatgcatacatacatacatacatacatacataggcaggtgacagatggaaaagcataggtaaagcagaagggggtgtaacaaagagctccctgtatgttttgcatgtttactactctccactacaatagcaatacaaccttctgtttgccatactaacttctcttagagctgtgcatagaccacatgtgctgtgctctttagaagctcaggtaacc

SEQ ID NO: 505 - protein, 392 aa, Mus musculus
MSDILLELLCVSEKAANIARACRQQETLFQLLIEEKKGAEKNKKFAADFKTLADVLVQEVIKQNMENKFPGLGKKVFGEESNEFTNDLGEKITVELQSTEEETAELLSKVLNGNMPASEAQVVHEDVDLTDPTLESLDISIFSLGIWVDPIDSTYQYIKGSANVKSNQGIFPSGLQCVTILIGVYDLQTGLPLMGVINQPFASQNLTTLRWKGQCYWGLSYMGTNIHSLQLAISKSDSETQTENSDREFSSPFSAVISTSEKDTIKAALSRVCGGSVFPAAGAGYKSLCVIQGLADIYIFSEDTTYKWDSCAAHAILRAMGGGIVDMKECLERSPDTGLDLPQLLYHVENKGASGVELWANKGGLIAYRSRNRLDTFLSRLIQNLGPVKTQA

SEQ ID NO: 506 - DNA, 48196 bp, Homo sapiens
accaaacacagatcaaaaatacaatatttgagggatgtgaaacccgcctataaagagggctgaatttttgtacacacgggttctgctgagtcagctgctgggctttaggatgctcggattttggtatccacagtgggaggagtgttggagatcccggaaccaagcatcccgtggatatcaagggacgactatatttaacctttcttcataaccttgtggaaagagtaaaagaaggaaaaaatgtgtatgagggagtaggggggtagggggaatgttaggaagaaagaaactatgtgaactaagttcaaaaataaccgtgtgtgttctttctgattttccagtgttttctttccatttataacagttcatttgtggaaactctagattaatcacaataagcaaacatttcactgttggcacattctattacaagacttgtgaaaagcatttaggatcaaatactcaatacgtatgaagggatttgaaagttaaaattgtttttaagttgtgaggtgttaggagtaacagtacaatcccattttcccaaatatatttaaaatgtctctacagtgttaactaaatgacacaccttatatcacagaaggaaattacttaacaaattcataagacagtataatcagcatatgagaaatctacctcttcttgtctcctcttgcctttccagtctcttgttggcttaagtttttaccagaatgatttggtaatatcaggtgtggaagagatagaatgggtgcggtttaggaaaataatttgattctgtgtattggacattttaaagaaggctcttaaggctcaatttttaatgcttaagaaattaaatgacttttaaatgcactattccctatgaaattaaatacatactcatacttgccacaaaatatcaaaagatagactgccaaaatattccaaaaataaaggtaggcaaacttgttcgaaagcaaaatacacaaaatggggtaagcaatcaggatgtaaatattcaacatagcaaagtatgcaataaaatcattttacaaactaaaatgtatcagggaggatccaagaataagttgattttagagtggtctgtggaaaactaaaataaacaagaaaatatctagggaagtttaagaatgggaggaaatgagtcattgataacatgcttgctccagaggataacctttgtaccaaacggcagagaactgacatctaatcagcagaggttggccttggcagtttatgaaggaacgtccagagggagcacaggaaaggcagtccaatgatccttccctgaattttttactcttcgatgtcaggctttaattcccttgagataggggaattcaaatcctaaggattcgtaaactccaaggctttggcatttactatatttaacatctgcgaatttagtaaacaacacttctgtggaaaggtaagggaaaaaaaagataatttccattttatgaagtttaacgtatatgcagtttgtgtgtgtatgcatatgtgtgtgtggatagagtgtggtaaaataaagattaaaaactcaaggcccaatgaaagcttttagagagatgcctatattcccatgccttcatgactgtaaatatatccgctatgacatacactagaaatttatcctttgcttttcatatcttatctacttgtatcactcaggaccacattctactcccactagtttacataggttagtaaccttgcaccgtaccttaaaaacactcagagttttaaatgttctatcacaaatgttaaggattccttccctgaatcataaatgtgctttgctttcattatacaatcttttctaaggcaggtattaatgatttatattagttaatgatttaaaaggaacacaaaaataagattgtgcaacatggagttaggaatctcttacaactttatcagttcaagtctggtccttgttgtgagtcaaccacatttttaaactacctaatagcctatggtcaagtcatttttacatatgcctaacaaaagagatataggtgacaagtgctgtaaaactattttttttttttttgagacaggacttcactctgttgcccaggctggagtgcagtggcacaatttcggctcactgcaacctctgcctcctgagttcaagagattctcccacctcagcctcccaagtagctgggactacaggcacacaacaccacacctggctaatttttgtattttttgtagaaattgggtttcaccatgttggccaggctggttggtctcgaactcctaacctcaagggatccacctgccttggcctcccaaagcgttgggattacaggtgtgagccaccacacccggcctgcaaaacttattatagtccagtgaactacagtcaacaccaatttcaagtttccagtagctgatttcaagttatgaggtggagcaatggcaagccccacagtgctgatccgtgtgacaattggtaacttcaattctagtttgatgtgattgacatgactgaggaaaggatatgactgagtccagaagggttgagagttgcctactgacattgctaccattcaccttccttattctagaggtcttggctaatgtgtcattaaaaaacgtatttcaaaggaatacttcatgacaatgaagtgctcatatgtggtgattagacaacagcttacaaaacaatatgtttagtaatatttgcaaaaacaatacatacgtacacacagagagatgactggaaagttataccctgaaatgttacaactgtagtacatagagtaggttttatttccttctttatactttttcacatttttcagtttccacaaatttttcttcataatgtgttactcttttatttatttatttatttttactttaagttccgggatacatgtgcagaatgcgcaggtttgctaaataggtatatgtgtgccatagtggtttgctgcacctatcaacccgtcatctgggttttaagccccacatgcattaactgtttgttctgatgctctccctcctctcaacccctctcccacaggtcctggtgtatgttgttcccctctctgtgtccatgtgttctcattgttcaactcccacttatgagtgagaacataaggtgtttggtttcctgtgttagttttctgaggatgatggcttccagcttcatgatctcattcttttttatggctgcatagtattccatggtgcatatgtactacattttctgtatccagtctatcattgatgaaaacttgggttggttccatgtctttgctattgtgaatagtgcaatgcattacttttataaacacaaacaagtcacttgaaaagagtaaataaatttcatctcgaggtataaatattaaaaatatttcgaaaaagtgaatttgagcaggaaattaccctattgttattaaaatgctatgccattgacacagtaatccaaagaaggatgaatgaaactaaatagaggatccagaaatacggcctagtgcataaaagaagttaatttatgatacatcaatcatcacagaattgtgggaaaaaatgtttgctcaataaaacttaaatagtaaatagtaaaaaaaaatttgaggaaatataaatgaatattgatctgatctttgatttaaaaggatcttaggcatataaacaagaaaaaaatccagagatttgactaaataaaaactttttaaattttgtaaataataaaaacacgtaaaactaggaggcaaactaagaaaaagtatttgccacaaatgtgataaaaggttgtgacaaatgattaattcaattgttaattggattaaacaagataaataataagactacaatattgctactctgtggacatcatgaaagcacagacataatgtgttgttcattaaaccattagcataatgatcagaacatcatacaaggaattcttatgtattgatgaattgagaaatggtcaaacatgaaagtatgactaaaaaaatgtagaaggtgttggaggagaagggaaagtatcaatggccaagagacgtgggaaaatattttatcagtaatgaaaatgcaattaaaagtatgatgagaagtcaggagaggttttttggcattccgcatgtggtaacagatgcagtcatgagatgggtcacatcattcacagtgaggagtgtcttgaataggtaaaatcatattgtcaaccgaaattctaggaatctaacctaaagagatacaacagacacttgatacttaggaagggtatatcttccagactctaggattttccaaatctgtgttttcacactgtgttccaaggagccctggggttctgcagaggcatcccaaagtcggcttcaaagataggaagaaggtttccccaatgctgcctcaaccagagcaatttgacatttatctaatttgtatgttagattacatgtaagaactttttcttaaagattccactgaaaacatcaaaatgtggacaccactgtactgtatatataatttcttcaataaaatgcaatggagcattacttctcaaaaactaccggagaagtggagaatagtcagagtgttatattcccaaacactagcctcacagcataaacttaaatccctgtttcaggaaatgtgtaaatcactctataattaccttgcaaatagttcaaagctcggatataaaatctgcaaatatccaggccctgttgcagtaaggataaaagatttgtgttctatgatgatcaactgtttcctttagtatatttagtctgtcataacaggaatcaatttccactcagatgtttcagctgaagagactttattgcgggaactatttatagaagttagggttagggttggatgaaaggaaacaagaaacatggaggtacctaggagttagcacagctaggcctgaagaaataaggggagggaatcacgttagtagagcccagtgaaggctggcacagtggagcagggctgccttgcaggaggagccttcaagggacaaagccaccatcagaacccagccagaagcaggaaaagaggtggtgaaacatatcctaaccttttttccttttccatcctccaatctactgatggtgttacccattggtcaaaaccaactggcatgagaccccagctggaatagtttatgaaaaattccaccttctgaggcacagagtctagcagagaagagcagaagatggcactaaaacacaacaagtggagaataaccagcatatttataacagagaaatacaagtccccccttacctgtgggggatacgtttcaagacccctcatggatatctgaaactgcagatagtactgaaccctttatatacaatgttttttcctatacatatctatctatgattaagttattaatataaataaggcacaataagagattaacaacaattactgctaataaaatagaatagccaggcacagtggctcatgcctgtaatcccagctctttggaaaaccgaggcgggaggattacttgaggccaggagttcctgggcaacagagtcagactccatctgcacaaaaaattaaaaaattagctgggcgtagtgatgcacacctgcagtcccagctacttgggaggctgaggcaggaagatcacttgagccaaagagtttgaggctgcagtgagctatgattgcacctttgcactccagcctgggtgacagaatgaagccctgtctctaaaaataaaacagaaaagtaaaataagaacagttatacaaatatattttaataaaagttatacactgtggccataacttttgcagtttgaggtacaacagcaaaactaacgtgaatttctttttccttcacaatttcacaggtagaagattcattcttatcatagatcttagcgacctcagcatatggatttttttctttccttactaattcaaaaacttttgggttttcacttaaaagaagcactttatgacttttctttggcatacccaaattgccaacattactactcttgtgtttaggggccattattaagttaaataagtgttacttggacataagtactgcaataccttgacagtaggtctgacaaccaagccaactacaaagtgactaacagacaggggagcatctacagtgtggacacactgaacaagagggatgacccatggcctggacaggatacagcaggatggtgcacaatgtaaaacttatgaattgttttatttctggaatttttcatttaatattttcagatcttggttgatcataactgaaaccttggaagcaaaaccacagataaggggagactagtgtactgggaactcagatgttcgataatagaggaaaccttaactaaataatgatatcaaccattctgctattaaataaaagtgctcagaagagcattatgtaatcagggagtacagaagagagagcaaccaactccttacagagattgtaataaaagattttcccaaattaacaaatgaggtgctttgttgtcccccaagcaaagtttcgtatattttttaattatataaacaatacatttcattatgggaaacatatacataaaacaaaaagcaaatatctacaattccatcccctgccctagaccactataaatatctgtttatatctttccagatttttttctatgcatttatacacacatgattatgttgttttcgggatcacaccatattattttgtaaactgtattttccacttaataaatcataaatactattttatccaatagataccattctgcaacattttaaaattttaacactttttaaaacttgcctccgtgtatctagttgtaactaatttttattctcggacatttagtttggtttctcttttggccattaccaaatgtactgtgatgagactttacattttgggggtgatacagtttggatgtcccattcaaatttcatgttgagatataatctccagtgttggaggtggagcctggtgggaggtgtttggatcataggggcggatccctcatgaatagcttgggccatctccttggtgataagtgtgctctcactctgagctcacagggatctcattgtttatgtggctcctcccccccaactccttcttgctcccgttctcaccatgtgagacatctgctccccatcaccttccagcatgattggaagcttcctgaggcccccccagaagcagatggcattatgcttcctgtacagcctgcagaaccatgagccagttaaacctcttttcatataaattaaccagcctcaggtatttctttatagtaatgcaagaatggcctaacaagggtggggggagggggggcagttttttttttttttaaacacacacacaaaagaaaagccacagagacatatgtggccttcaaagcccaaagtatttgccatctgaccttttatagaaaatgtttgtattataaatttccaggaatgtaatttttaagtcaaagtgtgtgaacatttttgacgctttcactacattctgtcaaattgctctccagaatcgttgagccaatttacacccttctcagtaatgtatgagtttctttagttgctatacatcctactccaagggtcactggcccaaattactagctctgagtattattttattctcaatttgatggtgcattatcgttttaagtttttacttctcttaaaaatgtttggccatttacatttttctctcatgatgacgaatttgcattttgctcatttttagtaggctattttttctttctaagttctctttaatgttatgtttatctgtcatgtatattgcaaattttttgtaatttttacttgtttttaaattttattctatggggtttttttttggataaaagaagttaaaagttcaacagtcagatctgtcacttttcctttgtaatttcagccgttgtttcatgcttagtttgagattaaaagcaattcacttgtattttctccttgcccttttaagacttaaaaacatttaaatcttttaatcctgttcaaatttagtgtctgggaaacattttagaaggatgaataggtaatattatgttagtcctggagtcagattgctgggttcaaatttagcctcaccaaatactacatatttctgcaaatcacttaaactctttaagtcttagttttcttgtttataaaatggagataacagtaacatttaccatagggttgatgtaagaattaacagttataaatcacagaaagtacttagcacagtgtcattagctattattatagcagcaagagaatactctcccaggcaaaagcaataacatgtataaaggtgcaaatgtatgaaatctgtttgcatattcagggaactagatgtggtgtagtaaaatgaggtgtaatattcaaggggcagagttgacagatgcgaggggtgatgggtcttgaatgagttgctcaggaacttgctcttgatattatcagagattgggagccaatgaaagcttttaagcaagcaagaaaccctgcagatgtgtggtagcaaagtggaaaatggactagattccgccaggtgcagtggctcacgcctggaatcctagcactttgggaggctgagctgggcggatcccctgaggtcaggagttcgagaccagcctggccaacatggtgaaacctcgtctctactaaaaatacaaaattagctgggcatagtggcagtcacttgtaatcccagttactagggaggctgaggtgggagaatcgcttgaacgaaggaggcagaggttgcagtgagccaagatcatgccactgcactccagcctgggcgacagagtgagactctatcttaaaaataaaaaaaaaagaaaagaaaagaaaagaaaaatggactagatttatatcccttgctccaccctgtcttccccaaatttaaattcctgcttcctagaggcaaattctttcaccttctatgtctctggtatttatctccttacttttaagaatcatgtttaaattgtttcttgattttgccatcatagatatgattatgaggctaattaaacagtaatcctaaccgctctgagaatggacctaagaaatgaatgtgagaaagaaagtagaagcagcccacttgctagtgagtgaaagccagggaagggtggggggatgcggggagaaattgtctcaagttggagaacccaggtgcaggctgggagcagtaccatgaattccattcaagaagccaaacgttttaagcaccatttcctggagtttgccaagttgagtattgacccagcctcctgtcttgttggttcctcactgctgaagaagaccaagtgttgacaactcagtgaggcagtctcagctggagtggaaaaatgtagctaagaaaacgtgccagacaaagctttaagcagagcttcccaactggatgccgtgaaacgaatgacagggatgcagatacagcatgggtcttcccagccctccaagtgcaagggcttctgcaggaagccttctgcaggagcagcctcttctgtttacccccattttgacccttgtaatatcatcctttcctacctgtgccaagaagtgaaaaggtgtgtgaagcgccgctttagaaggcccagtacattcacaaacatcagcttctgggcgaggctgcttggcctcttctattcaaaactttgtgttgcccttttaaggtttctattccccccacccccaccccgcccaccaacacccattcctacctaggttcaacccaaaccatccttaaggtacactgagtatcacagcaccaaaggctggagagagataagttccccacccttgatgcgcttcctgtccaggtggcccgaggcccactccttaagaggcaaggcccagagacactgctgtgtcttgaggaacatccagtacacctgacatttccattagaacagtgggacccggataccactggcaggaagtccatcttcacagctgccaacccatctgtcaaacccgcagtcccctatgagagtacagatgaatggaggaggaagatttaaaagtgaattcgtgggcggcgacaaggaaacagcagccgtggccaagctgaccccagagcccttcccttcctggccctccctctgaatcatcgcgctccacttgtgacgtcgcggacgcccggctcgggcaggcgtggggggcccgcgcgtcccgggagccccgaggcggcagcgcgcgtttccacgccgcggtcccgcgggaaagccgggggcggcggcctggctgaggccaagctcggatccggtgccgagccaagcggggccgtgcgtcgccggggcttcgccttcgctcgcgtgacctccgccgtcctccccaaccctcgtcctctggccgcgcctgcggccgcacgcccagcgcccctcgcctaacctcgcgcccgggccgcgcctcctcctcctcctgctccccgccgcttccgtttctcgagggaaaggctgctgcctcctgctctgtcctcatccccggcttaggtaacacgttttcctccttacgacacccaccacagggtccccgcgccgctgcccctcctccttggatctggggcccgggctggtgagcggcgcgcgccgtcgcctctccgcgggtaggtgagtcgatggcgccgggagggttcctcgcctctgcgcgccggcctgcgaggtccctgccccggcagcgaggccgcccccggccgggcccggccaggcatgcccggcatcgccgctgcagccagcgcggaggggagctcgtgagtcccgcggcgcccttggccctgcccgagcggcccgatggggttggggggcgggaagaaagggtggcaaacaacgattttaaaaatccagtcattagtatttgtaggacgaagaagctgatctgacagttgtccagagcagtggcccagctgcaacaggtagatggcgcagctgtcagtgaccccttggtctcagccttggctttgagagatgcatctgagtgtccctagctgccagctacctccagtgacctacttgatgagtgtgaaataaatatgatgggactatatttagaaaaatctttacttccttgctgttaattctctctgcattttgaaaggtggttttgtgaggtgtgcataattagttggtgtgtccagagtggtagctggaaaaaaatatttaacctgggtttggccctatcatgtagacggttaggcgcaaagagtgtgaaaggaaacgcttactttagtacatctgtgaaaaacacttataagaaaccacggcttgttttttggagatttctcattttaaaggtatttttaaagtgttgaataagcagaagtttgcccactgtatgatggtgttcacttcaaaagaacagtgggttaaaagtatggacagaccacttaagtggatcccatctgttgagtaaaagattttttagcccttttacactgattcctagctttgaagccagaaaagttgataaggatcagccctgctcaacttgataatagtataaggatgaaagtaatccactgaactactcttgattggtgaattagctaagtgatctcattcttaccttttaaaatagagaacataagggaaaaaataaaggcaatggaagaattcattttttcaatacagatatttgtttccattcttatgtagagcctactttatttttaagtttttatggatttttatactacttttgaagtcagcttagtcatgaagagaattatgtcaaatacatagagttacactgtactttttgtgtagaataagctaccacttttcaagcttttggactaaaccaccgcttgcttggaaattgcagctttgactaatgccctttaaaatgatataccttattatagatttaaattatagctttccttgttatagtcctgaaaaaaatgaaaagataatttcttgtttgacatagaaggcctgtgagacaaaagttataaaggttattatatatttattttgctttttaattctgtctctaataacagttagaaaatgtctcattctatttcatgttatacagaaattgcttaaaagataattatgttatataaagtgatcaatgaaaacaaacgtcatcttcattttttaaaggtgaggatggtgtatataagcactttttcccgatgtgagtccttatgaatgttcttgttaaaatactttgaatcttgtaatgaagttaataaaactatgttaatgtgtttggctgagagcttagaaataaaggctctggctggcgtggtggctcacgcctgttatccctgcactttgggaggccaaggcaggtggatcacttgaggttaggagttcgagaccagcctggccaacatggtgaaaccccgtctctagtaaaaatacaaaaattagccaggcgtggtagcaagcacctgtagtcccagctattcaggaggctgaggctggaggatccctggaacctaggaatcagaggttgcagtgagcccagatcgcgccactgcactccagcctgggcgacaaagcaagacttcatctcaaaaaataaaaattaagttaaaattaaaaaaataaaagttctgcttcccgtctcctgtgattgatgttgggtactgtttctcaaacttgtctgattgtaaaattcctcagggtagtaggcaagtcggggagtgggtagagtataatagtggtttaaaagattcccagattgcaacttgagacttcctggatcagaatttctaagagaaaggagatatttcaaatagacaaaaatgataaaattttaaaatagtcaacaacaacaaaaaaggtgagtttgggaaatgcaggtgggaaatgactattgttggaatgaatagttgataaaacttattaggactcctgtacataaaatgttcatatatggaaactgattttattaatatgatgaggccactcatttaggaaatctgaaacttttatatttttttctggtcaagcttctgctgatcaaatttagcaaacatatttttgcatgtttagtcttttttatgtggtatgtaatgttaattcaatttcttgaatgtgataagagcattttattaatggatgactaatgcagattactgtaactagtaatccacagcaaaatattgtacctaataatttctctttcttttttttctttttttcttgagaaaaggtcacactctgtcatccaggctggagtacagtggtgtgatcatggcttatgcagtctccacctctcaggctcaaggaatcctcccaccccagcctcccgagtgtctgggactacaggcacgtgccaccatcccagctaatttttaaaattgtagagatggggtcccactatgttgcccaggttggtctcaaactcctgggctcatgacatcctcctgcctcagcctcccaaaatgctgggactacaggtgtaagctgctgcacccagcctaatttctttcatattatagatttatttgttacctcttccatgtgcctgattaaataattataggcaagacaggcatgcaaatttgaataccttattagtagcttttttttttttttttttttttgagacagagcctcactctgttgcccaggctagagtgcagtggtgtgatctcggctcacagcaacctctgcctcccaggttcaagcgattctcctgcctcagcctcccgagtagctgggattacaggtgcccgctaccacaccaggctaattttttgtatttttagtagagatggggtttcacagtgttagccaggatggtctcgatctcctgacctcgtgatccacccgccttggcctcccaaagtgctgggattacaggcgtgagccaccacacctggctccttatttgtagctttttaaaaaatgactctcaaccccattcaaaaaagaaaaaaaaatttatttggccctaaaacttggtcagttatatataaaaaaattaaagaaatagaatattaaatacctataaaataatttgacaagatgagttaccataatggaaaatgtcagaatttattttccttttccttcttcctctttacattgcttttctttctccttttttggggggggatggagagtgtgtgttatttgctcatttgtttttatttttaaccaactaaatatttaaaatatagtaaattatccatgtttaaattaatttaaatatttgccaactttaccaatagatatttaaacttgcccttttcctctaaagtgacagtggtaggctttgctcaatgcaaatgagagtaataattcatatcaaaggagttaaattcaagtgaccaaagaaaattgttcttttaacattgcttaaggaaagcataacttaaattgatgccataatttttcattatcagcaactcttaaaatgaggatggaggctgggcatggtggctcacgcctgtaatcccagcactttgggaggccaaggcgggtggattacctgaggtcaggagttcgagaccagcctggccaacatggcgaaacctggtctctactaaaaatacaaaaattagctaggtgtggtagcgcgtgcctgtaatcccagctactaggggggctaaggcaggagaatcgcttgaacctgggaggcggaggttgcagtgagtcaagatcgtgccactgcactgcagcctgggcaacagagcgagactctgtctcaaaaacaaaacaaaacaaaacaaaacaaaacaccggtgtggttgctgtatgaaatcaacttaaatagcctagtgcccttctttaaacctaattttcctatcgctacccccacttgttttttaaaattataagtcaacaaatatttattatgcccttattatgtagatgataaacatcaaaagcttttgaaatgtgcatttctttgaacctgtaattttttgtttttttttaactttaaaaaaattgtggtaaaagatatctaatatcaaatttaccattttaaccgttttcaaattacagctcagtggcattaagtacattcactttgttatgcaaccatcagcactgttcatgtccagaactttttcatcatcccacacaaaaactatacccattaaacaatgactctaccctctcttcccagccctagtaaccaccatcctactttctgtctccacgaatttgacattctgagtacctcatacaagtggaatcatagagtatttgtctttttcagtctggcttattcatgtgccataatgtcttcaagtttcatccatgttgtagcatgtgtcagaatttcctttctttttaaggctgaataatatttcccaatctcatttatatgagaagtagatataaaaaacagagaagttttgaactggaacagatcatagaaatcatccaatccaacctctctgcccctgcttttcttttccttttttatgtttacaaaatggggaaaacaagtccttcagagcttacatcatgtggccgagtttatatacctgattggcaaaacagagcctaagaaccagctctcctgtatcccaagcaaggctctttctaccgcacaccctgcaggcccatccaggcccatccagacaataaacagtaagtgttaaaggagttggtgtctccaattagtatggcatgagttctaaaggaaagataaattgactttggaatcttccttaattaatgaaaaatgttacattcaaaatagattgaagattaaggctaggtgtggtggctcacgcctgtaatcccagcactttgggaggccgaggtgggcagatcacctgagatcaggagtttgagaccagccttgccaacatggtgaaacccatctctactaaaaatacaaaaattagccaggtgtggtggcatgcacctgtagtcccagccacttgggaggttgaagcaggagaatcactagagcctgggaggcggaggttgcagtgagctgatactgtaccattgcactctagcctgggtgatggaagcgaaaccctgtctgaaaaataaaaataaattagtaagattctagattctgattagcagtgatcaaaattataaataatattctattggaaaatattcttgcttcaaaccatacatctgacccttttttctgccttgaattttgcatcaaatttgtatttttaaaaaatttattctttctgatagttaagatagttacattgcatctgcttctatttgtatactatctgatttcaggtttcatttgtggcaacagggttctaaaaacatctcttagcatacaaaaacttaagcatatactgtagttggaacacagcagataaaaaaaatatctaaatgaacaaagtttctctttagtgaaaatatttccaactatggaaaagggagtttaaaaaataaggtcactatcaaactttaaagtttttgtcggtttgtttgtttttgagacagagttcaccgtgtcacctaggctggagtgcagtggtgtgatcttggttcactgcaacctctgcctcccaggctcaagtgattctcctgcctcagcctcctgagtagttgggattacaggcatgcgccaccacgcctggctaatttttgtatttttagtagaaacgggattttgccatgttggccaggctggccttgaactcctgacctcaggtgatccacccacctcagcctcccaaagtcctgggattataggcatgagccaccatgcccagacaaattttaaggtatttctaaatggaatactttttcacaattttcagatgagttctgagaagtatccgaaattcatcctttataaaattgttacgttactacagaatacttactatgtagatcaactatttttttccgagcatttaatttactttacaaaaaggcaatataagttgactcttagtggaacaaggctccctgttctgttcttaagcaaccagtgagtgtagagctgactgttgcacctgttgtttccttaaattgttggataaaaatcagctgacattcccctttctaaaagtctctatttttaatgtgtcttacttcttgatcttagctgatttggaaaacacagctttagcacaggcttccatatacaagctatcagaacagcatttgagaacaagggacatctttgtagcctattgctttgagcagcttcagtgagcaaaaatgtaggctaatgtggtccattggtacacttgctcacaatagagcaagtgtagactgaccagcttagagtaatgtgtatgtcatcatcatttgagatggaattgaagtttgaaggttagggaggaaagagagagaaatgttagggttaaataaaagattcacatataccatatttaatatcttttctcacaaaaccaaattaaactcactattttgagtgatttaattaaattaatcttgtcacagataggtcacctctagatgaaaggggataattttagattctgatttggtgctccaaaaatgtggttcagttgctagttattcagatacagccttggtttgttcttgtaaatgaatacagaatatatgtagacttttatacaaatatgggcctgtatgtctaatgctgataaaatccaagtacaataaacagtgtgacaaggatgaattctgtattcacaaagctaagggaaaattcatcagccaacatttattgaacacctctgagttatgcagtacgagtcctaagacagcaaatgcatttaaatctcttgttagagcataaacaagtaaaccaatgcatagagtgttggaaagctgggatagagatttggcccatctccattcccccatggcccaggtgcctaagatggaggaggagtcagaaatgtctcctgaaggagccaacagttgaaatgattctccttttgcacatacatttttaaaaaacaaacctttttagtgaattagaaatatacacataaacattaggaatctcagcagatagctaataaattgatacaaagtcaacccactcgtgtaaccatcactcatatccagaacattaccagagctgccatcagtaaccccaccttcttctccaaggacaccaccattgtgacttccaacgttgctataggttggttttgcctgtttttgaactttaaattgattaaatggcacagcatatatcttttgtgcctgacctctttcacttgacagcatgtttttgtgagatgcatccatgttgttgcctattgtcgcaattcattcattttctctgctgtatagcatttcattacatgaatatgctgcagtttattccattttactattgatgcttgtttgggttattaccaatgttagattattacaaataatgctgctcacaagtacgtgtcttttaatccatacctgcatgagttttgttgggtaaatatctacaagggaaattaaattgctggatcatagattatacttatagtcaacaaattacaaatagttttccaaaatgattataccaatttcattcatgcccgcagttcataagagtttctgttgctccatacccttagcaaaacttgaaattttcagtcttttttattttagctattccattggatacatagtggcaccctgttgagattttaagttgcatcttcctgatgactaatatggtagactgtgtttctgtatgtttattggccatttggatatcctcctgtatgaagtgcctattcaagcttcttgcccttgaactgattctgagaaggtgagtgagcattaggtcgagaaagcaggaagaagggcgtgtcaaccagagggagcagcatgtgcaaatttacaatcttcccagagcaggagagcaaatggatagtgcaaaatcagctactaaaaggctaaacttaatcagagcccatgaggtaatgacagcaacatcacccggatcaacatgaaataagacccaggaagtacaggcagtcccaaactgtaatatttattggatcctgagaaatgtttgacagtcaaatatctgaaagttgaacatggcttatacactgggaaaacaatttagttttcaatgagctaaaaggcagtattgcaaatctctagtaaggcttgtagtacagtttccctctggcctcacaggagtctcaggggaggctaccattagcaagtgacacaacacagcgagccccccctccatatttagtgtgggcccacttccattcccctgtcccttctgcacaaacaacctccaatctttaaaactactccccaaggcagcccttgagtatggagcaaaggagaggtgggacgaagtctatgtttcccctacaacagcaatgtgatctgaatagaaccttggccactgccatcatgtggccacctacacagactcctggacagctgtacccccttggaaaaggtcatgagaaacaccttcttgtaaaacacccagatatttcacggaagcttggccttttccactagcagcaatagctgtcaggcaggcccaccacgcaatagcttcaaattgccattcctcagaagatgagagccagaattcaggatgtgaaccgtgggggtggggtggagtcaatgcgcaatgggcaaaaatgtgtactctgtaaagtgttgaattatctgccggaagagggaaatgtcaacagaagtgctttgacccgcttgcctattgattagagagcagttctgttttgtggcaggcccttatctatgtcatcacccttctgtcactgtggacaacaaaagggcacagccagcttctgctacaaccaggctcttcacatgagaaggagcactctgggccctagaatcctcacaaaatatctcccttgacagaaaaatggctctcccaagccagtcatagactgtctaccatgaagccagagtagtctcagcctctaggagccagggtttccacccagatgcccagaaactgaagcaatcagatctggccgacaaaaaggaactttatttgggttactcagagaattgcaagtagttcccaggctttggatttaatggagtagtaagttttaagaaaaggtttcagtgacccatataaacttgccaacctcttactttctcaagttaagacatgtgactgtggtttctgtgaggttgtatttcagagtcatagctatcatttattatctgccatgtgtaaagctctgtgctctgtgatatttttccagaaatatctcatttgatcttcacaacatcactgcaaggtaactattaatctttatattaaaggtaaagagagagtctcagagagggtaagaaaatacctgatgccacacagctagttagtagcagagttatgttttgaacccaggcctttctgattcaaaagcctgtgtattttccactatatagtttatcccatctgaaatatgtctaaattattcagataggatttttaaacctctgatgttctgataatggctggaaatttgagatttatctttgtggagaggtttgggtttccaagaaaagtcttaagaaccttttttccttctgacatacttcaattcctttagtagctctccaactggactagacaatcctacaaaagcaaaagagaccctaattctatctgacattgtgacacaattttatgttaaacatatagatacgtacatttggtttgagatggaaggaatgaaacttctttaagcccattttgctgaaatgtgacttgaaatagattgttacaaaacaaggcttatgagaggttcagtgctcactgcaatattaattacttggctgttaaagcgaatagcttttagtgggaacgactgcctcacagatgtttcttattgacgacataaatggggaggaaaacactatcccattttcacttttggccagaaaacaaaagacaaaggaatagattgtgtcagctaatagattgggtcgctaaggtaaccacggcctgtctttcaggagaggttttaggggctaaattatgttacttcaaaattcacatgttgaagccccaacccccagtacctcagaatgggactgtacttgcagataggacctttaaagtttatgtgaggtcatacaggcggatccttatccagtctgactggcgtccttgtaagaaaagggagacatgccagagattaacgcccacgatggaaaggccaggtgaggccacaatgagaggggccgtctgtgagccaaggagcaaagcctcaggagaaaccagtcctgctgacaccttgctcttggacttccagtccccagaactgtgagaaagtgcgattttattgttaagctacccagtcttaacaaactaacaccagaagaattaggtattgggcatgccccctgccatcaatgccatgacagttaagggagacatcagtggaacttaatagatgagcttttactacccagaagggtccttaacagaggctgaagatcagctggagaaaaggtttttctgagagtaaaagggaagtcaaatagtgacgtataatgatcaaacctagtgacagatatcaactaggggtgtgtgtgtgtgtgtgtgtgcattttttttttttttgctatataatgtaccttataatactaatgtacttatgattattatccaacaattactgattttcccttattttaatagttaacaattgatgaaaagatttcactggctagagtactggtcaacagtgggggcttctgccagcttgcctaggtttgaatcttgtcccacaacttcctagctctgtgattttcagtaaacaatctccttgtgcctcaggttcttcatctgtaaaatggagataatagtacctacttcctaaggttatataagaattaaatgagttaatacatgtaaggtgcctagaaggatgcctggcatatagtaagcacctagtaaatgttagctgtttcaattttaacctatctctgcacaagaataacagatagcaaaaccattgtacctacattgtttcaccaagatacctgccagcaggtgccagctgccactaaaattgccagcatagaggtaaagaaaaataagcaacctggagaactggagctattaaatctgtgtttagagttatacaggttgctgacaaaaatacagattcctagggcttgtctccagagattctgattcactaagctggggtagagtccagcaatctgtttttttagaaggccatcttgggtaattctgatacaggtaactctcagaacatccattgagaaatactaatcaaaaggaatttcttctatagtcaaggctattaaattatggtaaatgccataacttactaatcataagtctataataatttttatttaaagtacagtgttgaaataaagtggtcttaggtgaatgatgagtatgtaaacttactttttaaaaaatcatctacttcatcacgcagttatcaagcctagtacccattagtgatgaaagaatctgtacaacaaaccccatgacatgggtttagctatataacaaacctgcacatgtaaccctgaacttagaataaaagttgaaaaaataaataaattaattaaaaaatcatctgaaagataatttccatgagttttaataaatgtattgataaaatggaagaataaattctgcattagatgtagccttcagtttctccatagacaaattatttcaagttgagccattcaaggttaggatgaattgtgcaatgcttccttcaggtttgtggcctgcctgtgtgaactgagttgaggatacatggagagccagggccttggagaaagggaagtagctgaacaaatgctgggctcattagcatggctggtgaaagtggtttcaatctgaaactgggcagttcaacctggaacttgacaaaatatgacagtgttgcctagggccaaaacgaagagtgaactctgggataaccttggaactgaaaaacctgattattgtgttatgagaaattcctaaaatcggtagacctgttcattacagggctgcagtgaatagccagtacttctttcccattggtcaagttgctgtgctcgctaagcagcaactgctcaggtcaggtgagagtggtcattattgaggaaataaaggttgggcccaaagaggacaaattccagattactgcagcatttgtgctgaaactcaccagggttaaattgatgagctttctgcgtgaaagaagggagtggtggtgatttccggagcttgtagccagggtgattagctcgcctgagtgttattagggtgttataaggagtgtttcttggttattcaacagtgtagttagtatcgtttcttttaagaaaaaaaattgattttaacacttgaataaaagaaacactgctgatattgtttatcttgaaagctttcaaatcggactccttgagatcttcacgctactgttaaggtaaagaggtattttgatactgttgattcattgattcttctgccttataaccacagaacatttactaagaaataaaaattaaggttactgaatgtatacttttgtggccatgtattatactgagatatgtatgcatatctgtgattgtatattatacttaagttataatttgtggtatatatatgtcatatatgccatcaattatttctaaggcaacgtgccgcagctttattaacgcagctgtttttcctaatgtttagattcaagtcaactaaagtaaatcttcctacatagcattcattcctgaaataaaaggcatttaagtaggcaggtgcttttgtttgagttttcactagatcttttctatcacctgaaagctttttgcattattaccgcagtctcattttatttagacatttgcctcgaggggctgagacattcttataccttcatacttaattccccaagacatttaaaaatgtaatttattattataaaagcactgtatatttcctgtagagtatttgaaaattatagaaaagcataataaaaaatcatccataattccattactcagttataactaccattaaaacatcacctactaatcttcctttcaagctctttctctctgtgtatgtgtataaacacaaatggataacatactctcaaattatatatggtcataggtagtttttccacttaacattagtgcattgacatatttccatattattaaatattcttcaaaaacatgattttaccaactgtatagtattttgttttaccaatatttcagattattttcaacttgttgtaatattaatcctccttgtgcagaaatattttaactcaactctgattgccttaacacagattgagggaaaactggagttactgactaaaggcagtgacatctgcagggatcttgacacatttttgtcaaattgccctctggaaacctaacttgtttgcgtgcccattagcagagcatctgtttcaccacatctccaagagggaatgtaaactttaaaacatatacaatagtcaaagaggatgtctcgttgcttgtatgcccttttcttttattactactgagactagacatattttctcatagtggttgacctataatcttaaggagagaacatattttttagcaaaattgtttaagatcaactattacaaattacatcttactcccattgcatctatgtcttcagagttgtactaattctcagcctcccagagtccattaagggaatttttttttttttttttttttttttgagacagagtcttgctctgtcacccaggctggagtgcagtggcgtaatctcggctcactgcaacctccgcctcccaggttcaagtgattctgttcctcagtctcccgagtagctgagactacaggcgtggagcaccacgtctggctaatttttgtatttttttttagtagagattcaccatgttggccaggctggttttgaactcctgacctcaggtgatccatgcgccttggcctcccaaagtgctgggattacaggcatgagccactgcgcccagtcccggctaatttttatatttttagtagagatggggtttcaccatgttagccaggctggtcctgaactcctgacctcaagtgatccgcctgcctcggccttccaaaatgctgggattacaggcgtgagccaccatacctggcctattaagggaatttcttttaatgaaggaaactgtattatgataataaatagcctgggcttgtgtgcaggagcaatgccaagccttgcagtttagccttctgtaaccctgaagaagttacttaaccttgctatacttcagcttaactataaaacagggttgataatacaataattctcatgagataggaatttttcaagcttttccagtaagaggtagctattattaaaaatgagaactgtttctctcctaattgcaggaaagccccaacagatataatcaaggtatgatagcataacactcttagaagccagaacttttcaagtctcaacaagttgcatgtttcacctcattattcaaccgtttactgggtaaaggagcagcatagatagtgggacttttttttaacggggtgtgaggaagttggcaatgagatggcttgtgctactagcctaagaatgacctcagggccttgcaggacacacagtgcttgctggtctgaggctgggcgcagtggctcacacctgtagtcccagcactttgggaggccgaggtaggaggatcacttgagcgcaagagtttgagattagcctggtcaacatggtaaaactccatctccacaaaaaatacaaaaattagcctggcgtggtggcatgcatctgtagtcccagctactcaggaggctgaggtgggaaaatgacttgagcccaggaggtcaaggctgcaatgagctgtgttcacaccactgcactccagcctgggtgacagagtgagaccctgtctcaaaaacaaaaacagcaaaaaaggtgctagctggtctggtacttagtactttagaaaagttgccctggataacacggtgaaaccctgtctctactaaaaatacaaaaaattagccaggcatggtggtgggcgcctgtagtcccacctactcgggaggctgaggcaggaggatggcgtgaacccgggaggtggagcttgcagtgagcggagatcgcacagctgcactctagcctgggtgacacagtgagactccgtctcaaaaaaaaaaaaaaaagaaagaaaaaagaaagttgccctggaactgacagcataagtcctcatccatttcttctcccttcttcccacagggtgaaagaaagcactacttcaatattgctgctaagcatatgatcattctaaggtcattacaagaatttgacttgcctttagcattgtgcttgtgtgtccatctgcctgtctctctagggatttagattttcattcaaagatttttctgtcactgagaatttaattcttggtatatttttgagagtgtaaattttttttcaagatttaaaacaataagcttcaaatgttagattgtatctagagtcttccacactgaggatgtgaatatgatatagactagctgttcaccaggctgaccaggttgactgccaaatgggttgttagtagtgccagaggcaccctgacatcactctctgaactgctttctctttcacattcttgtatttttccagctgacggcccagagggtgggtgccaattccaccagcagctgcaactgaaaagcaaggttcagaaatgtcagatatcctccgggagctgctctgtgtctctgagaaggctgctaacattgcccgggcgtgcagacagcaggaagccctcttccagctgctgatcgaagaaaagaaagagggagaaaagaacaagaagtttgcagttgacttcaagacgctggctgatgtactggtacaggaagttataaaacagaatatggagaacaaggtaagaaaggtcatagccaaggtaactgcaaaatagttgcatctgtggctttctccatcatagaatagcatgccttttgctcctcacccctatcagtatactagcaccttgatttcaagtaaacatcttggattttcttcctccttgtcatgattacagtattgataaaatgttcattgcaggaaatctttaaaatacagaaaatgaaataagaaaataaaaatcactcacaattctaatacctagaaataaacacttcagtatagaaccttccacttactaatgaatttcttcttaataaataatacatgttttctggaaaataagcaaaaataagaaccctcttagtcccaccactggagaaaaccacagctatgctttgataaatattataacattttccttctatgtgtatgtgtgtacatgacacatacaatgtattgcaacagaaataagagcacactgctttgtaacctgttttttttttaacttgatatgttaagtcctaccttgtggatctcatcatttatctagtggtttcttcagttatgagattgtagctggagacttaaagtctcctttattctagtagaaaaatactgttctttgttataaacacacaaagatgtttatatgttaatataacaatgattacgactctttctggagctgactagagaaaccgtattaataagtagaaataataatactagcagcacttataaatgctatgtgccagccactattctaaagtcgtcgttaaatatattaacttatttagctcttataacaatttgatgaagaactactattacaatgcaatgggtgaaaaaagggaggcacagagaggttaagtaacttgcctaaggttgcacatcaagtaaatggtagggccagtttttgaacacaggcagactggctccagagtctgtgttctttgcaatattatattgccttttatatgataatctaaccattacatttgggagaatagaactttatggcagaaagcattataaaatattgaaataatttctatgaaattttcaaaatattgagaatcatttagaatcgtttcagtgaaatcttgaccacaggcgaagagatgaaatgccatcatgaaatctctacaaactatactttttcatgtcatataaaatcttgctccgataaactaaatgaagcaaatttatttttcttttttacttatcaatatagttgggtgcaagggatggttgagcaactggattaaaaatgtatcaacattaatttttatgggctaatatttgcctcaaagcattataaaaatttcaggcagttgtttattcatgagctaaaataaatgatattccattttagctgtataaaatatctttatttcatgaggcttttgtcttgtaatctcagaactggtctttaagcaggcttgggagactgagtttcagcccttgatgaatgggctggttgccagcccttgttgatttgtactgtcccacaaaataatatgaataataagtgttgtgggcattattaaagctattggtcatctgcaaatgaccgagttcaaatatttgaagcacgtccttgcttttgttccctgagaatatgtgtatcaaaatttaggacatattttgagaaaaattatctttattacagagaggatcagaagcaaaatgcatcagaaagcttcgtgatcatacagagatgacagaagattcttacttgactccatttattcactctatatattgatacttaaattattggccaataaaatctttctcttttttcatatccccttcctagcctgaatgatgatacatctgagagtggggaaacaaacgcctgaaaataaaaacaaaatcgaatgttatctatcctctaattccttctatccagtctcaagtcgtgcttttagatacttgatcaacgaaattgccttgtataagctactgggatgttgtttaagagcaatagttaaaacatgtcctttgcaaatattcgaattctatggcccttaagtagaaggatgaagtttctagaagtacttttgcaaactaaacaggacataagggaaccaggcatctaccatgattttgactttctagaggggcaaaagaacagaaaaatattagaaaattaagcactgagccaagttgacttcgtttttttatacttggattggtttctagaattggaaattttggaatttcagttctgattgtgctatttaatttgaaatataaaattgaaatctgttcagaattgagcatatgtgtgggtttttgttttgtttttcgtcatactctgaatcattcagtttccaggcttggaaaaaaatatttttggagaagaatccaatgagtttactaatgactggggtaagtataagaatcttaatgtgtctttgtaatttaattatcatatggtattctagtctctagtttataccatgaactaaatgtttggaagccacttactgtaaacaacataatatatttgaatgttaaggttcattcaatttctacctcagaatatcatgccatttaacttaagtagagagatgtggtatcttagaataatttagcaagtccatgtatcattttagatataaatctgtggcatttaagtaacttataactcaagctttgggaaaattgcatggccctttgggaatctaatgtaagttattaatgccccaaagatgcccatctacaaaattatgcagacaatttcagatcctaggtttaaacccatctgtgcgctcttgggggaagtccatggaccttggctaaaagtacagaggtggccatggttctgaaatactgtgtgatcttgagcaaattaactcatcatttctctaagtctcagaacctctgtgaagtacttggattaactaaaagattccttttagtactaagttttttggtttgtttgtttgtttttgagacagagttgctctgttgcccaggctggagtgcagtggcacaatctcggttcactgcaacctccacctcctggattcaagccattctcctgcctcatcctcctgagtggctgggattacaagcatgtgccaccacacctggctaatttttgtatttttagttagagatgggatttcaccatgttggccaggctggtctcaaactcctgacctcaggtaatctgatttctttcagagaaacaatttttttttttagtttgtttggatttaatagtagaagaataaaatagtgaacattaaatactgatcatgtgacaaatacttatatatctagaaacacaattacaaagaaaaaatgagtttctagattaactctgaaaattttttagtctccttcatgcaccacatattaagatgcagttagttctatgttagtaatacgggaaagaaatcttttaaacctctgaaggttaaaaataacacttatgcctgacttataagcaatcttacatttaaaaatctacgcttgactacttcacaaacagctattttaatacatcatttgtctagaattatagaggcaaaaggcatagccacatccattttcctgtttgttaaaagggcagagaaatgtggagagaggaagaggagagatggtgatgatgatattgcaggcaagaccagatcataggaagggatttagatttccctctcagtgggatgggaggtctctggcaaatttcaagcaaaggagtgatataatttcttcctttgaatgatcccataagttttactgagcccagagtaggtgtgcagtaagtagccattattagctttattattccccaactttaacagtctaatttactttgaattaagttaatttaactaaatttgactgtttcttgctgattcagtcatcactgtaatagatgtatattgtgcttcccacactttactggtcatgtaatcgcctcaggatcttggttaaaattcagtaggtcggccgggcgcggtggctcacgcctgtaatcccagcactttgggaggccagggcgggtggatcacaaggtcaggaaattgagtccatcctggctaacacggtgaaaccccgtctctacttaaaaaatacaaaaaaattagccgggcgtggtggcgggcgcctgtagtcccagatactcaggaggctgaggcaggagaatggcgtgaacccgggaggcggagcttgcagtgagcggagatcgcaccactgcactccagcttgggtgacagagcaagactccgtctcaaaaaaaaaaaaatttcagtaggtctggggtggcatctgaggttctgattttttttttttttttgttagatggagtctccctctgttgcccaggctggagtgcagtggcacaatcttggctcactgcagcctccgcctcccaaattcaagcgattctcctgcctcagcctcccaagtagctgggattacagacatgctaagctacctgccaccacgcctagctaatttttttatacttttattagagacaggggtttcactatgttgaccagggtggtcttgaattcctgacctcaagtgatctgcttacctcagcctcctaaagtactgggattacaggcatgagccaccacgctcagcctaaggttctgactttctaataagctcccagctgatatagacactgctggtccttggaataagaagggtagaagtagctacctagatagctactagatagctaggagtatctaaaacgttccaaagtgccatgttttcttagtttttaagattttttttcctccactgctgtcacttcttgttgctattaacttgcctattttttaccagcctcttccctcacttctgtcaagggctgaaaccagattaatcaagggtctaagaagcatgtttaaagcgatggtaaagcacctggcctcggtaacttatcgtttcatttgaagaagcagctttgcttatgttctggttctcaatgggctccacagaggagagctatttatatgtataccatttagaggcataaagttttactacatttaaagattggtatataccattttatgttacttagcataaacaattttaagttaaaagcaatatcatataaggaggtagaagcacttcggtgtgttgaaaaacctccattcttttcaataacatattcagacacggacagggtgacttaagtatataaaaagtcaaaagacaaattttaaaaagattaatgatcaggaattcaggaattgttaactggcctatgtatcccttaactgggatacaaaattgtgcccacatgggcatttttctagggaggtcttttgattcctgaaacccatctcttactattcaggttaagtgcctgggtagccactgagcatctgacttgatgaagccccaccaggtgattctggcagtcagccaggcataggaactgctgggatggatatattgccctcaatctaagtgcacagcttttgattcactctctcactggctcactctctctctgtctctcttgcttgctctctcgctctctctgtctcaatctttgtctcattctctcgctgtctctctcgctctctgtctctcttgctctgtctctctctgtgtctcttgctctgtctcgctctcttgctctgtctcactgtctctcgctcactgtctgtctcactcttttgctctctctcgctctctcgctctgtctcgctctctctcgctctctcgctctgtctcgctctctctcgctcgctctctgtctcactcttttgctctctctgtctctctgtctctttcactctgtctctctcagtctctccctgaatctctcgctctctgtctcgctctgtctctcttgctctctctcgctctttcgctgtctctctcgctctttgtctcttgctctctgtctcttgctctgtctcgctctctcgctctgtctctctcttgcttgctctctgtctcactctttccctctgtctctttcactcttcctgtctctctctcgctctctgtctctctcgctctgtctcactctctctgtctcactctctcgctctgtctctctcttgcttgctctgtctcactcttttgctctgtctctttcactctccctgtctgtctctcttgctctcactctgtctcactctgtctcactctgtctcactctctctgtcttgctctctctgtctctcgctcttttgctgtgtctctcgctctctctgtgtgtctctctctcactctcttgctctgtctctctcgctctttcgctctgtctcgctctctgtgtctctcgctctctctctgtctctctctctcgctctctctgtctctctcactctttagctctctctctctgttctttctccactgaaactcttgaaatgtaatggcttatcgtgtggctttaccctaggggaaaagattaccttgaggttgtgttcaacagaggaggaaacagcagagcttcttagcaaagtcctcaatggtaacaaggtggcatctgaagcattagccagggttgttcatcaggatgttgcctttactgacccaactctggattccacagagatcaatgttccacaggacattttgggaatttgggtggaccccataggtaagtataggaaagtatgtttgttcttatttgcaatcttttttttggtggtggggttggggatgggtgttggaaaaataaaaattattgagtgtagtttaactctgctagaagtttttaaaattttaaagttttaaaacaatgagagttgaggtgtatgtgtcatgtgttctgtatatatacatatatattatagccgtgtgtatatatatacatatctataacaggtgtgtgtatatacacacacatacatacaggcacacatgcaaagatgaattaacttctcttcaaaagacttcagggaccagactggtaagtaaatgagagaatgaagtgagagcagttatgaccaattgagcacacataccatttaaagagcacttagctttagcagattgttaccatatgggagtacaggccagctcttcagatttttaaagagaaaccaaaatccaaggttttcagcgatatatcccaatttctaaccgttagctactaattcagttaaagaaggaaacaatcaaaaaaacacagtacaggtcaagcaaaaagctgaatgtgacgcatgagcagtttgtgagccctgcatgagctctacattttttttggtcatgattgtgatagaaccataatgtataatccattgttttgaaaatgtaacccttttttttgagacagagtctcgtgttgcacacaggctggagtgcagtggcacagtcagaactcactcactgcagccttgtcctcctgagctcaagcaatcctcctatctcagcttcccaagtagctgggacccaagtaggtggcagagttgcatgccacctcactaggctaattttttatattgtttttagagaaggggtttttaccatgtttcccaggctggtctcgaactcctgggttcaagcgatctgcctgccttggcctcctaaagtgctaggatgattacaggcatgacctaccatgcccagccagcctttatcttcaatgatgctattaatacaagttctaggtaataattttaataagctcccccttccttttttttcttccccacccaacacaatgggaccattcaaggaccaggcaaactcctctctgggcccttcccatcctacaagtgcattcacaggatgatactgaaatgggtttaatcttcagataattatatcacattcagccagtggatgatatatggaaactaaaaacctttccccaaatctttgatcatttaagggtaaattggcatcagttatagtttctgagggacagagatctcctgtttcttggttccaccctgaattgattctgtttttgagctctttgagtcttttgccaggcacatccttagccgtgtgttgactccctagacgtcagcagtcagctgctggcatgtacatctcttaaggggaaacctagtttctctgcctctgtttcataggagctccgttaatttctttttttggtgccaccatcattgtctctttcttccttctaacttgagggaccaaataataatagtaaaagataatattacctgtgacctattacagaaggggggcttttctttttttcttttcctttttaaaatgtttgtgggtacataataggtgtatatatttatggggtacatgagatgttttgacacaggcacacaatgtgagataagcacatcatagagaatggggtatccatccctttgagcatttatcctttgagtaataaacaatctagttacactctttattttaaaacgtacagttaagttcttattgattatagttaccctattgtgctatcaaatagtaggtctttttttttcacccattggaaggaggcttttccatctcacattgtactagtcctctgattagtagtatttctaaaataatcccaccaattattctggttattactttttcaatgcttttgataagtaacaaatatttgaatgcctgttatatacaaattgctatgccacaggaactatagacacatcctctcccttcaagagttctcacagtcaggaaaatgaaacacaagcaatttaaaagtaaagtacaagaggccaaataacaattcaatacagtgacatccaaaggtaaaaaattattggttaccaaatcagtagaagagagaagtcatatggaacagagtcttctaaatgatctttacctgaatccaaacacatttgtttcctttttcagattcaacttatcagtatataaaaggttctgctgacattaaatccaaccagggaatcttcccctgtggacttcagtgtgtcaccattttaattggtgtctatgacatacagacaggggttcccctgatgggagtcatcaatcaaccttttgtgtcacgagatccaaacaccctcaggtaaaaggcaaatatttttggtatattatggttgttagaacttacgacctcagctttgcttgttgttaggattatcactatatgacattcccatgacttaacacatgggagtgttgccattgaaagtctgcgtatttgaattaaagttctattttcaatcttggatttgcgtaattttatttcaggccaagtgcatgctggtagaaattttaaaattaatactatcctgtagaaatcatagttttacatttggaatatagtaatcctgttccctgtttctagaatccactcaaaaccagataagtagagtggtggtaacactgccttccaatacattgggaataagacagctgccatcgctgtatagccagttgaactttggtataattttagaagttcaaaacaaaatgtgaaaattatccaatgaaaagattggtaggcatggccaggatcagaacctaactcacactccctttctgcctcctcccttccactcttccatgcactcttaaacagagcgtagaaagtggccaggactcagctgcctctgatccatggcctgtgctttggggttgactccagggcatggcaaagtccaggtggaacaagcagttcagctttttattgaaataggtcatattttttcacttatataggattacatatttttattgaacctgagctgcttcaagtaacaatcatttgctctttaatagtcataagtttatacctcttaagttttaatattttccccctacccccaccatcttccaaactaaaaataggtttctgctatctttaaaaggttaataagaaattaaaaagaattggaacaatatgcagacataatcatggcctagaaatggaggtggtcaacaaaatagtttatggcacagattcagagtgagactttgtgggtttgaatgcagattctaccactttctagctgagtgggcctcagcaagctacttactttctctaagcctgtttccttatctgtaaatatgtaacaacatagacagtaagttaagcattgataaagggaaggtgctataattattgtggttgccaaaactaataacattgagtccatctttctttgtgttggaagccaacgtgaaactagtgaataagagaatgaaaaggagttaccaaataaagaaaaacttgttatagggattgtagaatatttgcagatcaaaaagagatatcacttttctattcctttttccctactaaactttaaatactaaaagttgtaatgaaattttgcaatggttctggaagctggaaaccccataaatgttttagtgttgtcctagattgatgtgataatgccataaaattgaaagcatttctaattgcaacaactcaggcagctgcatgcatataagtaactttctgaaataaactagctacctgatatctattcctagacttaaaggtgttaagattcaccatgttatgatgaattgtgtatttcttcgtatcattaagtttgaaagtgacatgagtaatgaaaaacaaatgtgataatcatcaccaattgaaatttttcttctacaggtggaaaggacagtgctattggggcctttcttacatggggaccaacatgcattcactacagctcaccatctctagaagaaacggcagtgaaacacacactggaaacaccggctctgaggcagcattctcccccagtttttcagccgtaattagtacaagtgaaaaggagactatcaaagctgcattgtcacgtgtgtgtggagatcgcatatttggggcagctggggctggttataagagcctatgtgttgtccaaggcctcgttgacatttacatcttttcagaagataccacattcaaatgggactcttgtgctgctcatgccatactgcgggccatgggtgggggaatagtagacttgaaagaatgcttagaaagaaatccagaaacagggcttgatttgccacagttggtgtaccacgtggaaaatgagggtgctgctggggtggatcggtgggccaacaagggaggactcattgcatacagatccaggaagcggctggagacattcctgagcctcctggtccaaaacctggcacctgcagagacgcatacctagaggaactctaaccccggtgtacctgtataaactgaactgtgaaactgtttcggttatctctgtcttttgaggatggctttgtcctgttgctggttaacattcaccttcctcttttgaggagtatttttccattatgtattcataataatgttaatttcaataaatgacattcatgcagcaattatattggtgtatgaaattcttacagtgaatattgtgctgttagtgctgcttgaaacatttcaataaaatattgaccaggagcagtggctcatgcctgtaatcccgggacttggggaggccaagacgggcggatcacgaggtcaagaaatcaagaccatcctggccaacatggtgaaaccccatctctactaaaaatataaaaattagctgggcttggtggtgtgtgcctgtagtcccagctactcaggaggctgaggcaggagaatcgcttgaacccgggaggcataggttgcagtgagccgagattgtgccactgcactccagcctggtgacaaagcgagactgtctcaaaaaaaaaaaaaaattgatgaacgaggaaaaaatcctgttaaattagtaaaactatgctaaacatctaagcgatagaaatttctctgaaatataagggagaatacaggaggggtttgcttgagttttgtttcctctcgaagggaaaaatctgcaattttagcctgttggcagaacatttagaacttaatctgcgtaagttagccaagtttatgtacttttaacagtattcttgtatttcttataggaagtaaagcctggaacactgtgggctccccctttgcagagacagggagagacagggatacacacacacacacacacacacacacacacacacacacacatacacagtgaaagacacagacaaacagaaagacacatatacacacacagaagcaaaagagtacaacgagtagaggtttctgcaatttttgcatatttactacactttaccaaaaaccagaggtggactttagatatatacaacccttgtgtaccagcatcccacagtgaatgttctctgaagtggacataaagtactttttctgtattctctgtggcaggcctggtaaccagagagtgccaactgcagggatcaaatcctcggctctgacttcattctgccctacgccccctgggggccaaaggatgtttctacagatcctctatttacaaatgcatgaaaataacaatcttattttctaatgtccttacacttaaaaatttttgacaaattatgtttatgtcatatgatatgatgctttgacatatgtatatattgcagaagggctaaatcaaactaacattaccttacatttttttgtgtgtgtgtagtgagaacacttaaaatctgttagcaattttcaggtaaacaatacgttgttattaactatagtcaccacgtcataggatcttttgaacttattcttcctgttaactaggattttctatcctttgaccaacatctcccaaacactccagcccctgataaccaccattctactctctgcttctgtgagtttgactttttcagtttccatgtgtaagtgaggccgtgtggtatttgtctttctgtgcctggcttattttacttaacaatgtccttcagggtcatccaaatgacaagatttctttttttatggcagaatagtatccattgtgtatacatattaataccacattttctttacccattcattcatatcttggttgatttcatatcttggctattgtcaataatatcaaaatgagcatgggagtggaggtatctctttaacatactgatttcttttcgtttttttttttgtttttttttgttttttttttttttgagatagggtctcactctgtcaccaggctggagtgcagtggaatgatcatggctcactgcagccccaacctcctgggctcaagcgatcctcccacctcagcctcctaagtagctgggactataggtgcatgccaccatgcctgactaatttttgtgttttagtagagatggggttttgccatgcttcccaggctggtctcgaactcctagggctcaaatttctcaattggaggggtcaaaagctggatggaagagggaatcattatattctgtgaacatctataatgtatattattcaccatcaatctttgcagaaaagccaaagccctttctttaagcatgtgcctctgatgggtctgcattgtttttcttgcagaagccacaaccaggtgactatgatttctagttttattttctgtagaggaagaacttaaaaatattccatttttacagtggtgtttgtttttgagacagagtcttgctctgtcacccaggcttgagtgcaatggcacgatcttggctcactgcaacctctgcctcccaggttcaagtgattctcctgcctcagtagctgagcataaatctcagctactctcctgagtagctgagattacaggcacttaccatcatgcccggctaatttttgtatttttagtagagacagcgtttcgccatgttggccaggctggtctcgaactcctgacctcaggtgatccatccaccttggcctcccaaagtgctgggattacaggcatgagccactgcgcctggccacagttttcttaccaactaattttttggttcacctttacccacacttactaaagcctccaattctttgttttcaaacccacactccattactttacgttatattaatttaattattagaaataaaattggaatatagagttgtggaaagaagtaaacaatttttttttttttttgagatggagtctcactctgtcacctgggctggagtgcagtggtgtgattttggctcactgcaacctgcacctcccgggttcaagcaattctcctgcctcagcctccctagtaactgggattacagatgcctgccactatgcccagctaattttttgtatttttagtagagacagggattcaccacgttggccaggctggtctccaactcctgacctcgtgattcacccgccttggcctcccaaagtgctgccactgcacccggtcaacaattcttggtatgcaggcaatttatctgatgggaacaggagttggaggtagtgatggaggggtgttctacagaggagcctcttggccatgaaagtcaagtgtcttttgcatcagtctgtgttttacaggaggatggatagagagattagtctgccaggtcacttagacacagagtagtacaaagagagcctcaactgcacatcaagaagagcagtctttgggaatccaagtcaacatcccttcctttcttgctctcacaacctatatgcaatcactcaggaaactctctggtctccactttcaaaaatatatccagaattcagctattccacatcactgtcctataccccaccctgctccatgcctttttatgcatcacctggattattgcaataaacttctaacttgcctccatactgttcattctcaagacagaagccagagtgatctttttcaaacacagatcagatcatgtccctcttctgttcaaaattctccaaagcacaataaaataccatcttacaccagtcagaatggccattattaaaaagtaaaaaaaacaaaaactgatgttggcaaggatgtggagaaaaagagatgcctatacactgatgatgggaatattaattagtacaacctccatggaaaagagtatggagatttctcaaaaaactaaaagtagaactaccattcgatccagcaatcccactattgggctacccaaaggaaaaacaaaataatcacctcaaaaagacatttgcactcatgtttatcacagcattcttcacaatatcaaggttaaggactcaacataagtgtccaccgtcggaggaatagattttttaaaaatgcggtatatacatatagaatactactcagccataaaaaaaaatcatgtttcttacagcaacacggatagacctggaggccattatcctaaatgaaatgacttagaaacaggaagtcaaaactgcaggttctcacataaaggtgggagctaaataatgggtacacatggacacacagtggaataatcaacattggagacttaaaaaggtgggagtgtgaaaggaggtaagggatgagatgctacctatggagtacaatgtgcactgtttgggtaatgggtacattaaaagcccagacttcattgcacaatgtatttaaataacacaactgcacttacgcccctaaacctataaaaagaaataaatttaaaaaggaaaggcaaaaaatgcttccaaatgtttcctcggctctcttagggaaaaagccaaagtcctcatatagcctataaggcccacattccacccttccttctcatcttctcttactctctgctatggtctaaatatctgtatccctcccctaccaaattcatatgttgaaatcctaacccccagggtgatggtattaggagacagggcctttgggaggtgatccagtcatgaaggtggaacccttatgactgggattagtgcccttataaaaggggcctgggagagagcccttgaccctttcaccacatcagggccagcaagaggtgcagtctgtaatccagaaagcaggcccttaccagacactgaatctgcttagatctgggacttcccacccttcagaactgtgagaaataaatttctgttgttcaaaagccactcagttcatgacattttgttatagcagcccaataggctaagattgttcacattgttacagccacactgcctttcttgctgtgccctgaacttgccaagcatgcttcctctgcctcaggacctttgcacttgctgttctaactggaaacctttctccagatatcagcacatttccctccctcatctccatcaaaactttgctcaaatgtcactgtatcagtatgatcttcacttattgccacccacctttccccaccccatcctgcacatcccatctccttccctgttttgccctccatagtacccatggcctccttatagaagttaaatttgtcttgttagtctctccctctagaatgttggcttcaaaaaggcagggattttcatatattatgtatctccattgcctaggcacattgtcagtgttaaataagtggggacagaaggaattaggctcagaagctgaacaagaagtaatatgcagtatcaactacatctttacttctacccattatttccaaaacacttcagaaacctttgctataatgctgagaattagtcctacagttggtcagttaaattctcaatgtcaaacaaccactttaatgttgaaagtaagccatggacttttgtgacagaacaagcattggcatattaccaaagctaatattcaagtcctggctatcagccctataaagaggtaagaggggaaagtaatggttaagtcacttttcttccactctcatggaacagagaaagaatgagagcttacaataactagaatacaaggaaactggctatttctccctatagcaaaagctcagtccttccagctggatttgagaatgggttgcctgagacgcaatgtttaaattcacccacgttgggtcaagtatttctaaaagcaggaagctctatgtcaagatggcttatcaccctcaatctttcaaacaagctcaaactatgaccatagtaaattagtaggacaggtgttgggacaaactcatcatgtggttaaataaccgtatcaaggtaggcaaaataatgaaaagacagagttcatacattatttcccttaggatataggcaggagtgtcattaaactcggaaatttgtagctgtttctttttccaccaagacagatttttaaaaatcaatttatcacactaatataccatgaggtaggccatgcatgtggcagtttagtgctatggttctttaaattctaatgattatgatctgattatgcagattatcctgagaatcattatctaatctacaggtaatctagatttacactgcccaaatggtagccactagcctcaggtggctattgtgcacttgaaatgtggctagtctgaattgagatgtgctgtgaacatgcacattggattttattttaaaataatgtttaaattttatttaaaaataagaacatcataattctttatattggttctaatgtgaaatggtattttgggtatgtagggttaaatcaaatatattgccacaattagttctacttgtttctttgtgcttttgtgaatatagctacaagaaaatttaaaattgcatgtgtggcttgcattatatttctatacagcactgatttaaaccctcaatttttgtctgttagtgcctgactcatgtccattttactttttttttttttggttctttcaataaaccacccagctaaagaaaagtataaaacccaaatcattcagatttgcttatctttaagcatctttgataatttttttttacttaaaaacatattttgtagagacagggtcttactgtgtagcccaggttgttctgaaattcttgggctcaagtgattcttccatcttggtctcccaaaatgctgggattacaggcataaactaccactcccagccaggtttttcacttaaaaaaattgtggtaacatatacataacctaaaatgtaccattttaaccctaagtgtacagtttagtaacattaagtgcattcacattcttgtacaaccagtgacatcattcatctccagaacttcttcatctgccgaactccataccgattacataactccctatttcccccatccccccaccaggcactggcaaccgccattctactttctgtctctatgaatttgactattctaggtacctcagataaatggaatcatacatttgtagggttttgttttgttttgttttgttttgtttgtttgtttgtttgtttgtttgagacggagtctcgctctgtcgcccaggctggagcgcagtgacgcgatcttggctcactgcaagctccgcctcccgggttcacgccattctcctgtctcagcctccggagtagctgggactacaggcgctgccaccacgcccggctaattttttgtatttttagtagagacggggtttcacctgtgttagccaggatggtctccatctcctgacctcgtgatccgcccgcctctgcctcctagagtgttgggattacaggcgtgagccaccgcgcccagcctttaatacattttctacacttcctttcgcctgttactccgccagccatctgcttctacttagcatcatctctgactcagcccaactgttcctaaggactgggtcctacactcagtagagtctgaagatcattgtactgggtatcagttgccaatcttttgctgtggctcctgaccccttttgtaacaggctcctggcatgagattgtgaagtgccaaggcatgagtattttcgtaaagggttttctgctgtgttaaaatgattggagtatgaaaaacaaactattgaacctcaatgaacacaggtccctaagggagccctgtgttcggaggaagtccagcaagaataagtctgcagtaatactctgtatcagtaaccaataggcttatctaggagaggcagaaatgacaaaataacaatggcctaagtaagatagaagtgatttctccctcgcttaagggaaatggagtggtaagtgcgtccagagctgaaaggcggctctatcctaaagtcctcaggaactcacgctccttccatctcactgctctcccatctccagactgtgacaacaggatctgcattttgggcagcaagatagagggaaagacaaagaacaagaaaagggtgaatgatttttcattcctttggccagaaccttgtcacatgagtacacgcggctacaagggaagcttccattctcagaagccatgtacgcagccaaaaactaggagttttagcacccaggaaacaggcatttgaggacaactagcaatctctatcactcaccacaactgagctgtcccagcttttaccctctgattacatcccttggacttatcactgaggtctcatgacattcatagcccgataatttaaactcttacccacattgacttatctacttatgatgcatttatccacttcatctcccaaagaattaaaagtgccctaaatatgtgcattcatcaagatgataaggaaaaggaacttcctagcaacaaaagcataatggaaataaaagagaaatgcaagtacagttattcctctcatgagacctatgagaaatcgctgagaatcttgaccctggcaactcgcctggacgcctgctgacccctcctctccaaccacaccttctgcctctgtgtgttgagtgctcagaatgcagacgagcttatgtcacatctctactgtgtacatacactctgctgagccattccacttaaggagtctgtacactcagcgcaggccacaaactgggcatgactcctggcctcatattcacagcccggagtatgctgttattttcatcagcctttaaacacccctactgtaccaaaaacagcactgcccatcccatggcagaaaagataaaatacggaggcacacatttgctgtttgcccaaatgggaaagaaacaaacaaacattttctacatttttcttcctatttccaagttttcttctttatgtttttctttaagtgctaaatgcaaaaagagagcataaacagtaagttgttacctttaccattcatgctgagcagctctaattgtacctgggttggcaggtaggttgaaaaacatgtttctaaagcaaacttaagtaactgcaaatgtcctcctaaaatgccagggaactcaaagcctgggtatgcatgcaaatagacctttgaaactggtctgatggagcggctgttttgatcatggacacctttaaaaaaggttttttgtttgtttgtttgtttgtttttttcagatggagtttcgctcttgttgcccaggctggagtgcaatgccatgatcttggctcactgcaacctctgcctcctgggttcaagtgattctcctgactcagcctccagagtagctgggattacaggcatgcgccaccacacttggctaatttttgtatttttagtagagacagggtttcaccatgttggtcaggctggtcttgaacttctgatctcaggtgatccacccgcctcagcctcccaaagtgttgggattacaggcatgggccaacgcgcccagccaaaacaggttttatgtatttattatttctatctgatactcaaggctagcccaagttctggctctaacaaaatgcctataattctaaatatgatttttcttttctagcctgtattttcaaagttcctcatcttaaaggagccttgaacatgtaggattaagagctttctccctttacccatttgcaaaaagcaaaccagtcctgggctggctatatggtcttatgacctgtgccggctcacaaagctccaccctcaaaaatgtgccatgcttggttctgctattgccatgttgaagttcttaaaaattttaccttcaaattcataagttttgtaagtgaatggaggggcaatggagcatgtgcatgaatggaggtgttacgtagctctgaaaatattccaaacactttctgcgttaagtgacagatgttttgctgtgataagaacatggagcatagtccccttccctgtcagaatgttacatcacacttttccagaccacatatgtgagttattggcctcaacgactagactccaaaacacatataaacccaagattttggcagacagattgagagctcaggctgcaacagggctaatctctgtcagcctttgagctagctttcaaagcctcgccagcccacacagcactggcaccacttgctagtgtccagggatcttacaagttgtctcggatctccctcacatccacagaggcctacttccattctaagcaactaaactgtaatcactggacttgaaatgaaattataactaattatgtggataatgtacctcatctgcggagtataatctctgcgagatttgttcttgttatttcccccctctttgagcattaaaaaaaagaatctctttgtatggcaataaaccatgtgattcctgaaatcatactttgatcatcttcttattgtagccataccaaataggaggagaaatgtacaaaatgtgtgtgcttcgtcccc

SEQ ID NO: 507 - DNA, 2019 bp, Homo sapiens
gaatggaggaggaagatttaaaagtgaattcgtgggcggcgacaaggaaacagcagccgtggccaagctgaccccagagcccttcccttcctggccctccctctgaatcatcgcgctccacttgtgacgtcgcggacgcccggctcgggcaggcgtggggggcccgcgcgtcccgggagccccgaggcggcagcgcgcgtttccacgccgcggtcccgcgggaaagccgggggcggcggcctggctgaggccaagctcggatccggtgccgagccaagcggggccgtgcgtcgccggggcttcgccttcgctcgcgtgacctccgccgtcctccccaaccctcgtcctctggccgcgcctgcggccgcacgcccagcgcccctcgcctaacctcgcgcccgggccgcgcctcctcctcctcctgctccccgccgcttccgtttctcgagggaaaggctgctgcctcctgctctgtcctcatccccggcttagctgacggcccagagggtgggtgccaattccaccagcagctgcaactgaaaagcaaggttcagaaatgtcagatatcctccgggagctgctctgtgtctctgagaaggctgctaacattgcccgggcgtgcagacagcaggaagccctcttccagctgctgatcgaagaaaagaaagagggagaaaagaacaagaagtttgcagttgacttcaagacgctggctgatgtactggtacaggaagttataaaacagaatatggagaacaagtttccaggcttggaaaaaaatatttttggagaagaatccaatgagtttactaatgactggggggaaaagattaccttgaggttgtgttcaacagaggaggaaacagcagagcttcttagcaaagtcctcaatggtaacaaggtggcatctgaagcattagccagggttgttcatcaggatgttgcctttactgacccaactctggattccacagagatcaatgttccacaggacattttgggaatttgggtggaccccatagattcaacttatcagtatataaaaggttctgctgacattaaatccaaccagggaatcttcccctgtggacttcagtgtgtcaccattttaattggtgtctatgacatacagacaggggttcccctgatgggagtcatcaatcaaccttttgtgtcacgagatccaaacaccctcaggtggaaaggacagtgctattggggcctttcttacatggggaccaacatgcattcactacagctcaccatctctagaagaaacggcagtgaaacacacactggaaacaccggctctgaggcagcattctcccccagtttttcagccgtaattagtacaagtgaaaaggagactatcaaagctgcattgtcacgtgtgtgtggagatcgcatatttggggcagctggggctggttataagagcctatgtgttgtccaaggcctcgttgacatttacatcttttcagaagataccacattcaaatgggactcttgtgctgctcatgccatactgcgggccatgggtgggggaatagtagacttgaaagaatgcttagaaagaaatccagaaacagggcttgatttgccacagttggtgtaccacgtggaaaatgagggtgctgctggggtggatcggtgggccaacaagggaggactcattgcatacagatccaggaagcggctggagacattcctgagcctcctggtccaaaacctggcacctgcagagacgcatacctagaggaactctaaccccggtgtacctgtataaactgaactgtgaaactgtttcggttatctctgtcttttgaggatggctttgtcctgttgctggttaacattcaccttcctcttttgaggagtatttttccattatgtattcataataatgttaatttcaataaatgacattcatgcagcaattatattggtgtatgaaattcttacagtgaatattgtgctgttagtgctgcttgaaacatttcaataaaatattgaccagga

SEQ ID NO: 508 - protein, 397 aa, Homo sapiens
MSDILRELLCVSEKAANIARACRQQEALFQLLIEEKKEGEKNKKFAVDFKTLADVLVQEVIKQNMENKFPGLEKNIFGEESNEFTNDWGEKITLRLCSTEEETAELLSKVLNGNKVASEARVVHQDVAFTDPTLDSTEINVPQDILGIWVDPIDSTYQYIKGSADIKSNQGIFPCGLQCVTILIGVYDIQTGVPLMGVINQPFVSRDPNTLRWKGQCYWGLSYMGTNMHSLQLTISRRNGSETHTGNTGSEAAFSPSFSAVISTSEKETIKAALSRVCGDRIFGAAGAGYKSLCVVQGLVDIYIFSEDTTFKWDSCAAHAILRAMGGGIVDLKECLERNPETGLDLPQLVYHVENEGAAGVDRWANKGGLIAYRSRKRLETFLSLLVQNLAPAETHT

SEQ ID NO: 509 - DNA, 1634 bp, Homo sapiens
cgtttctcgagggaaaggctgctgcctcctgctctgtcctcatccccggcttagggtgaaagaaagcactacttcaatattgctgctaagcatatgatcattctaagctgacggcccagagggtgggtgccaattccaccagcagctgcaactgaaaagcaaggttcagaaatgtcagatatcctccgggagctgctctgtgtctctgagaaggctgctaacattgcccgggcgtgcagacagcaggaagccctcttccagctgctgatcgaagaaaagaaagagggagaaaagaacaagaagtttgcagttgacttcaagacgctggctgatgtactggtacaggaagttataaaacagaatatggagaacaagtttccaggcttggaaaaaaatatttttggagaagaatccaatgagtttactaatgactggggggaaaagattaccttgaggttgtgttcaacagaggaggaaacagcagagcttcttagcaaagtcctcaatggtaacaaggtggcatctgaagcattagccagggttgttcatcaggatgttgcctttactgacccaactctggattccacagagatcaatgttccacaggacattttgggaatttgggtggaccccatagattcaacttatcagtatataaaaggttctgctgacattaaatccaaccagggaatcttcccctgtggacttcagtgtgtcaccattttaattggtgtctatgacatacagacaggggttcccctgatgggagtcatcaatcaaccttttgtgtcacgagatccaaacaccctcaggtggaaaggacagtgctattggggcctttcttacatggggaccaacatgcattcactacagctcaccatctctagaagaaacggcagtgaaacacacactggaaacaccggctctgaggcagcattctcccccagtttttcagccgtaattagtacaagtgaaaaggagactatcaaagctgcattgtcacgtgtgtgtggagatcgcatatttggggcagctggggctggttataagagcctatgtgttgtccaaggcctcgttgacatttacatcttttcagaagataccacattcaaatgggactcttgtgctgctcatgccatactgcgggccatgggtgggggaatagtagacttgaaagaatgcttagaaagaaatccagaaacagggcttgatttgccacagttggtgtaccacgtggaaaatgagggtgctgctggggtggatcggtgggccaacaagggaggactcattgcatacagatccaggaagcggctggagacattcctgagcctcctggtccaaaacctggcacctgcagagacgcatacctagaggaactctaaccccggtgtacctgtataaactgaactgtgaaactgtttcggttatctctgtcttttgaggatggctttgtcctgttgctggttaacattcaccttcctcttttgaggagtatttttccattatgtattcataataatgttaatttcaataaatgacattcatgcagcaattatattggtgtatgaaattcttacagtgaatattgtgctgttagtgctgcttgaaacatttcaataaaatattgaccagga

SEQ ID NO: 510 - protein, 397 aa, Homo sapiens; identical to SEQ ID NO: 508

SEQ ID NO: 511 - DNA, 248874 bp, Mus musculus
  misc_feature (1)...(248874): n = A,T,C or G
gcggctctgcgctcgagggggagcagcatcatggttcaacgtgggtcaattttttgtgaatgatgaggggaggttgtggggccgctgccgcggagcaccatccccgccgccgcccgagcccgatcccgcgcgnnnnnnnnnnnnnnnnnnnnnnnnnnnnnnnnnnnnnnnnnnnnnnnnnnnnnnnnnnnnnnnnnnnnnnnnnnnnnnnnnnnnnnnnnnnnnnnnnnnnnnnnnnnnnnnnnnnnnnnnnnnnnnnnnnnnnnnnnnnnnnnnnnnnnnnnnnnnnnnnnnnnnnnnnngggcaggtgggcgcgcgggggcgggggccggggcgtttatgtaactttgtcagcctgtgagtttgcagaaaacgcccctcggcggcggcgggcggcggggcgggggccgcggccgggcccggaccgtcgctgggctggcgaggagctgcgctagccccggagacgaccggtgtccaccctgagcgagggttccgaaggcacagcttgtagctcacacagcgggagtcggtcggaaaggccgggtgtggaacccgtgttctcctttaatgcacaccgagaatttgttaataacttgcagccgctgatagcagtgttttggttattgcatgctgtaaattgacctgctgtgacacgattttcaaataaagcgtcgcagaaattaaacttaagttattttagaactaatgactttcttaactaaatcctaattgcattactgtagagacctacctaattgctttccgagagccactctgcctgcccggggaggaaggaaaggcctgtgtagtcactttgcctccctgcttttctctgctcaggcttttctgtctgttcccacaaaccacctaagcatttaaggcctgcgagtattaacgtgtaaacagccatggccctgtcgcactttggggctagggggatgctggcggcttgcaccttgacctggtttcggtttttcctccgtgatatgatcgaggttgccaggagttttaattgcttctgataattccgtgcattatttcaggaccggcttgatgaaagctagtgtagtggtttcaaaatccacccagaaagaaggtgatggtggtggtggtggtgtaggtaggtgtagtgcttgtggagaggcaaggaggttgaattaagaaaactcagctgcttgtacacaaatatacactatagcagttacaaggcagcaaaagttattgcagaattttgcagtcactatggcaacacaattactccattataattggaaatgcaaaatgccacccagttagaagtttcatcaggatggagttttggatatcaaaaaatatgtgagatttagttaaaaattctcatttttttcccccaggtagctttgcagctctagtctaggttcaattgtctatttttaagacccatccgctttcccagatctgccactcctcgggatctgtggcatctttccccagaagaactccccgtttgtgtgggagggaagtattttcatgctttaaaaacacacacccgacacactgtaagacttctatggttttctgtgttctggcttttcttttaaagatcaaatgccttcctgaagagcagtaatcacccagaagaggctgggtttgctagaaggcagaggtaacactgccccctttaggggtctgcaggctgcttacagggtatctgggagccctgtgggggagaagaatgactgtgaactgcagacggggcctggatagcctagagaccaaggacagatgtgacctaagcagccctagcaagaatgtctgtggttagcaacatcagagagctgtgcaacatataaagcccccagatggcaccttctcagaagctaggggctgctgctggtgaggtgggcaagagaacatagcactctatcttcctggggctcctggctcctagcttgactttgctttcaaacctgtgttaggaggatgtccctcttgatgtttaccagaagagctctggtgctggaagtttccacacgtcgtggggctgctgcagcttaatttcgttagaactctttccttttaactactgcatatttttgcccagtaatcgacttccattttccagcctcattgtgaggtttcaatgcagcatgaacggctttgaattccaatcctttgatgttgggggtggcaccaaaggaaaggcgactttgtgccgtcctaattgccagagcagaagaaaatttcatcactcctgtcaagccttgtccatgccattttctattgaaaacggctggtttttcagaactctgaagctgccataagtaatacattaatacctgatgtagggagccagggagatgcagaaatgagagacacctgctgcacgggaagattggggtggcgtgggggggctcagtcccaggaccagggcttttgatgtctctgggccctggggtgactatgcaggcttcagagggtgaatccagagttgagctcatgtcccattggttgtaacccagtcttggggtaggggccccaaagagatttttggagtggctttgtcttggtctccagtgaccatccagtgtcctgctgctcagccaactctgggccttaagtgtgacactgacctttgaggtgcaggtgacggaggggggcagaatcagaagtgctgctgcatttgaacagaccctagtccatttctgcagagtgctctgagctgtcaggaggtcagttgtttgctcttgggctcatgtgagtgagcaggatgggctttgtttagggtggaatgtggtctggcatctgcagctgctcttggctttgctgctgcccttgcctctcagacatgcctccgtacttcctgaaaggccagactggggtccacacaaatggaccccactgagaccctccatgtaactggacccggttagaacactgtaaggtcctgagtagatgagagtgtcttccttccctggatcaggagattacacaagtcagtagcagatgtttaaatgagcacccagtaagagccatgggccattctttgagcactttccatcttcgtctcctctattgctcccacagctacaagaaataggtgatgctacacacccttgatagcagggatgtgagaggaatggcagccttgagtcccaaaggctgagcctttctttacctctgctttgggcccaggatgagcctgtgtggaaggttagtgttattgagttgtttggaagagcacagctactttgagaagataatttggaatactttcccagtatggtgttaggttgtctgcccttctgagctgtcaccgctctgggtttcatttgagtcagaaaagtgactttaatgtcttcgttgtgccttctgtgtaatgttgaaaggctctgggttctatctatcccgagtatcacagaaatcagagcagtccagttggctggtggttgttacagcctgttcttgcttgcttgagtcttgagaagttccaaggctgtgcaagcaggcggtgattggcagcagacagcctatggtctgtgcccatttctcagagctgcttagtgctactggtagtcttacttacatgggaaatttttattggaagaatgtaaccactaactgaggaactacagcactcaagtgttcttatcctaaaaccaagacagtgccttaagagaaaatattggcagatttaatagtaagaagaaaatctttggagaaagactctataaccaagattcagagacaagagagaaaaaaaatgtgtaacctatttggcctctgtgagattaatagccagtatatataaagagcttttgcaaactaacaataaatggatgagcttccctgttacagtttttaaggcatgcaggtaggcagatctccacagctaagagaaaagactgagcgtagctaataacccagtgtatgggagattacatctgtgccctttgtattagtgagattgataacaacacccacaactgtgataaggatatggcttcctagagtttaacaagttatatgtaacaaatgcttaggctggaacctaggcccataggaagcacaatgtaagcattaggtatacacacatttgttctatagagagaacaatgtatattatcatacaaaatatctaatttctctccagggaagtatcaaagatttaaatggccgttcattcaagaggcagttctgaatcctagaatttattctaatgactgtggtaagcacattgacacccaagtacttgcaagacacgggctctgccatctgcagaagcacagctctgtgagtacccttgttgctgtaggtaacctcccggtgcgtggtacacagaggcatttggcctagagcaatctgtagactgactggctttctggtttttaatgagtttccaaggtgatattgatggccattgggatatcaggaaaatgaggcctaagagaccatcgttgtgtttattcatgttggcgttggttatatatacatttttgcagtatagaaaaattttaaaatgatgtaatggtaatgttaaaacaatttatgccactttaagtttttttcacaggagaataagcaggtccttgggaggctgatgataacatttagtgttagaagaatctgagactgttgctctgagtcactcctaagctctccaaggtggggcttgcctcgtgggtctgctctgctctggtgcagtccatgctgcaggcattttctagttgacctctatgagagcgggtctctgcctactactccatgcaggaaatcctgtcaaggcgtctctagaagacccagagagcatgtgagccctcccctctggcttcgcagccctcactcagggtctttgcctcattgctgagcttccaatctggcctgctttgcgtccccgcttcctcttggtcttcttggccagggcctttgcacatgcagcgcccattgcatctgtcttccccagttcttcggttcatgtcctcctttcagttttctactcagcttagctcaaaggccttcttactcctttttcacgttttccagttgtgcaatttcatagtttattgtgacattagttgtttaatgtcatttcttcctggctgaagaccttaaggagtcaaaaggcggggagtgcctcatgcctgagttgtgcctggtccttggcagctcagggacctgatgaataggtgggcaatgcagtgtaggccttggaagcagagcttggtgaggacacacgcccagaccattgcccccgtgctgtctgtttgggttctggaattgcctgttctcctctcaagcatctgggaacttcttctgattggagattacatgctgttaagtagatccataaatacaagtgaagtgggttctgtgatgtagcaaggagtgaggagcagaaagggcttacatacagctgccaaatagcaaatgggccattgtgcattgccagggcaaatgctcccagcttgtcccttgggtgggtggagggggctgactgtggtattcaaggtggcaagctgctgctcctgctaaagacattgtctctgtttattttaatttggaattaatagcattacttaatcatttcttacttaacctcataattttaacatgatcccttaatatggttgcatacataaacattctagagtctgctctgtttaaaagtgcatgttgggctttgttagtttactgttgtctgtgaagtattctggctgtgcgagtcaagagcttttgttggattgatgtttaagcttgagacaataaatcatctatggcctgaaagcctgaagcagcattccaagtgggagtgctgtcccgatggtgagggactggcgactccttcattggttttataggctgcttttttttgctagagtagttctttttgaaacagaagtttttctgcttcccttacccctggtctctggtgttgaagaaggtggtgaatatttctaatggatctgttaggtcttttctaagtattcatcctgcacataagcccgggctatagtttcagattaggctcaggacatgggactccattgaacatctgctttgtggctggcactgtcgtctgaagatcccacccctcctccttaccactgaccaccagaaagatacacagatgcagataggaacctagaaggagcaacagacatacaacaggtgcataaggttgccattcagagaaccagggtgtgtgaagcatgaggtgggaaggctgagagagttccctgtggctggggtggtaaggggcccaagcaggttggcagggggtgggggagcatgtgcttgatagtgaataggtatggtctttttgagtcagagcagggtggtgggactgcattagggtgggaaggccctcatggtggaatgatgccgtattccaagcactgcttagctgcagtgtgtgagcagagaagagctgggtattcttgggctggctgcatggggcttgttcttgtgaaggactgctgtgccttgcagcgcggttatctgttgtctaatgtggctgcattcccttggttctgtttcttatgcctatgcctggcagtgttggtgatgtgcttgaccatctgaggcatgttgaggctcctgggtatcccatggtatggctgggctctccccagagtgtgtgctagggctagggtttaagcactatcatggaggccccttgtgtcaggcttggtcactctactctgaggctggaactgcagactgaggggagggggttcactcctttgaagttgtgttgctgagagctttctctgtggcccatccaagacctcttagagaagaagcttattcaggggagatgcttgttgggagccagtggaggaaaacctcaccttgacatcgccgtctgcatcaaatcccaggactatatgccattgcctgccagcccatgctattgcagtaatgtggcagtgagcagatcagcagactgtgacaaaacacataacacagtccctgctcttctgctacctatggggcaccctttaaagtttgctcgtctctgaactcatgctaggaccctgtcatttgccagttcaggtttggactgtggcctcttagtatggttgacaggttaggtctaagttactcttggcctttaaagagcttaggaagtagttggtaaatgccacaatggataaggctccttttgctatggcatttctgtgaggtccgtactgggaggactggcattggtggtctctgttccctttctgtgggacacttctgtgcagctcctgtgttcttctttgcttccctctccgagctggagggacacattcaggtctgccgaatttgtaacttttctggtgagctccttttccagagcaggctgttgcctttcatatttattgccctgcacattttgcagcagccccagtgtctcctgcaggtgtcagttgaagtggtagctgacctgaaaggtttgtactttgctacccattgaagtccccaggaaacatggttggctcttctttccagcagctgacatggagcaagccacagtgctgggccatgtggaagacggtgttgggatttagagttagtcaatagtccttctcagagaagagggcttcctctgtcagggtagaatgtgatcatcatttgggtgcactttggtggcagtttttcagaatctgagtgggaatatagttagaggagcaaaagaggctgacagtgggacttttatttgtctgaggtgccttgtcttctggctccttgagtggctccttacaggtgtggggatgcatgcatagctctgctgattttggcactgtctgcctggggaatacgatagtggttctgaagctgactttccacaagtctggagtgttggagacagatcatgagtgttgagtcaaatctgagcaaaactccctgtttgaccttttcctggctagcagcattgcatggtcttggttcatctcatgccatctgtaggatggagggagaatttccatagaattgctcatagaagattctggacaagtgggctccctgaggcctggccttcatcttgctgtctttttattctgttcctcatcttatggtgctcacagttctctttgctggcaggcctctgggaggaatagagttaagggcagaacatgccacctgcagaggtgtttgttgttggtgattaggcctttgatacaactgcaggactttctgaggcccagtgccagcttaaggtgtttctgtgcctgcatctggttgggaggcctccttgcaggacctttgtgtcatttgggaacaaggatgtatctatctttgcccttgcagggactattacttagattgtggacttgagagcttaggatagttgttactgaaatgccatgagcctatcagggcactactctatggcagtcccttcttacacacagggcctggcctatggttgtaggcatcttgtcagtgagtctacacatctctttgtacctgagccagtagtgctgccctgtctccaggaggggctgtggaagtgacctgatggcctttttatgatagatctcagttgtcaccaaactacctggtattgtggaaaagagcagttgtgtggtcctttaccatacatccagttgctaagggttttcctgttcccttgccttctgggtggtttccacccctctcttcactgtttgtctttgataggagcaggaatcactgtcattctggccaaggtaacagtgactggagggaagcatcatgacagtatgcttaggatataggtgctgtaggcatgtaacagtttctggtcgcacattgagggacagagatcctggggaaggcaagaaggactgaaggagaagtgcagcctgtatgcatactccatgggattgctgtgggcagcagtgtatactctggaagtgccaggcagcccctgaggaatggaggagcatgaagcagggttgacgtccctctgagatacctgaaaagaaaggtggctctcagtgtcacagaggagatctttctggtgttagctttatcaggtaaggtctctccacagcaatacaaaggacatcatgcactctgggaaattgactggcccactttccaaagtacagatggaggaagtgttccagcagggcgagagctggctcctctacaatgtattaaggatgtgtcctcccccaccccccaaccttgcacctggtcttaggagagtcagattcatgagtgacagggccctgctaagtgtcccagagctcctttactgcatgcccttcaggaaggaccatctttgtctcagcagagtcttgagttcatgcagcttgttctggctttggtcttaaaacatctctgagtcaggctctgcctcaagaagacagactgcacagcgtggctcagcctacatgctggtaatgggtttgcctcttccggaaactggctgggacatctgcctcctcctatggaaatggctgctcgcaggagggagggaaaggaaaaggatgctgaggagggtggcagttgctaggttgctgccatcatcatgaagcacctggagcttccttggtctctgcagcagttatggagcagaacttgagtgagcgtggggcttatagcacaggctgtgctgagcactgtgcacacctgagtctcatgtggtctcctctgtgagggagaaatgatctgcttaggaggtggagtatgcagcaaggtcagttggagggactgtgtggtattatatagtggtttgtgcacacagctgctttagcctcttgtagagacaaggtcctgcttcattctgcctctgctggctaactgggaaatacagatgacctcagagagggactcagcacctccacatgtaggccacaaaggtggaaaggattatgttgtggagtatgggttgcaccccagtgaggtagatgttcattcaggcttggggttctaagtaaacagaaggacagggcagactggggtcccagtagctgagctgtgcagaagcccagagggtagggcttctagacccactagccagcttccctctgtggctggtcctgctcctcatgactatcagttgcctgaggatgctttacagaagctcctgccataggtagaagtgtgagggtgccaagtgtctcctgagagggcatgtacaaatgcagcccaggctcaggttgtgatccatatcccttgctgtgctccagggagtttggggaaggagtctactttgggatcaaaagatagtcttcagggtctgggctttgtggtcctccagcctgtggcaggccacagcatcagctgtctagactcctggccccaatctcttcatttacagcttggattagagaatttctgtctctgaagatatttgttattgggcagaatgcagtggttggcagcccagcccccaaccttgccctattggcctgactgccttctgaggcccacatgcatggggtcagctgtgtcttgctaggcttctttagtctagcagacctggtactgccgttacatgtggacccatggcttggatgctcctacttctagcctaccactgaagaagctcatgtccctagtgtggcaagttccatgtgagggccatgggttcaggttgtagctgctttgagcctgtgcctttcctgctttcatattaactgatgtgcacagtggagtagtgccccagttggaagggctcattcattttctgactttggatggctaaagtatgtggtgaggggcttagactttgagaaacaggccaggtgtgtatctggtgcatttgtgtgcgagctgttctcttgttgtttgcctggcctctctgttttcttttctgcataaccagagtggtgggatgttgccatgttaagttgtgtgaggatcaagtatcacacccctggagtgtgtgtggagggaggtagcagctgttttagctttggtgtgctatgcctagtgtggagagcattctgaccagagagactcctgcacaggctttctgacataggaggcaaggtggaagactcttagtggttgtattggtgacttttattcctgagcaaagcacactgagaaaatgtatcatggatggcagaagtggccttgtgggacaaggctggggaacgttctggccactggttgatattgtgggcttggcaattgccttggcaggtgaccttgtttatgctgtttgttagccaccccttcccgttcccattcccctttcttcaactctactttggttctgagaatgcagttcctgccccatgcatgtgtacacaacacatagacatgtgcacatagccctccccatttgcatgtttacatgtacttatgtgcacacacacatgtgcatgcacaacacaatacacatatgcatacacattatctacatgtacatgcctgcacactagaacccattttcaggataaattcagattcttttcattgatttctggtgggaagagaccagtgcacattctgctcactacctaccactcattgaggacttgtggaggtttggaggctctgtgcatatgatggtctttagggttaggatgataagaaccttgcttagagagtatggtccttacccagttcctgctctgtgtggagatgctgggccttaatttttagaggcaagaatattgagttgccctttttagggcagaagtcctaagtgtcaactcatcaaatggcctggggtgggccaggcattgggaggataagggtcacctttctgagggtcatgggctttggttttagctcttctaggttgaagagataagacagcagtgctgacctcttttccttagggtgtcttagttttgcaagcatagctgtggccttaatacttgcctggataaccatgcaggttctaggatgcttctgcctggaggactctaccctccatctttttgtggctccatattgttcactttagtcttggattcatctagggcccgggctttgtccctacttggcctaccaatcctgttgttcatgagaacttacctcgacttcacactgctcctgggaagattgcttcaaagttgtgttacatgggtcctcctgtagccaggaccctgtgacccagtcctagtggtcctggggttgtttctacttttggtgtcatctctttcctgtttcagtgttgacccacttctgccagtatcgctgacctgtcatggggtgccttcctggcttggtcctaatcccctcagacctgagcctccaggttttctattagatacctgcactgttgtcttccccctcagccttggtcatgccattcttcccaagtgttccaaggttcctattgcctggatcagaacactgatttctgtctcatcttcagggttctcctggcttcaatcagtccccttatgcagcttccttcctgtatcctcagtggacatactgcctagaccctgcttaacggcacttctgggcttatctgctccaggcctttatgaattcctgccttgggctggtttgggcttgttaggaaagggctgcaggtgattatccagtgggcagacagccaactctcaacttcagtgacagtgtcacagcctcctgactttcttggtactgaccattgtccttccctgcctaggccatcattaggggctccaaggcctgtcatgttacctctgcctatcctggaactgaagcagatatgtgctgctcttacacagctaagcctcatagctggagttccacagtactcacaggcttgaggctgggaataggttgcttctgggcacattccccatattgagctaagctaggacagagttctcctgccattaagctggcaaagggtgaacagaatccctctttggaccttgaagggctccagggcagggtacctcctcctttggagaccagctctcctgcatgtctcggtatattcagagtgaggtaggacacttcttttgcctcctgatatgagggaggctaggagccagcaagatttagctggaaagcagtgcctggttagagctggaaagcgggctttcccccactgtggggtaggggtgtttgagccctggtcacttgattcttggcacctgagagttcatgagaaagatagggcatatccatagaagttggactcctgactccgtgtgtgtgtgtgtgtgtgtgtgtgtgtgtgtgtgtatacgtacgtgccaatataatacttgttttctactgcatctgggattactagtgccccagcactggcccctacacacagagtgtgggaatctggggcacatacaaggagacacttctctcaaggcctgtctgtgtctggtgttctgcttcctgggccttggcccataggttcatgagtacggaagtttatcttaaactgttaaaacatttttaaactgtccatatttaatacaatgaccactttagggctaaaggtagagggatcctgggattgtgcctagccacacagccagtatgtggcgaagcagccagaacaatttttgcagtcagcacttgctcctttagaggaaggtcagctctttttttattgaaagtttctccacagaggggggctaaaagccttccaaatgcccctttgcttatagcttaagatgttgtggatctttggagcccatctggtatcctaggcatcagattaagaacacctggtaaggtgataggcccttagaacctggctgtcctaatgctgacttggcatgcaaccaggtgttagcagcatggtcagaggtgccctggggtcatgacgttgtcccatccaggtattgttagaaggggtagtaagtgtggtgcatcctgttactcagccactgcggagacagtgtctgtcggctctcagagcgcttgctcagacatttctatctcagtgtctcttccttgtggttcctgctcctgcccttgctggcctgattggtgctgcttctgcagggcttagttaggctctgcacaccctgcagacatttgtgggcttagctgcatcctctttgcttacttccattccataatggcttctcttcctctctcgaatatggggttagcctcttagcccagctgtcctagaggagtgctgtgagccggacagactgaggctatctttcgtttggaacactgaagacttagtttaactctacctagtctttgagtgttggtagggatgagcctgtctacccatgaactatgcccttgctgtgtatttatcttgagattcttggagggttcaggtacagggtacctgttctgcccagatggttccacgtggttaaggaggaccccacctacccagcactatccgacctgttctaggtctgactcagtctctgcacaggtcccagacgcagtttgctgacagattgcttagactctagattgaaggttgtgactgacaaaggtctgctagggctgcacccttatgggaagagcaagcccaggttctgcttgtgaggagcagtgctgaccctacagggatgtggagcatctgggatgagttctgggaggtggggttgggggaggggatagagtaagatgagtgtctgttagatagtgcctttagcatggagatgttaacctcggtatctcccatttggttgtaggtaaaagtagaagtattaacctgggttgggctgtatcctgggaagctctggcccatctgtccttgttatggggacctctggtggagtgggcaaacctacatagaggggagggccctgcaactccacggtttattctgttcctgtgaggtgacccaactgggttatactgggtggtcctccgtttacacaatcagaaaggtatataatgagaattttgtttcttgattgcctgagtatttttattaaagcatttctaatatcattaatattaagggaactaaattgaaaaaatagatcagcaatacaaataagcagttactgtaattgggaaaatactaatgatttaatttgcatatgtggcagaagcatttttttatgactgccttgataataaaagacaggctgagtagcacaaatgcaagcaaatgaagaaatccattaattctcctattcatttaaaaaaatggtattcccagcttttacagtgacagtttaataattagggtgcctaattttaatctgttccgtgggtgcacaccctgcctagcttgggcagccagctgccagtggtgggattctgtgttcaggctgaaagcgcaggaaactggggccctagtgatacccacagtgatacccttggctgtgtgattcccattgatgtggagcatgttgtggtcagtgagccagtcttcatgctggacaacgtgtgaggagatttgtattactcagggtcgagtctgttggtgggttctcagccctaggcgtttttgacccatccttccctaaagagccatttagctggatggagatagtctgggttgtcattacaagctgtgcttgtcactggtgggttgaagtcaggctgctgagcatcctgcagtacacaggaaggccccactacttaactacctcccaatgctgctagcactggcccagaagccctgacctgaacactcctggagtaagggtgggtcttctgcacagagacgaaactacttggggaccagttacacagatcatttttagtttgggggtgaggaagtgaagtaagctctcatttacatattttgcatttggatgaagttatacctttatccttttctttgctgttctttttctttctctgtccttttaagctttgaagaatggatgttttgagcctttagaacttagtttcgtagcagagtggtcagatacagttagagataataaagaggcgtatttgtgtggtaggaactacagaatgaaaggagactgctcaactagtgcatttttagaatatgcaaaacaatgcactggagtccttggttttccctggaagctctcaggctgcacatttctgttgcagggagggagagaggcaggaggtggtttgtcacacttgttttcttccccatgatatgacatttttctcccatgaccaggtgacagttcagtttctgttgatccttgtacacatcctgatgtgtgtgttatgtgctgactactgtctgttaccacttgtcttaccagtagctgggacatgaacatgtcttcatcctccgcatcctgcaggttctaatgaaggtgcagtccctgtgctctgagaagtttgcatgataataagtctttccttattctctgaagtgggctttaaaggctaagtagaagagggcaggcagcagctctgaagggaggggatgtggaacaaatccatataaccaagtaatttggcaatttattagatttgtatgtgcacacagctttttaaaattaaaaagtgtgaaacttggctctaaccatttgaaggtgtactgttcagtagcacaaccaactgcagaatattcccagagctcaaactatacatgctatggtagggttgaaggtgggtgacttttataaaatgcatgttcttgttagttccattgtgagcacaaacatttgctcattcctaaaagaaagccctaaacaacaacaaatcccaatgggatgagaccagtgtttgtaggtggtgtgtattatacaagtggtgtgacagatactctaagaagtaatcatgtatcaggaatatgtgatacgtaatggtagtttatatttcatagctatcagttaataatacataacatactgtataattgcaaagtacattcggtgtctgcatgtgtgtgcaccacatgagtctatacttgtgtaattgacaggaggcctttggggactttggtcactgcagggcttgtacctcttcgcagttactgcttgcagacatggtccaaacctccaaacttgattaggctgcctgccttcttttcctatgtgaatcaaactcagctcttggccttggtgctcaggggtcatgccttcctttttcatgcttgtcttggtccagcagggaattggtactgctcctagggaatgggccagtgactcctcactgtactcctaactgaagcctgtggtctgcattgtcttctcccagcagttaccatgtagcctagactggaggaattgacctgtagttgtctggcatcctgagtgtctctgagagggccagaccctagtcactgaaaccattattgctttttctcaatgacctgtgaagaggcaggtgctgttagctggtccctagaagtcttggagttcccagtgcagagaaccatcacatggctctggagattcagagcttgggtcaggactcagctcagcctggcactctgtgtgacattttgggatggtacccaggtgttgtgaggatagagtgagggtgaccaggccatgaattgggagggcagctaacccagaagaccattgacataatcctagagcaagtggtttgaaggctgggtactagcacccctccagggatatagcttttatggacagcagggatcatatctgaaggctgagctaggactaccttttgcagaagaggtgagcagctggtaaccgcatgggcaggtgggagcatttgagctctaatttattaatcaccagcactcacagtgtcatcatgactgtctttttttctggcaggagcctgctcatgacaagggctcccatacctgtacctgtagtggaaccgtattgagtccttctttttcccaaactcctctcatgcacccctgtgtcctttgtatggtaagtctcagtctccctctcctcgcctcgggagtttcctgcctccagctttagttgctctgatttatccaggggaaggataggcctcccttccattccttgtatgtttccttccaccctggggttcattacttttggcactttacatctccatgactatggagattcccttgtgtgatgagcatgttggtgcaggtcatccttcctggggaatgaaagagtgaacggtgagactggagagcttgggagttgggtggagctagagaggtctgcagagtttgtttctgaaagaccattgtatcagaggcagaatgatttcagagaggagagtaatacgcacacaccctcattgaccagccctggagaccattgaaacaatcctggagcaagtggtttgaaggctgggtactagcacccctccagggattcaggcagctcaagagcatgcagatgaaatcaggaagggaggtcaggacgtggctctatagctgttcctctcagtgtagtagtcttctggcactctccaggaatgtgtctgcagcatgggggctctctgttgtctgcataccattgtttgcctggacctcagcctctttgtcccccatttcatagtctctgtcttggaggccattacttcatccctctccctgcactcttgtctccttttataatgcgccttcagtgttcttttctgcctcagactgtggtatctcctgtgagctgtgctgtcttctcccagcagcacaggtcctggagctgtcacacagcagtggcaatgcttatttgtggccaactttggaaaaggtacacctacctgggcccggcctggtccaggtctgtgtcttggctgcaggccaagagggcactggctcccattggtctgctgaaggaagggacagacggacaattctggtatacgttccctaagatgagtgctatcatctgacactgggccttcttcattcattttggtgaatgggaaataagacatttactttcatagatgttcattgaaaatgaaaggccttgtgatggtgacagacaccaggcagttgaggtggccattgtatggtgtgtagccagcgtcatttttctagcctcaacacaggagcaagtcaggtgatactatgcctctgtcttctagtgggcctctttcctggccatgctcatgggcaggtcggtgacggctctgataaatcatgtacctttcctctcagtatgtgattcctctctgtatgtgacttgcttccagttctgtcccttatcagatagcagtagcagaatgaagaacattgggctggtcagggtacggccctgtgtggtttgtggggtctccaagtggagacagagcaggaactgagttgctctcccttactcgggggtgggttgggggtgcactgaggaggtgtgtagctctcagcagaagatagccttaggtcccaaacctcatgggaatttgagtaggtgcctggagggtgctgtgctttgcttaggctgcagacaaggattttgtgagcagatgttgattgactacacacttgatataggaacatgccattttagttagcaggtggcagtgagaccatggtggccatgttgttcttgttacgtctaaatcattctccttcagcatacataagccagagcagcaggtacactggccacgagtcactggcaggaaacccagtgccacagtttgtgtgcttccttttgggtgtcttgttttaatatttgtctgaactttaagttttgttttctgttacttgaagagtacatttcccacctccacttcttgttgttgttgccatcaccaccaccatcattaccatcacaacaaccaccaccaccaccatcaccattatcatcacaactaccaccaccataacgacctccaccaccataacgaccaccaccaccatcaccaccaccaccaccaccaccaccatcaccattatcatcacgactaccaccaccataacgacctccaccaccataacgaccaccaccaccatcaccatcatcaccatcaccatcatcaccactaacttcatcgtttgtcatcattgtcatcgtcatcctcctcctcatcatcatagtcattccattttagcagctgtcttcctttcctctccttttttgggatttctgttggtgccttgtggctgacgatgttgacactcacccagcctagttctgggtttcgctggaatgtggttctgatcttcctgtgcatagtcttggaacacacttagttattcattgtttgtctccagcatcttgcttctctggcatgccccccaagtgttgcattaccttatcttgtctttgtatttctgtttttgtttggtcatttttctggttgatacttagtgtagtagatagtttttgctacactgctttaagttccctaagttcccagcaagtcacaggcacgtacctgcccaggagttatctcagatccacttggctaactcaatgactgggcagttctaagccttccatggctaacgtgctcttatctttacgcctagctcggcacctctaaatctaccctcaacatagaggagaggagaggagaggagaggagaggagaggagaggagaggagaggattggattcaagttcacataagcagtaactgcctcacctctcaggggctggggggagctccagagacatttaggctttgtcctcatccattcaggtcctgtaagctgctccagacaccactgttggtgtagtaaaaattccacttgagagaaggcaaaataacaaccttaaccaacttagcttgtagattggagatttggaaaatgtttggaaaaggaatcatgcttatgcagagcctcgcaactgagaggctgactccagaatgagtgaattttaagcaagggcagctcaggaaggagcgggctgccagcatgtggaaggaacactctagtactctagtaacagagagtactttatgcaaggttggtagaagggagagaaccagcacctatttcacaaggggctgtggcaaaagccatctcctgctcttgttggagtgtgaatgtgcagattcattcaaccccaaattccactgtgacccactaatggataaccagggtatgagccttccactctgcccaaatccagacgcattgccctgattgtaggacagttggagggtagtctgtctgcattcaggttggtggtgagggaatgagtgcccctatgatggcgtgactgtaggtgtggctgaatgaacatgggtacagagaaatctgtgtgacaggcccatggtttaaggcacaacagctacctgctgtgagcacgcaaatctcaaagcagaggagtgcactgctgttacccactggatgaaggctgcctgttgaactgtggtgagaaaagagagaaactgatgacctcatgcctgttgtgtgcttttggctgtcctcacgcatctggaaagtgccacagtaccctggagagggctaagcacagaagcatgaaaaacagaatggatttcccaccccctgaaaaggctttggggtctcggaggctccagagtgcactgagaactgctgcttacatggtgtctgtgtggttgtcagtgggaacacatcttcactgttttccatctgagacactggaagtgaggcttctgtgcaggtggctggtactgccccaagttactggttctgagtacctggttctctggaaggatgacactctgtttactagtccatttaagtgagtgtctttgttacttttctgttgctgtgatctaataccatagccaaggcaagttatggaacaaagagttgattttggcttacagttccagagggataagggtccatcatggcagggaagcagagcagcaagtagcagccacagcagcaggagagggaagttgagaattgacacatccaactgcatgtgcagagcagagagcaaccaggaagctgcacagttcttttagtctcagtttgttccaaatgccatacttcctccagcagtgctgtactattaaacctccccaaacagtgccaccaacaactggggaccaagtgttcaaatgccagagactgtgagctacagttttcattcaaacccaaagtgaggctttaaagcctcttggaacccttttgtaacgaaagcatggcaggcaccgaggatgctgacaggcacaggcatgctgcccattccttgtcttcatcatagccttcagcacatgggaaagaatcatgccctttgtacagcctccccctggaacttgctctttggaccaggctggccttgcactcagagacccgcctgcctctgcctcctgagtgctggatcaaagatgtcattgcttccacccacctgtgtagccttctcagcttgtttagacttagcttgtagatttgtgaagtacttcatattttattcctgttagaacacagtgaaagggggttttattactttcaagtatggagtctattatgaaattaaactataaatgtgtcctaacaaattatggggaaaaatctgtagtctttcagtgtgtgagccatctatcataaaatagcacacttacaaagcataatcgccaaaacttagagcctatatttcatttgctgaggacaagagggcttactaaaatgcttactgtaagtatgaggagtcacagtactgttcatttttttgcttacaatttatttaaattttaataagatttagattaaggtaagcatttaatcaaagcatcggttagcattccatatgcatttattctttttgaccattttgacttgggtctgccttgttatttaggtgtaatgtgtaccttcagctcttttctgtacggtttgtttcaagggagaatggcagacttcctgtgtgcttggagattgtaggaaggtagtggagagaactgtactgtcaaccatttatctgctagctagagaaccaggtaaaaggtgcatgcacactgacaagacaggcaagtgggtattgttttggacttctgtgataaaagatggtctttgaagaactgagtcccatctcccaacctttcatggggtccagtctgtgtgagaacgtgccagcaagcatgtttggggtatattccagtctttgcccttgcgtgccttcacatagatgagagcaggtattagctcttcacttaacttccctcttcttccttatagttctgcattgctcttcaggttgttccaagactgaagagcaacattatccctttacgaattttatattcatggcattatctgggtgaaccctgtgtgtttgcctgcttctgtttagcactgtaaaagtgtggtctgtctgtggctgtgtgaaggtacagttttattcttgctgcatgtccataatccagttttgggctatcacagaatatgctgataagttcttgatttttaatttaattttttttttttttaagctggagtctcacatagcctccaagtcactatatagctgagggacttctacttccccagtgctgggattacaggtctgtgccatcatgcccagtttatatagtgttggagatcaaatctgttgctttgttcatcctaggctatcaggtagtacatcttagttcctcgtcagtcttcatgggcatgactagaaaacaggtctgtcctggatggcattagtgggcatctcagggacatagcagggtttgtgtatgttgcattatttcctgtcacttggggatttgtttcctgggtgcttgggtcctgcacattttgaaggctgaatgtgagagctgcagttttaccatgtctcactaatatgtggtgcttctttgcttagacagtgtagacattttgatgagttcgtcctgtcctgctgtagttttcattgttactttactgttctgagggatgtagagcacctgttggtgtgttgattggttctttataaagttcctattcttgcctttagcccgttcgtcccccgtgcctcccccccccacacacatcgggttgtcagctcttcaggtctgtgggattgcttgtgagttttgggtgtcggtctcttgttgaatgttctgtggcaggctgcttctgctatgtggctgtcttttctctcttctgctgagtctagataagttgaaaattttcattttctttttaatttttcttttctttatttttttcttatttatttagctttatggtccatagagatttctctaactatatgaaaatactggtctttgtgatcttttggactggttctgtaacccatctcctgttttcatgataggttgctagatgggtcatgacctaagcattgtgtcagaaagacggaaacattgggatttagggtgggttcttggctgttatcagatgaccttgcttgtattggttatattctagaatattatgttccttggcttgtactaacactcaaatgtcagttttataataaatcagtatagttgggagtgtaagtcttccaggtcctttgtgtttcttttaatatcagcttgtcaatttatacaaaaattctaattaaaatttttatagtgattgcatagactaccaattaattggggaacattgatgtctgaaccattgttaggtctttgaaaccacatacgtagaatatttgtttatttatttaaatcttttaattttactttatatatatttttatgttctctagtacaagttttacatctttttcataaatttagccctgggtatttgctgctatctgatggtgtcataaatgttaccttttctcagtgttatttttattggtccctggtgtgtagtcttacttctcagacttcacatagacattttaatagttcttggttggctgttgtgggttttctctgcacatggtatactgtgtgtgaatggtaaccttacccttccagttatcctcctgtcttactgctctttctggtgagggtctcaagatggcattgtttagccctggggagagtagcatgccctccctcccgctcaggcctgttggatcctgtagatgatctgccttcgtccctccactctagccacttcgtgcttgttggtgtcattaacagtctgccgctcctccaccgtccactgggtgtggtaagggacagaacatgctctctttgctcacacctctttttggtagcttcttaaagacttttaaaataaattctcctaaagatttatagatcctatgatttttgccgattggaaggttttttacttcatttgaagtcaagccaactaggatttcagaatttccaagtttgcaggaggggaacccaggtaaccccagcacactaatccgcagtgtcacttattctgtatgaagccagagtagaaatagagatgtccttgtagaagtttgtgtccagtgtcagactagacttagcaggatgaccacgcctgtcactgttgtcctgaaggtgcttataaatcagaattactcatcatctctggctcttacagatgtggtcttttcagttgtgtggtgcctggagcaccctgagccaatgagcctcattcactgtcttctgatttaccttgggctgtttggccccacagatctatgtcaaatggcttgcacactggactgcacgtggattctggacctgactcctcaatcttctcatttctagtcatccttagtcttcccccgcaccccaccccccaaacattctgtagtaacacaggggagtgactgtcttttggccaagaaggaactccagaggctggtatgtgacttaatggaaggcagggtccccagccagcttatgctgtcctaacagcctgttgcagacctcatcagattctgccctgatcaggaccatggactctgactctctcgtggaaggtgagcccttttgaaagccttttccttgtaacagaactccagttccatagtgctgaggctaattttcaccatgtctttggcaacagtaacaacaactctaaaccagcaaactttgataatagggttacagatgaatctgcctgcaacaaatcataggtagattttaggcatctcagtgtatagaaaaggagaggtggatggagcaaggatggcggagtgttcatgattgttgaagttgttgccttgggtttgttgctctgtttgcattgctttgtatttgtgtttgattccacacataagagcttttcttcagcagaagcctatatggaaactctacaagaatgttaaagttaaaattatctttatgatatttttctactgaatttgattttttttttttttggtttgtttgtttattgagaaagggtcctactatgtagctcaggatggcctggaattgactatgcagactagactggccttgaactcatggagatctccctctgcctcctaaatgctgggattaaaggcaaccaccaccaggatcgaccatatatttctatttcttactcttcacatatgagaaagataaactgtttagactcattggaatggcatggatgccagctgtactgcagaggcacagccccttgctttgaagtgacacacggacagctctggagaggggctgggtaaacagaacgcctaggacaggagcacggtggtgagtggacaattgtccactcatgagcttgtttgtcatgtgtaggacttttgaaactacttctgagtgtatgaggaaacaaccaggaaatacactgtacattgtaggagccaggttctcactgttggagaacggtgttaatatgaggaaaaggtgactggccaaaaccttgcagtggttggcttccgacctgaggggtcagcacgaacttgatgtaaacaaatgctcgacaaaaaagatggaaacttgtcaggaaagcacatgagaccgacttaatgggatcccagcatacagagctgaagccagagtaagcaaggattggattattagcatgcagcacagaagaatatccacccatctccattaatggaaatgaccaactgcaaagatgagggcccctctgcaccgtacaatggcaattgtttcagatgtgcccctttgatggatctcggacccaaaggatgtgccctgccatgagtctctcctctcaaacagctgacatttaggtctttcaaggcttttgttaatctcatgcaagtcctctgcataaagcagtctgtgatattccctttggtccttttactgtctgtatggtctgtagtgatccccttgctcttcttgatgtcatgaattcacagttcatcatcatcagtctggctgaacctttgccaggctcattcatggctctcattcctttgcttctgttgctgcaagggcctcattgtagtccaggcttgaacttgctctcttcttccctcagcctcctggatgcctggcttacaggtgtgctccaccatcttgactttatttttatgtttttaatggaattgatttctactctttgctgttgcctttttgttatttggagtttactttgtttttgttttaatttcttacagtaaagcctactgacactgaatcaagactctcttcttaacacagggattcaacgctgagaattgctctctaggcattgcatgttttgatcttgtgtctccattttcattcattgcacacacagtaccttctaattttcttcattcatgaagtgttgtttgtttgagacagggttccatgtagctctcagactctttatgtagttgaggtgaccttgaactgctgattctcctacctccactgatgagtgctaggatcaaagctgtgtggtgtactgaagagtattgtttagtttacaaatgttttggttttcctcccctcctgttcccttccatgcccttgccctcccatgccctccctcattttctctcctccctcnnnnnnnnnnnnnnnnnnnnnnnnnnnnnnnnnnnnnnnnnnnnnnnnnnnnnnnnnnnnnnnnnnnnnnnnnnnnnnnnnnnnnnnnnnnnnnnnnnnnnnnnnnnnnnnnnnnnnnnnnnnnnnnnnnnnnnnnnnnnnnnnnnnnnnnnnnnncctccctcccttccttttctttattctttttttcttttttttaagacaggattctgctatgtagccctacctgtcctggaactcactctgtagaccatgctggtctcagagatctgcctccctctgccaagtgctgggattaaagaggtacactgccaccacctaccaaaattttgggttttaaagatagttttctgctactaattttaaacttaattccagtttagtaaataaatttatttatttaaatttatttattctttgacttgaggctttttaagcttaatggtactttattttatggacctgaaggtgtctttctcagtgcctgctctgcatgttaaaggacagtgaaaaaaaatgcaccctgctgcttttgtgcagtgttgtgtaagtgtcactgagtcatgttggtgtgtgtgtgtgttttctagttttctgtttgctgttgtgacagtccctaggaaccagcattgagagctcagctgtaatggtagatgtgcccatttccttcatgcttttcttagttttgcttctagtgcgaagcaaggtttttatttactcttcagcagactgatccgctctgcagcctgtctgtaacttgagtctataaagtttattttgtcagatgctaatgtccccttcacagcttgctcttgtttaatgtttattagttacttttatcattgttgtaaataagtgcttgatagagacaaggaagagcctatgatttttaagggttcagttgagcatggtggggagggtatggtagaacagagcaagtcaagtccttgtgggctaggaggtagagaaagaagggttgctggtgttgggctggtgattccatttctctcttttattctctgggcccctcaacctatgagtagagcttcctctatcatggtggcactgaatgctcagttagttgctcctaggaaggccctccaagacacaccagagaagttcctcatcatcttttgggagattgtaaatggagtcagttggacagtggagcataatctacagggtttgtgtgacagatctttcctcatctgtagattgtcatttcacagtaaggtacagctctgtgaaggaatatattgtatattcttgtcattgccattgtatgagtattttagtgttcatttttggcaagtatgtgtcttcccagaacattgtattgtgtcacaacaaaaacttctgggttctgttacaagaagagtctcatctccattagtgcttcttaaagagcttgctagaagccttgggtgggagttgcaaccccgggaagctgacatcccgtgggaagggaaagtgggttgtgtggtcctttagtctggaggggcttttctttgaagataaatatgacagtcttcatttagggcctgctaacaggtgttccagaatacctagacggccatctcagaacatgattcctgttttagaagaagaaagttttttagaagtttggctagaaaggtcatcagggaaagaatgaggctaaatgatggttcacaagtgaagtagtggagaacagtgtttaacgtttaaagagcatcaggaccacaatgaagaaaactgattgcactggctggttttgtgtgtcaacttgacacaagctagagttgccagaaaggagcctccactgaggaaccttctccatgagatccagctgttcggcatttctcagctagtaatccagtccagtttagatggtgccatccctgggctgatggtcctgggttctataagagagcaggctgaacaagtcatgaggagtgagccagtaagcagcaccctccatggcctctgcatcagcttctgcctccaggttcctgtcttgtttgagttcttgtcctgacttcctttgatgatggattgtgatctggaagtataagccaaataaatccttttctccacaacttgcttttcgggcatggtgttttgctgcagtggcgcacgcctttaatcccagcacttgggaggcagaggcaggcggatttcttagttcgaggccagcctggtctacagagtgagttccaggacagccagggctacagagaaactctgtcttgaaaaaccaaccccccccaaaaaaaaaccccaaaaaacccaactaagacaatgatactttggaagatctcatcagtcatgtgcaaaatgtaccagagaggcctcctgggaatgcagaataaacaacagatgtgtctgaggcaagagggatgggatctatggcgagagtccagccagcagtatagaatctttccaggagccagaatgagctgaataaaaataatcaaaagtgactgagcattctccagagcaggaagagggagatatattcaaagggtcttgctgtgagcaaaatcaatcaagagacaggcagtggcatactgtctggcaatattttaagtttccagactaagaaaagacatggtagcatgtaggcagaagaaaaatgatagtcagctaaacccagccccaaaagttacatagacaggaactctggagaaggtagccttaggatattccatggtgccaaggaaacagtgttacagggtaagtggttgtggcctgagacttttatacctagctaagctgtagctgtgtgcaggatggatacaaagttacacaagagccacagggtttgcagaattgtgccacctgaactcttttcaggaagtgagtggtgtcctgaccgagagcagtacaggttctgaacctgaggataagagtcatggtgttattgagtgaagatcagttgacataaaggtgagggtcacagaattgtaggcaataacataaagctggaaaacaccttgaacaacccacctttagagaacagctcttgatgtgacgagctgattagttgcaagcagctagggaagatagttgacttgcttaataaaatgatttgtaggctgtgcatggtagtggatgcctttaattccagcacccaggagacaggcaggtcagtctctttgagttcaggaccagtttggtgtatacagtgagacatcccccccccccccgcaacaaaaccaaaccaaacaaaaccaaaaggattcatcacattcttaaaggaagagatgaaatagatgcctcagtagtcaggtagtcttaggttgacattcattggcttgtctgaagttactgggttgtagaaaatctggagaacctattcactccatgggtcttgtatcaccagggcttttgatggttccttgacacctgcagccttcccaaaccttgtgtaggtcagggaatcttccaaaggatttactaagtgatgtggagtgaccttcaagagcggctgctgtggttgggcagtggttctatgggcaaaatgcagagctagataaggactacaggagatctgcatttgaatgttgccaggcacctgcctcttgggaggggctaccccagatagctttcagatcttctgcatggctatgcattccttaaaaacctggaaaagtgtagttataaaagatgggcacatgggtgatgatttatgacactcaagtgggagagcagaatttgaactaaattttatgctggcagctgtgtgggtgcttctcaatgaaaaggtgaggcaggacagtggtattttttctgtgtatttcacaaaatagtgcagcttgaaacatctctgtgtcactggcaggattctcctatactacttcctcccaaaagctgatgatggggaagtttctggaagggtggttgatatctctaagtcagacttttaactgaggttgattttggctccccacaccctgagacatttctggctatcatgatggggggtgctactagcatcttattgggcagaggtcagggatactgctggcttatcttgtcatgagtgcactgcctttatagcccagccactaggtaactagtctatgatgtcagcagtgcagcggtgaagagagttaaccagctttgttttgttttttcctcacatgacatgcaacaaaccacagtggttcatgttgatcaaaatggcttagtatgaattgctttttccagtccctgggtttgtaaagaaagagaagagtgaaaaccagagcctatttccttagttaggtagtggtgttcacatcccaactgagggctcctttcttctctgaccatgcaggttcatctctgcaaggccaggtgacaacgtttgctcttctcgtggattacttggtttacaagacgctgccagtgagacttcaagtttacgcagctgggacccgggcctcctcaattttgttcctgcatgtgctggtggaaatttggagtgtgttggagccactgtttacctggacatcttgagccattttgaacttaaggcactgacgctgctagcaatgagctcccaaagccatccaggtaaggcctgcaacttctgtcactagcattcttttttacagatgtgtgctactgtccctccagcctgcttgttccctttcagattttgctttcctgtggcagttgctgtgggtttgcagcatcagcaggtgctcagaaactggattcttgtcttctggttcaaaggactgatatagacctcccaggggttcagaggatgccctggctttgtctgcccactccagtggcagggagtttccttgatgccaggaaaaagaattttgagtaggtgatgggtaaataccacaggtaacttgcagagtgaggttcctgtcagggtaagtgaggaacagagctgctgtgctgaccctggctgggatgaaaccttggttctgcacagcctttccagtgtccttcgtttgctttctttggagccatattaagcatttcacaagtctttctgcttctcaacagcccatttggaactgctgggacaaaagattcatccaaggtcacagagccagaacaggattagaaactgcatgcttgggcctttaaaagggaaatacatatgggacttggccttagaaagtagcaaagcatgaaccaggttaaatatagagggccctgtctggcccaccttaaggtgtgggtctcctggagaaggtttggctgtttttggctacttctggtgcatttttagtctctaggacttgaggtgtaggaactgtcctgagtacacacaggaggctggatagatgcttggatggatgcttgaggctttgtcagctgcctctgagcctgttctactggatagaggcagaggcttagggtctaggccgttcactccaggactgcctgaaacatagtggtagcacatacttttctgggcatcattgctttatctgagagcttcagagggcagagatctaggttttatttaggtaggaaggttttattgattcagttgttcatgtattgattgttgtaaagaaatggtttttggttgattgcaggaaaaatttaagctgtatagactgaaatgtaaagtagatactcatatgaaggtatgcctcctgctctgcagtgagatggaggtgtgtattccctgtgtgaacatgcagagagatacatgtgcccacatccaaggtgacattacacaattactgtgaatatattatgaactgtactacaagtatccccacttctgctaatttctgagaagctaaagctgggccagcagacacacaggtttaaaatgtctcttgggtgactatgaattgtttcagaatgtgtctaactgaacttcgtaattgcagtgtgtagggaggcgtagtttcctacctttttaccacgttggcactgggcagaaactgttttatttcagctagcatgctggagaaaatgactatgttctctttgctgtttaagtggtgcacatactctgtgacctgacacagatgcaatcggatcttgtaaacagtccctaagcatttcaggaaaagcatgctcttaagttgttggtctgaagaagtatatcttagtactgtatttaaaaatctcacatacgcgtgacctagttctgttcaagaatatctgtaccttctctctacatgttacatatctattaactcaattacgtttttatgccaggatggcctctatcctttgcttgatttctgagaaaagttaaattttctattgtagttataattggtatagtcttttaatattattaatcattttctctatatattttaatgtttccctccagtgcttaattaaaaattaatggctattcttttggttaatgaggtctctcaccagagtacattgtttattttgttctgtaaaacacttgcctgtttctggctagtgggtcttgtcctgtctacttatctgtgagtttccccagccatcctcttcaagccttatcctcataaatggggacagctggattctgacttttctccccagagtctttgcccttcatgtgggaaattttactcattattgttcacttctttctgtctgtctgactctctttttttctgtctgtctctccctccctaccttccctctttctttcctttgttgagtactagacttggggttccttgcctaccagacaaatgctctaccactgagctgcacccccagcccctctgcttgtttgtctttgagcttctgggtggctctttccctcatgccaggttgtgtgcctctgtgtcttcttgcagcaggtcagatagagctgccttgtgccgagatcattcttttcctcagaatgcttgcattaactgtgactgggctgttgttcagggcctggagcttgctgagactcctgcctttccagccctctggtcttctacagattgtattctagaaccatataacaggtgccttccacatggcttaccacagctctgaatgaccaagagggaagctggctgtgtgcctaggccataggtccttactggtgacatttagacttgcttgatggccctgtggtttcagatgagtcctctgggctttctctattgttagacattgctttgaatgctttgaatccttccacagtttatttatattttgaatttagtggatttcaggaagagaatgagtagtcaattaactaattcattgatttataataaaggggagttttaatattgggaatttgagcctgaagtcttgcacaggttaattaaagcatcttccacagaactcccaaccttcagcttgctgtctggaacaggaaacttcagactatgttgggacaaagctaaggaaccaggatagtcatgctggtccttgtcactaagttgtagttccctgtcttccttcctctgtgaccccagtgtcttccctctggccccatgccctagcctgcctggctcactcttgcctgctcctgtgtggcctggcgcagcgctggtggcacatcaggccctggtggagctctgtggcctttgggtcctctcacattggcagggcagcttggctttgccctggtgatgaagtggcctttttatttgctgtgtataactcctctctcctctgttttcctttaaactccctgtggtgctgggtgaggcttgcgttatgattttattgctcttctttctggactttgctagagccaggccctggctctctgacgtaaaagcctcctaactgttgggatttattgctctaaataactgtttccagtactgtgagcagcccgaggaaagggcttgggttggttcagcttgtgaggactctgtggaaagaggctctgaatggtgctgctggtctcatcctgcactgaagccctcactgttgagatgtgcccaggcaggctgtggtgagctcagctcttagacctctgcctgtgcggcaggtcccctggaaatagcagtgggaggacagatggggctgctgggagaatgagcagcctttctttcttccctgtcccttttccctcccagtaattgctgtcttacttggtgttatagtgcatctagatactggtaaccggctggctaccatgagaccctggtcctgtcacctgatcactcactcatctgacacgacactgatcatcagtgtatttgaacttcttggggaaggtctctgcttagagaaagtagatatcctcaaggaggcatttgtgccgccttagctgacggccttaggtaggaagcccatcagagccaggatccttctttctttctttctgttcttctatcgctggatctcagtgagaggcctggctagtgtcgggttacaaataaagtaaccatgttgagggaagcctgtggaatccaagatcagtgctttaatttgggtcattctctggtttaataatattctgtatgtttgaaacatcgtgggttgttctctgagtctccaggaagaggccttctgccccttggcctaggctgagctgagatcctccagctctgtgctttaagtccttcccccttccccccaacccccacagagtctctctctgaagttctgactggccttgaattcactaggatctgcctacttctttcctctgagtgctgggattaaagttgcatgtctggtcctacccttacttgtatggtcttgagtcttatttattttaaccagtttggttgccaaggttattatatagtaatgaagatattaaatggtaatgaaattatatcataaaagaatgtttttataacttttacattgtgctctgcaatgtatatgtttcagggatacttgcccagtaggatagggaatgaattttgtgggctgtggtgcatacagatgtagattctgggcagctggtagcaagtgacttgcaaagtctgagtgaggcctggtgtaagagaccactgtagaccatagtgatgtcagacaggtatgtaggcagttagggctagccagccaacaggaggcctaggagtgtcagtaaggagatagatagccttgtgtagcatagtcagccagagaggagcagcttcatgcagatcagggagggaacagaaggggacaccaggaggtagccactctgaacttttagacagtggggagcgagactgagctggccaaggtcatggagaagtgagcgtttcttttgagcatacatcaagttctctggaaaaggacatgagatacctcagacagtgggacagagttgggtgggggtgtgttaagcctgggagtgcttcagtctgctttctgaaggaaaggcttccagaatgcttgcttcctgtgcttcgtgctgcctcctgcccagctcctagcacacgcatcttgctggcatcttcccagccaccaccccactagcatgcgcagctctcaagttgtcaccaccctggcttctccatgccgtgattatctgaaatcttaatcagtcaagatttgttctggaaatcatgtagacataaggacttatttttcaacctttctttttttcaatcttcaaattgtgttttgtcttttaaaaatcacgaatactctgtcactgggaagagctcagaatattcactgtcaatggtgtgctgatggtttgttttggcaattttctgaaaattcttacacagtttggggagcatttgcatttgtgtccttctttcaaagcccccattgtagaaatgcaaatttctgagttctgagatgctgaatgttagatgattaatgatattgaaatttaagaatgaactcctggtatgtatttgacacagaaaactcaatactcgaatcattaggaaccattgagcacagcttggtgctggaacagaaaggccataattgcagtgcctggcagtgggggcaggtcgtatgtggacaggtgtgcagatgcataccgcctccagagctggtctgtgcaaggcccaaagctgctccagctaaagaactgggtctgtttaaccataggtgtttaaaacttatagtgatcataaatcaacattgattacttgcttactccaagtcaaacaccgctgtgcttttgagggaccagaatgaatagcaagttcgttctgaattgtgctttccagtcattacatttgtaaggcatgatgaccttgggaagtgagctagaatgccaccgttccattgtgtgggtgagaaaaccagtattgcctgacatcaaataactgcctcagttggggtagcacagtgcttcaaaggccagccaggaactggaattcatcgcccacacacgcttctctgtggacagcagaactctgggtgctttgggctcagataagtctagtcaaactctctacatgtgtggggcttccaggccaagcaggcagagattggcatttaggggttgccggcaccttgggaatggagtgattcttgccatgtgaaggaataggcagatcatagaagctcccagaagagctgtatacatttaatggagatgtccccccagaaggcctgcactggctaagtctgaagagcagggcatgatgcttgctgcctggggtacatggcctggtagagaggcagtgttcagtatggagggagagagttaggcttgctgttgcaatctgtgtggccaggatcttgtcatctagataaagaggctctgtgtgaccttaatacacagtgttacctgagccatcctggctcaaccatcctgaaacttctgctgtttgcaccattttaggtgtgtgtactgcattttaggtatggttcaaaccttctctgagttctcgttgctggtcctggagtgctgaactgaaggaactgactgggaggctggtgagccatgtaatttgggggtttgggtgaaacttagtgcttcacctcagcacctctctgtctgtttattttctgagaacataagaaatggacagtgaggaaactgtaatgattaacacagagacgaagtgagcttcatcaagggctctgagcagcttaggatctgctacaaagcactgctcggcaattcagacactcctaactcttgctgttaccatgtacttggaaaagaaaaacatatttataggtgatgtttgtgtgttttatacataaagtttgtggctaatttacatatttctaaaagttgtatcagatagcatttgtaaagaactatgaagttggctaaagtatcttggagttcttgtttagtggtcataaacaggatgaattggttttcatacagtgacattcacattagacccaaatcagctctgactctgtatttcctttagatggtgggattggttgttgtccagtcatgtcagcccttgatgaccaagattgggatgggcaggtatgtgttcatgtatgtgtgagtgcatgtgtgtgtgtgcgtgcacatgcatgtgagtgcatgtcaagacctgagatgaaccttgtgttatcctcaggagctgcctaccttgttttttgacacaaggtctcttcactgagacctgaggcttgctggcaagtcactcttagtcctgcctggccagggatcctctgggattctcctgtctccacttccctagtgctgggaatgcagatccatgccactgtgcctggcttcttacatgactattggagattgaactcaggtccttatgcttgcatgcagggactttactgactgagcttctccagctctgtgtgtgtgtgtgtgtgtgtgtgtgtgtgtgtgtgtgtgtggtgtgtgtgtgtgtgtgtgtgtatgtgtgtgtgtgtgtgtgtgtgtgtgtgtgtgtattctaaagaatacaatttcttgtattctggtggttgtggtgcatttctggaggctggaaggcttaagatcaggatgccagtgagggcttccctggcctctgcatcaccccaccctactgcattattttgtgatggcaccaggagcccctccctattgaagggccctcagtatactcagggtgtcctcctcatacttcatctctttcctgtggctcacttcttactgctgctacactgggtggggaatggcaacatttagaccttcacagaaggtgttaaagcctcctggaaagagctggaggcccaactttgattagtttacactcacagctggtttgctcctcttgcattctcccaggaaatctcttggagaaagtggactttaattagagccctgtttctcagtggcttgtttttctcaaaaggcctcactatttggcagtattggtgttttgagaaaactgtggggttacagtttctaatgcacatagtgtttaagagcaagccaggctacttttagtgggagcccctccctcttttcctcccatagccagttaacagcatgatgcataattcttgatgctccttatttttatcttcacatggagccactccctgtcagaggctgacattctttaagcccatgcctctctcccagactgatgcagtaagtagacctgtctgtattctttgccttgctgcttgtaacttatgatctagtcaagtgcaatggccacatgttcatgcatctctcttctggttagtggcagttttaaaagaattgaaattaaaaatagatttgtttattattattttatgtgtatagatgttttgttcacatggatatctccgtatcatgtgtctccagtgttcacagaggccagaagagggtgtctgattccttggagctagagttacagagccaataggtgggtactaggattggaactcagaacctctgaaagtttcacaagtgcttttaaccaccaagtcatctattcaggcccagtgctttgttctggttctattgaaagggctagagagatcagagtgcttcttacttacaaactaggggcttaaaagcatttagaaagtttgaggtggtgcctggggaaaccggatgcatgaaatgccaacattttccttggaaagcatctgtgtaacatggagccacacagagttctcttcatcctgggcctggtactatatgtgtgagcacctcagtgatagtagaaagtaggaggttagggtcccttggaaagcctacatgggcattgacagtgagctgggacctgaatgtggtctctcttgcagcatcaggacagatagcaaatgagggtctgttttggagctgaggcattcagccagggatcaaggacagcaaggtacagatgttctcattggtgggccttccactgggagtcctatgtctgcaaaagacatactcatctgggaaagtggctttttctaagtgagttcaggtatcactgtcctctgtagacagctgaaagatgtatttgtgtctacctccatgccgttactatcagtctgtcaggaagtgcatctctagcactattgctggagctagaattagggctgctggggctggggcttggcatactgggtctctcctgtggaatagtatctcaggcctttagcctacaggaaaagcacctgttgggcttagctggcaggctgggcattctttgaggttgtcttcattgaggctcctttctagcttctggaagtagtccatttgtccatgcacctttatgtcttcctgtgacttggctctcttctgtcttcccaggcatgcgtagcatcttgtaaacatcccatggtggataggaaggtcatatccacttgcacggcagtagctgactcagtgcaactgaggttcatggaccggttggcatgtcctggcatgagaatgcaaccagtggctgcctttagctgggagaccttgaactcggggttctgggtacttgctggagctgtcctggggagaggaaacagttttgattttccttcaaacttgtataattgataaaagctggaagcttggtggctctgtgctgtctctatgcaaaggtttttgccaggcaataaggagttggggtagctgacacacagacatccctacagtggaagggctttgcttgggtagaagcagacagacacttctaagtatgagttagtatattcattttggttgactttgtttgtttgtttgtttgtttgtttcaggctgtcctgaaacttaccatattacctgggctatttttgaactcaagatcttcctgcctcagtctcccaagtgttggggttacagacatgcactgggaagtttgttcagcttaaggcactgcctaaactaatctatgctgataatattttcactaatgctgtttataaagccaaactctaacgtgttctactttcagaccttttataattgtcacaagtcactgttacatttaggataccttctcttagtagcttgtctgaataccttcaaagcgaggtttatacacattggctgaaaacaaaacttctgccacttgggaaactagcatgggctcctgatagatctcagcatcgggcaagagcttcagaggtggtgctaggcccctgttggtgctgctgaagtttcctcctgagtgtgggctttgaactgttggtgttggattcattcatgatgtagagtgctcacagagactaagagattggcagagctcagagctcatggaatgctatagtctttgttggttctaaacactgtctcagtccccaagatgactgaagtagacttaaggacccaccttagaaaaacagcacaacttaaatttgtcctattttatgtagcgattacataacatttgactgacctttctctgtccctctctcccttcctccctcccctacatcctccctcctttcctttcttttcctgagacagggtttctttgagtctccctagctgccttggaactcattctgtagaccaggctggtcacaaactcattgagatctgcctgcctctacctcctaaacgctgagattaaaggtgtatgccaccactgcccaaaagaacatttgaatatcaagtgccacttttagacttaaaataccaaccatgaataagtgtggatttagcctgttggtttataccattgagtttataccattgagttagtgaatcacactgtaccttacagaggtgactaaagggatttttagggttctgattgaaggtttgcagaggagagtgatgggcagaagctgatgttgccaggctgtgcagaggaagctgtggaggccatggagagttcattcacttctgggagtgtgacatctttggactgccagggaggtgtgctgggaggtgtcagaagcagtgtgtttctaagtggagataaggcatggcccatgccaacctggagctgttttcactgtgccctccttggacccttgtctcttctgtgagcagtctcagtgccaggttagcaggtgggctgtattgtactactgccaggcaggtcctccaggctatgtatattgcctggccttcctcaagtctttcccctgttctttttctttgtccctgctgaaggtggagcaatgtgtggaaacaggctagtattgcttgtctcattcatagcttgtcccaagtctggcctgggtccagtctgcactgcatgtattccacaggggcttggcctgcagacctcagcggaagccagttgtcttgtctgcttctctgttcctggaaagccttgccacacacagccagggctgctctgagtgtttccggtctccattgttgctgcttgtttgggagctattggctctggtcagatatgtggctgtgctgttattttgtcctcatatttggaaggaaattggtggctgagaggaagggaagagccacaaaatgtcaaacccagcagtggccatctgacatggctgtctgctaatcaccataatatggaatgaaaacggaagcatttgatttccttgcttgccaggtttagaccatattttagtgactctggagtcctgattcttccctgtaaggagaaattttgtagcagtcaccagcattgcttaagttttctatgactggaactttcctggttgaaccaatggcataggagtccctgtgtccttgtgggtttagagctggtgtgagcttctggtatatccttcccagagctgaaagatatgtttgctgggggaagacagtagagtctctaggtgtagcttcatatgatagccacatatccagagattgcttgctgttcctgccacactcccttggctgctgctctcctgacaaccagctgtctgtcaaagcattgtagagcagaaaacatgtgctagttctaggcctgactcttagatatattcgtgggatgagacggacacgtcatgccatggtcttcctgcatgaacatgtcagatactggaagggatgtttctaaaatacttgccagcccctaccatctgctgagggtataaaaaaaaccaagaggcatctagggaaaggtgggactcctggatgggttccagaataggaaaccaggaaaatgtggaaaatccaagaaaaggcttgctttcagccattaactgtcttatcagtgttggttcctcagacctggctatgcactgtggtctactaaaaacctgtctccaaaagtgaagtactttagtaagtgctctttcaggtgtggtcctctacccaactgcagggatgccagtgtgtaacgcttgctttgtccctttatggttgcatgaggtcacctgtcttaacaagccttccttggtgggagctgagtttgtttttggtcttcatatgttgttgttgtaaatactgaggcctaagagttcccgtgagagctttctcttggcagatgccagcatggagacaggcgtgaagcctcagtgggagcccaggaaaggagattcccctggacttgctctgcacacagagaagtgaccaagtggatctgctctactgaactcacggttcttttgggcgcctcccttcgcgtttcctagcttaaatgaagttttaaagtttatttaatggagtcatacagtatttgctcttttctgtctgggccctttcagcagagtgtgaggatgtttcgctggattgactagcccaagctattcttttgttggtgctgatgtttgcatggttttcacttggagttgttgtgtgcagcaggcgatctgtgcagaactgactgtgacagtgctctggccatagcttgtgtgcagcaggcgatctgtgtagaattgctgtgacagtgctctggcctgtgctgcatgagctctgtctgccctacatgcactcttcagcattctgtgctgtcttctcatctttactgttgctgaataaagcctcctgtgttactaaagatgcccatcgctttcatatggacaactggccacatgtgggtggtagggaagtccctcttcattcagttcctggatggagattcagaaaaccaagttgtctttctttttcattattggttactcttactgctattttctgacagttctgtgggctgcctttttttctttctaggttttttttttatttagcagatgcttttaattttaatgcaccacgttagttcatttatttgtgcctatccaaaggacttcaggatgtcctgtataatttttagtagaaatatgacactttaccagttgtaaatccataaggatttttaaaagtagggcatgaaatggggattagacactctgcactttaggattaggttacatcagtggctcactgaagggttaatactttcttcatcactgtgcaatgccagtcaagtctctgtgtggttgggtttggttctagactgtgctcacagagccatctcagtcagttatggttctcttaactagttatactgggtgtgagttttttataaatgtctaaagcccttttcagttacctacctgtatagtctctgtattagaattctgttgacttgcatatagaataacttttatttccaattttccaacccatgagtgtggtgcatgtttttgtttatttaggtctttaatgtccattttgtatttctcatagttgaggtttatttattatttgtgttttttgctttttgtggttttttattttttattttttattagatattttatttatttacatttcaaatgttattccctttcctagtttcccctctgaaaattccctatcctctcccccctgctccccaacccatccactcctgcttcctggcccaggcattcccctatattggggcataggaccttcacaggaccaagagcatctcctcccattggtgaccaactaggccatcctctgctaaatatgcagctagagccacgagtccctctgtgtgttttctttgattggtggcttagtcccaaggagctctgggggtactggttagttcatattgttgtttcttctagggggctgcaaaccccttcagctccttaggtactttctctagttccttcactggggaccctgtgctccatctaatggatggctgtgagcatctacttctgtattagtcaggcactggcagagcatctcaggagacagttatatcaggctcctgtcagcaagctcttgttggcatctgccatagtgtctgggttcagtggttgtttatgggatggatccccaggtggggcagtttctggatggtcattccttcagtctctgctccgagctttttgtgtttttttcaatcagttttttttgggggggggaccaggggggttgtgctgtttagaaatacaattagtttttttatagtaatcttgtcacctgacacattactgaatttgcttttaaatttgttcatctataaattctttcaggttttagtgagctcccactgtccggatggtggctgttgtggggttgagttttaggctgtcttgtagtgatgtgatcgccagtgagaagctcaacaaccgccctgtattgtggcatctgggtcttgcttcagccagaaggaaaactcccaacatgtcatcaccagtgtgacatttgctgcaggttttgtgtaaatggtctatcaggataagggtgtttccatctgtttttagtgtgccaagaattttctcagcagagggtgttaagaccttaggttgaaccacatgaaccgcaaatacttaatctttcagtctgtaaagttaaattttttatttggtttggcttaatatattaggctttctttccttttatttgattaatgtgataaaatttcttagttgactttttcttatgttaatctagtcttatattctgtaactgtggtttataatatacacatagaccccaaacttactacttacttacttgtttgtttttttattgttttgtttttgtttttgtttttggcttttcgagacagggtttctctgtgtagccctgtctatcttggaactcactctgtagaccaggctggactcgaactcagaaatccgtctgcctctgtctcccaggtgctgggattaaaggcgtgcgccaccactgctcagctaaactgttaaattttgatgttaagcttatgctggccccttaaagtatgatgaagttgtgctctttcttaattccagtattggcagagatttttggtagagtcagactgttctgggaccacatatgtttcctgtgtaacctcgcctcacgactttctacacttgagacaatgtaagaatctattctgttttgcaaatggaacagaaaaaaaatcaagccatagattgtaattggcctgtgggctgtagcgtgcccaccctgtcaagctgtctaaagagttggtgaaggcattatctctgtagtgttgggaaaacttccaggagagcatctctgagtttagtgtgccctaacgtgataggactctatgtcctatgtgtaggacattttatgtcttctggcatcaggctattctttctgaattttcacttgcagagtttcttctacattcttatttttgtattaactgagaggttgcgtatctctcctcttccttcccaatattgcttatttcttttttttcattgaacttataactattcaggtaagtatttgtaaagatctgagctcaagttcttgagttcaactgctgggtattttgtttgtttgtcctgtttgtttgtttaccgattgagataactattcagatcagtaagtttttcacattttcttgctttgtagtcaaggctcagaatttccatatgttgcatggctttagcagattgtaagcttttttttttttaataccatttgctttgtaattcagtgaacagtattaccaaatttcttatgctactatctcatttgctccatgggttatttggaaacagttatgtatttcctagttttttgctcttgttttggcctatctttcaagtgtttcccaagttcagttctctaacagtttagtcaggtttgataatcctgtgctcagatctgtggcctggccagtgtcagccctgctgtgactgtggattggaggcacctccttttagtctgtcaggtttggttttttgtgtgttgaggtattttaaacggtgtaaattgggagccttacactttggtgttagaataaccatctttgctttgttatgtcttttctccctctgttgcttccgagggtgtaaagtccaatttcaggttctttgagggctgagcttctcatcatttgcatgtggcttgcaagctagccagctacctgaaaggctgatggctccaagtgctctccccctctccctcccttctctctaccatctcattggcatctcagagctctgactgccttgacaatcctggtgttccaaagcctgcagacacttatatctgtaacagtttaaattttatccttgaccagagggtggcttggtataactccagttgctgtagaccatagtggaagttcaggtcttagttaccagggccagttatcctgtttttcagtctaatgacacaggtatgctgtttgactactcttcagggcccctgttctgcactgtccagacggctttgttctctgtgttccatgctttataggatgccatgaaatggagtgggctgagttgtatctgaagccgtgagccactcttataactcttattcagatcttttacgaggtgatttttgctgtaccttgtaagtgatgtgatgcttgcctgcccgacttcccatccagtcctcttagcatgagtgaagagtcctttcaggagtttccttgagaggtagtttggaaggaggtggtatggtggctatcaggttgtggggggccaggcacagactacttgttgggcagtggaagtgtgactcaagtcctttgtcctgtggggccagggtgtgttaaagaccttagttcttggtcctaggatctcccctattctcatacactgattgtaatcaaggaccaaaaggctacaataaaccagaggctggcagatggatggtttggcgctctcacacttgagatggagtgcaaaatggcttctctagagtaatttttttttttgagatagaatgctagaagcatatttatcttttgtaaggagtaatccatgcatttgatgtaacatgctgagtatcattaaccatgcatttgatgtgacttggttgtaaatagttagatatgcatttgatataactcgctgtgtatactgaaccatgcatttgaagtggcatagctatgcatagttagccatgtatttgatatgacagggctgtatatagttaagcatacatgtgatgtgatgtggctttgcatggctagccatgtgtttgatgtcacatggttgtatgtagttgaccatgcatttgatgtcacatggcacctggggtgtacaaagaggatggtagcagaaaaagcctcgcttgtgcacacatcccatcctgggaggaggctgctgctgctgcaaaggctacatctctcacattccaactttctcatctttaggttgtctcctgatttgcaaactttaaaatccagttcttgagaaagggataatagcaatagattacaagatcagaggcatctagtcatttctatagacaccccaaccatggagtgtgcacactggtggggccttgcagacgccatctgaagggggcctctgggagaagattggctctggggcaggccactggatactgtggccagccacagcagagccaggcattgtggcaggacctccccagcctgggcctgggcctgatttaccagcctggagctgcttggaagacttgggtgtgctgctcccagaggaggagtggctccgcttacacactcagcctcaggcctgtagcccaggccaagtggtttcttaaaaagaattcttcctcccctgattaatttctggcatgcagtgcttgggagctcttgcgtcagtaaatcgtcacgaaccctcagtcgtctggatcagacataaacaccaggcccagctccaccacccctgacatcctgccaagcctacttgccctcaaagcctcaggacaggcagctgcagaaagagaggcagggactattgctgctcaaagtcctctcagagagtgcctaactgccctgcatgccgtgctcgtgggccaggatgctaggctcagatgtgacttatttatgggactgtgtgctgtttctcccctgacattccagacacatccactgggtattttactctttgggaacagttactgccttccgttggcattctgtttgagtttataaaggtccctgtgtgagattcaccttgtggttttagcatcaggggagtctagagagtgagtatgtttcctgctgtctggacagaactttctgaagtctgaggaattcagtgaactccccatcaggccttctcacccataggtgaggccgtctctcctcttgtctccttcctcccctctgtctaagacacacttttcgtcttggcgtgtaatatcagaagaggccagaacaggtgaagtttcaccagagcttcttcagactcctggaaaacgacttgtaactgctgtcctgcagtcagtgggagacacaaacattagggcttcctagggtatctttagggaacatgtgtggctgtagcctctgtaatccagctgttgtagatactaaggggtgatattgggggccctggccatattttatggttgtgtcaggccatgctgtgtttgagacagagttccttagaggctccagaggcagagttacaagtgtagtgttgagtgaggtcttgcccaggtagcctgtgcagaacatgttatcagggtctttcattattttcttctaattttccacctctacatccttgccacagtttaaggaagatttatgaatgaaaagtaaatctagggtgtaagcaatactaacatatgtgatgctaaagacagagtgacctgttttagccatagtgtcccttggtgggttctagggctctgccatggtggagctagagttcaacgcttcccataacatctgaactatatgctaggcatggccgctttccccctgaccccaggtagtggaagaatgcttattaggctcaagctcgcttgttaatgtcatttgttccctaagccttatgcctttctgggaatgtacagcttctgctgcaggtgtggtgaggccccatggctgggacaaatgttcaggtgcagctgagagaacagagccaagcagggctcagcttatgagaccccaggtccctgtggcttctgggggttctacagtctctggttttgaaacatgtttagtataggcagttaatcagtcatcataggcttttcctggaagtgtgtgtgtgtgtatgtgtgtgtgtgtgtgtgtgtgtgtgtgtggtggggggtactattgcaggtgatgtggtctcagtggttccttgagcctgggaaagtcttgggtctgtgtgcttctcttaggaatgagagcagaatgttctctgtggacagggtattcatgggaactgctccactgactccatttgctgtatggagtcttaggataacatggaagtgggcctctaaagccacagaggcagtagctgttagcttgtaaaggtcctgagtttcccagttagccttactcttcctaacaacacatggcacctatggtgggttccccattcttcctgaggtctttcatttagtgtgtcttgaacacttttatatatcagttacagcctttgcctgggtgtagcaacacattcctgtaatccctgaattcagaggcaaaggcaggaggatagagttcagggcctaggctggtctatgctgtgaagcacttaactctttcctttatacttgggtgttattctgatcttttccaacttgcatgtgggtctcttggctcattgtgtgtctattatttattgtggcaaatacaggcagcgaaacattcctgctctgaccatctttaagtgtatctgagtgatgacactagactgcacggttatgcatcattttcaaactctgacctttccaaacagaaatcgtgcctttcagtactagctgtgcatccccttcccagccccagtggcagcagacagccctaggtacctcgggtaggtacgactgtagtgcttgtcctctgccaggctatgtgagcagcacagtgttttaggaatcgtctcactccttccccaggctgatacatgtcccctctgtatgagctacaccttgtttacccattttgctgatgcagactcgggtcattttaggttttaggtgctgtgaatattggtggacttgtatctgtttgagtccctacttcgaattcttgggggcagacctggaagatcatgagaatgccacatgaaattgttgagaaaccacagttttcacattttaaatatttttataaattttttatcagcattgttctgtgagtccactttttaaaacacctcctaatttttggtaccttgcttttgttaaagatgtcatttcaccatggttttcatttgcatttgctagtaagtagagctgccgagcaagcacctcccatgtgctcactggggagacactgatgcatcttctttgtggagatgtctatctagggtttggccgcttgagtgggtttttttttcttactgtggattgcagaagtactcggtgtgcttggtctaccgcttgcccgggcgtctcccactcagtgttgcttttgagttctctagtgtctacttttgaggaggttcagttcttgtttctgtttgttaattgactttggtgtcatgtctaagaagctgttgccaggtccaaggtatgaagatctgctgtctggtaagagttttatggttttagtttctgtatttagacctttagattaattttttggccagtgtgtgaggtggagatctgccttcgtggctgttgtggatgatgtagctgtcttctgagtggttaggtcctagggaaacttttcttgggaaactgtatcagctacagttgtctccctttccagatcagcacagctgttactcttcctgtcataggccagggtgtgtggacatacttacagctttgcctttcttgactccagtccctgccactgtgttcctttatcagcacattgttatccataccttcttgtgttatgtctccctctctgtgggtctgcagttgtgtagagtgtgaactggtgaaccccatgagtggtgctttcaagctgctctctgagcttgttgtagtccccagtggatctgcccttggagctgaatgcactgcggtggcaccggtgggctgattagtggcgagacagtagcacacaatgccttggccttggtaggttcctgcccagcaagctagtagtagtagccgcaacagcctttgcagggaacagggtttacccatttttatctgaatgagcttcaacactgctgttcttacctttaaccacagatgcttgaagaaccaaattgtcagttttattttgtgcttaattttcttcacaaaccttcctgtttggaatgatgtaccttgtgagtctgttttcctgcttgaacttcatttgggttcattgtgacagaatgggctttctcatccgatgccccaagcttatgtttccttcacctaactctgcttagcttttgcctctgcatacccaatttgtgtttcaagttcaggatcatttgaacacttttattgaagaactttgggtgctgtttctgttgctaggcatcctaattttcacctgggagccagtgctacttgcctgttatgttcattcttaagttataaaagtcctgtcagctgtgtccatgctccctgagagcctctgcgtttgtggtacacacaggtgtacttcttgtggtccagaattcaaatgaagctataaggaatatattttgttttgaatgttcacagttcgcttaaagttttttctttcttttttttattttttatttttgttaggtattttcctcgtttacatttccattgctatccccaaaagtcccccatactcacccccccccccccgatcccctacccacccactccccctttttggccctggcgttcccctgtactggggcatataaagtttgcaagtccaaagggcctctctttcaagtgatggctgattaggccatcttttgatacatatgcagctagagacaagagctccggggtactggttagttcatattgttgttccacccatagtgctgcagttcccttcagctccttgggtactttctctagctcctccattgggggccctgtgatccatccactagctgactgtgagcatccacttctgtgtttgctaggccctggcatagtctcacaagagacaactatatctgggtcctttcagcaaaatcttgctagtgtatgcaatggtgtcagcgtttggaagctgattatgggatggatccctggatatggcagtctctaggtggtccatcctttcgtcacagctccaacttttgtctctgtaactccttccatgggtgttttgttcccatttctaggaaggggcaaagtgtccacactttggtcttcgttcttcttgagtttcatgagtttaacaaattgtatcttatatcttatgtatcctaagtttctgggctaatatccacttatcagtgagtacatattgtgcgagttcctttgtgattgggttacctcactcaggatgatgccctccaggtccatccatttgcctaggaatttcataaattcatcctttttaatagctgagtagtactccattgtgtaaatgtaccacattttctgtatccattcctctgttgaggggcatctgggttctttccagcttctggctattataaataaggctgctatgaacatagtggagcatgtgtccttcttaccggttgggacatcttctggatatatgcccaggagaggtattgcgggatcctccggtagtactatgtccaattttctgaggaaccgccagactgatttccagagtggttgtacaagcttgcaatcccaccaacaatggaggagtgttcctccgcttaaagtttttttaagtgtctatgttcttgtctctgagttttgttacaccctttatgctcaggtactatgatcccagctttgtatgagtaccatcctgttccttctcctcatggtgcacactgggtggaaccagaggtactgctttgagggagcttctggctagatattccttcccctgtactcagggctcggggtggggtgacccagaatctactgtctgctctcagtgcttccctgcggcagggccttgtttcaggtaaagcccatgctcagcctgcactgttggtgctttacttcagaactgcctaaggagctgctagcatcaccttttgattttgtatgaaagtaggtttttgttgttgttgttgttgttttaggaaaatggttctcttgccaattttaaaagtttccatgtagtatcaacttaaaatctggcaatgcttaattaaaggtatgcagtggaaagaaactgctcactctgccctaccagctttgacacagttctggtgtggatcccttggcattctgccccatccccatccctccctgtctctgggccactactcatgcttacatctgtaacaagcacaatggaacaatggtctttctagtctttgcttacaaatcctctctaaatgggagcttgaacttatctatagcatacagcacctcagtgaacagtcttatccatatatctttttgcttgtgactgtgtgttcttcttagtgtttttggatacaagttcagaaaaataggatagctgagacaagggatggaaattttaatagtattgctccctaagataagagaaccctgtggcatgggttccctctggctgtgtgcaatgtctgtttcctcaagggctcccttattgagacacacagccggcaggctcacaagaatgcccaggtgctctgaccagatgtggtgagtttcttagtaaggtgctggtgtttatagtcttgaggcgtcagtatctggtctggttcctatcccacactgccatcattcccaacacaaatccttcactgagcgtctcccacacagcagggtacttcaagagctgggggtagtgattaatctagtaacacttatgtgcagaggggagatcagagagcagaagagtggataatggtatcatggttgacatgccaggttccctcctgcaagtggtcagcttggacttctgtgacagcttaggagcaagtacttgaaccccgagtttacccattttttgatgagaaagctgaggtatcaatagaggggtgtgtgagcagtttgatgcaatactgtatacttctaagtatcaggctgcagccttccatcggtctggatatcttatggatggagagggcaccaactttaatactctcctgtgtctgctgggaagcttcaaggacttggcctggttcttctggttttaagttcttagctctctaggtaacggtgtgttgactctgagatgcacagcaggactgcaaacagcatgattactgaccagtgaggcaggcagggtgtaggacatatggagttgactgagggaaagattgtgggaatactggagcccgggagacctcagaacaggtaggttgtagggaagagaacttgacctaggcagcgtggtggctgatgtgctcatgtgttcttcaggtgggttgagccaccagaccttgaggggtgggtttctccatctccagaagcaagacaggttgctccttttccttccgtggtaagcagcaggtgtctaggtgatagaacctcagcagggtgtccttaactcccagcctataggcactgttagatatgggctgcagctattcgaaatgattgattgctgtatatatgcagtgcaatgagtttgattagttgatcagacaggctctggctgtgcagcccatactgattttgaacttagagtctgcctgctttagccatctgagtgctggggttacaggtatgtgccaccaccatgccagggcttatcttatgtatggcttatataaacaaatactaaggaataaataaattgctaaggaatgaatttgttaggcttttttctcacgaatattttctcatgctgccaaaaggtcaactttccagggcaacaggaaactagcatgaatgtacagattgctgcctcccaacccagtcagggcaatgctcacaggagggaaagaacagcactgtgccaagtgttgagcagcaacgaacacagggaagctggggacactgtggtgagcactgtgtagtggcttttagtagagagagagatcagtcagtgagagcctgcagaacactgcactgttcttggagaatagttcagacttcctggggtgctgcctacatggaaagttgttgcaggctactaatgggcctggggtgcaagatggggacattgggtcaagggatgtagtcccagcctcagcttgatgacccgtgacacagtacaacaagggatttctggagcaagaaaaagaaaggccctgttaagagatgctgagggagcatctcgtaaaacatatcctatttgaaagttgaaaactagactgccctagctagaggtgtgtagaatcatgtcagttcaaagcgcataggcctaaaatgaaagagggacttccctcacattgctggaagaaccctggttgtcactgttagggtgtacatcttggggcttacagctctgggaatggtgcagccatggggtttcttggaagagtcccttgctacttgggcatgatcctcattctttcacattttctctgactttagaacctgttagagaaaacaaaacaaaaatgataagcacacttcccttcttttaaggtgtttaccttagtgtgagtggaaagaacatcaaagcactttatacatgtagctgctcaccaggagagtttcatcacagggatactgcacaagcttgctgtagaattctataagaacaggaaattggaaaataagaagggtcacggaagttagtactctgacttgcatagatttaaactcttcaaatgaggggaaacttggagttctttgggttttttatttgtttgttttgttttgttttaaagatttatttatttattataagtacactgtagctgttttcagacacaccagaagagggcgccagatctcgttacggatggttgtgagccacggtttggttgctgggaattgaactcaggacctttggaagaacagtcagtgctcttaaccgctgagccatctctccagccctgatcttggagttcttacgagtgataggtttgggcctgtcaaacagaggacaggagtgcatttttccatggttgggagcatgggaggccctgtgtccacacgacacatcctgaggctgccccacatgggtccttgtggtcttgatgcaagccctatatttactgatgtattgccccggcctgtgagagagatgctactttcttggctccttaaatcaagcttttttttttttcttcccacacacttatttaaatttaattacaaaatactattaaaaatgcacaactctcattttccccatgtaaaaaagcaatacaccatcagcatctagaagaccctttgcttctgcttttaatatttgaaaccatgtacatacatgttactaaactattttgtttgagttacacatttaaaaacttgacatacatggaattatagtgtatgttttgtagcttgtgaggacttttggataaaacttgatgagacccaggctcaggtgtagaatctgaggtcaacatttcttgttggttagtatctgccttaagcatgttcctgacatattctttgtcctgtaatggtgtgctgcttatttgcaaacatgtctactagtaagtgtgctgttgggagccttctttgtgtttcctgattcaggtgcaggtggtgtatggtagaagataagcagtatttggacccctcccccacccttgccataccatattgtctgggctcaccctgtcagctacagccattgggctgctgaaagggagctctctgggcatttggtgaacacagccagattttagcctcctgtaggtggttgtaagtataggtacttcttgtctgaagtatctacgtctctgtttgatggttggctgctggtctgtaggatggatggcctgtgtgtgtcttacctttcagttctaagctagcctgctagttgctttctttagaattccctcttgcgattcccatgatccctaaggggatattcttgttttattgtttctgtgtttattaatgttattgctaactctttctgtattctggagtctttgttttgctttttgtatatttattttgtctatatcccattctggttgaaccatcttttcaggtgtgcacccctgtctgagaatggtgtcttgtcaaggttctccctctgtgctcttgctgcttgatagcatgaatgtccttttgaggtgtatgtggacgcagtgttccttgatttcttagtcttgtgctatctatttattgtctgtctgtctgaagagtaatgtatttcaggagttggggaacattttaggacttaacttttttcttttttttttttttcttgttccatatttttttttaattaggtattttcctcgtttacattttcaatgctatcccaaaggtcccccatacccaccccccaatcccctacccacccactgcccctttttggccctggtgttcccctgtactggggcatataaagtttgcaagtccaataggcctctctttgcagtgatgaccgactaggccatcttttgatacatatgcagctaaagacaagagctcccgggtactggttagttcatattgttgttccacctatagggttgcagttccctttagctccttgggtaatttctctagctcctccattgggggccctgtgatccatccactagctgactgtgatcatccacttctgtgtttgctaggccccggcatagtctcacaagagagagctatatctgggtcctttcagcaaaatcttgctagtgtatgcaatggtgtcagcatttggaagctgattatgggatggatccctgcatatggcaatcactagatggtccatcctttcgtcacagctccaaattttgtctctgtaactccttctatgggtgttttgttcccatttctaagaaagggtagagtgtccacactttggtcttcgttcttcttgaatttcatgcgtttggcaagttgtatcttatatcttgggtatcctaagtttctgggctaatatccacttatcagtgagtacatattgtgcgagttcctttgtgattgggttacttcactcaggatgatgtcctccaggtccatccatttgcctaggaatttcataaattcatttatttttaatagctgagtagtatttcattgtgtaaatgtaccacattttctgtatccattcctctgttgtattacctagaacaaggacagcctcccattaccccacttgatgcatagagtcaggaagtttactgtgacccaggactgttctctgtagtgtacatgtgttcacattttgttgattgtctggtaaggatggtttatatgccaaaagaaactcttggatcctgcctagcattcatgtcttctgttccacaggcttctctaatctgggacagtcttagtggtctttctgtggcttcctgacaggaacattatggaaacagacagggttgccattaaaaaataaaaaaaaattaaaaatctctcccctcacctttgttcatttcctcttgtttcattttgggtggtttgtgttgggctgggaggctgcagaggtgtcgtagtgtttcaggtgccctgactttcacttgtttcaggaggctgaaggggtgttgccaggagcttgttacaagaaactgttgggggactgcaggccccctggtgcctggcctccgggaggcttctgagttcttctgtgactcctggctgaccttgctgacaaccccgatgactctgattactctcatttgtttagaggtgacttttcgctatgaagaggagttcctttctttcttgtttatactcacccgaggtcctggattcctggctgttacctgggctgtacccctttattgttgtgcacattgtggtgctcaggctgccccagatctgactcatagcagttcttgttctgacgccactggcaggtccccagaacctaaggcccctcttcatgctgactcagtacagtgttccagtcctggggttgctgttcctttatgaggcctcaaagttgtttttgatgtgtgtgtgtgtgtgtgtgtgtgtgtgtgtgtgtgtgtgtgtgtgtgtgtgtgagtataccccgtgtatggggtggatacactagaagttgacatctggtgtcttcctctgttgctctccattttgaaacaaggcttctcactgaacctcaaactcttcctttaggctacactggctgacagtggaaccttagcgaccctcttttgcctttctactgctaggatcatggttgctcaccaccatgcccagtgtttgtgtggtgctagatacctgaattgaggtcatcaggtttaacatggtgagcactttgtctgctgagccatctccccagccccttggaaacagcttttagaaacatgcttcaagtgctatggcccagcatacaactggggctcaactaaagaggtaattgaatgcagctctattttgggttcttgtatgtaaatcccttatgcttgtacctgtacctccagttccactcagcattgtggtggccccgggctgtcttgtctcttcagagttgatatttccatggacagtaaagtacttagcacccagaatgtaaaaaatgatttgttcatttgttcaactttagaatattaaaataacaacaacaacaaaacatgtctctgttttttttttttttgtttgtttgaaaaagaaactcagtgaccagaactcagcatccttcgaaggcataggaccaaaccttgtgtccagcgtgcttcagagagcccacttctgtgtgaaacatggctcgatccacgtgtctatgtttcatttcaacttctctcttcatactggttctcatttgttggtcttcctttgtgcatatggagctgactatgttccgtgtggcagtgagctttggagattctctcctgctcaccctgaccttggggtagcttgtgtgatagagcaggagtacacattccctctgcatcatgcaaggatgttcacaggcatcgtcactgactcctgacatctactgggctctggatgcctgcttgtttgaagctctttaacagttgactctatcaactaggtaccctataaagggaatatggcagtatgcccactgggactttactgtgggagtagccatatgtatgaccttataggggttgtgttgtctgagttactgtagggaagtgatttatgtaaaaaagttaatatgtatataagtaattttgttacaatttccaaaatttcatgcatagagagagtactattttatagtcctactagctgggtctggcatggtaggtggttcctataggcatactgtgctagcagattatctcttcttacttgctgtctggataaatccagagcctctcttccttcccaaaggctgtttttctgttggcatgttggacttggttccaggcttttccagagttcgtcataggagggaccatgactactagctacacatttacccatggttcccctctttacctgctgctttcgacactttattgcactcatttaccacataagccttctcagagtcgcacccactgtgcactttctgcacctgtactgggatctccggtgggaagcagcttctgtgtagccatcggggttcctccttgtcccttgtgctgtgtggtgagtatgtatcataccctgcctgttgagaggttgctcttgggtgtggtggtgttttggtctaattttatcctaacccagatcaccctcctgttgtcccaatgctgtttatttacaggtccctgttgtatcatgctactgtcacccttgctggaatctgtccttttacctggctgtgtctggtcattgtgccagcaccatgctgcctcaggtataacattctcaaaatgtacatttctgtccaaaatctttctttttggaatactagttatgttgtatatttttctctggcctctccccaaccccccacccccaccccaccccattcccactgtgcctttgggaggtttattttaaataggagtatatgtgtttctatgtgggggtatgtgcatatttgagtgcagatggagtctagaagagaacattggatcccttggaactggaattacaggtgtgagctgcctgatatgggtgctgagacccaagctttagtttctgcaagtcctctctgaattacttctgtagtgcttttcactgttgaacaaatctcccttcagctctagctacttcattatttaattcgttcatttagtttaaaatttcaaggattataattatttttactttatacagctctttttttggtgttttagagacagggtttctctgtgtagaactcactctgaagaccaggctggcctcgaactcagaaatccacctgcctctgcttcccaagtgctcggattaaaggtgtgtgccaccactgcctggcttacagctcatttttaaatatataaccactactaatattggtatttgttaggcacagttaaaaaatgagcttacacacacacacacacacacacacacacacacacacacaatgattagtacatataatctcatttaattcttcatgtccctccaggaaaggttggttgtcatattcccttttggcagatgagaaactgaggcatagggagtttgggagctctctggggcctgcacagctgttaagtagtaacaggactgtctaataacctgctactgctttcctggtccagtacctccttatggcttattatgatgatttttattcttagaactttctgtggacagtgtatgtgttgctgacacagtcctccagggggattctggcatgtttatacttgagtagtggctaagacactgcttagaacacacctcagagtacatgaaccgaggatgtctgtcagggctcaccagctgttcacagcaagacgatctgtggctctgagccttcaagggcaccttctctctggatatgctccattcaagccagtggcagacttatgtttggccttgtccccagatttgccttgctttgaactcctgtctcctgtgacattcttttgtggcctgccgaacacatctttgcaggtgatatggtcatgctggcaggaacagggtcctctttcaggctttgctttgtcctcagttggccgttgtatggagcattagctctgctggaagctctgatgtgactgagcagagagctggaataacctgggtgctgagaggagctggggattagcctggccatgcttgttaatgctggggacagccaggtgattcccaggtggactgccagattgcatgtggctcattgaagggccgtaggtatagtccctacaacttggagtttcaagcctgagttcagttccaagaaaaactgttcttgaattatacgtatctcggggtccttgccccagcttctcagttctgagacaataagatcagttcctggttacctcagagacatcccatctagttctttttttcaaggacttttcttgttctccatatagagcacatttaaactatggaatgaatccatgtagaagccagcttggtagagagagacagggacagaggagagcttccttatccagtcaccaccccacttttgggttccccaaaggtatttgggcagagatcaaaggaggacttccctcagccttcttctgggatagtcttccttgtaagctgctccaggccactgtctccagcttcttttcctcccggcctccctacagcaagcacagtggtagcctgcctataggctgtcagtggggcttacaagtggagctggagcttgtgacttccagctcctgtagttgaggaagcctaaagggcaggggtcctgcctgggtcaccgggatcctgctggtcctgagcctgtgaccactgtcctagactgttgaagcctctgttttgcagcttgtgtccagctatgggatagagctctgctcactctccttttttctgtgcttgttctggtgagtgctctggggttttggcacaacaatcatcaacttcccccttagggcgccatgcctgtttctgagttagtgtccattttcataaagaccagtgtgaaagttttcactagttggataatcaaagaaaagagtggtttgtctttcctctgcagcatagaacagatgatgacaaagagccaagtccgacagcattcatgcttgaaagtgccatggtagaaactttacccctcgccatacaccccataaatagcacacagggttgtgtttaggatgtagggcaatgggaagtttttgcttggattttactgatgacttgactcatcagatggttaaggggggaaagaacacatatgaaagtgtacctgcatgtgtgcctgagtgaaccttctgggtgccatgtgggaacttaccctggtgagcctgctctggaaaggtgggttgtactgtcacctctggctctgtgtgatggagataaacagtgggcagatgacctcccttttgtctggccctcagggtctggggccctggcactgaaactctggcactagtgctgagtgcccctctaagaagagagtcctgagatcccatccttgcttaggtggcattgctgctctgccccttggttgggcatgggacatatggccattttcaatggtgatgctgtcatgtgacatggaggctcatcagctgtagactcgttaaggggtgagggtttttttttttttttttttttttttttagctttcccacaaaggtctaatgcctgagtgaactctagaactctagctctgtgaacaggcctctattctttgggggctaaactaggggcctgagagtccagtatgaaatgcaaggaagaagaaatgagaggcaagagacagataggctgttctctgttacggtgggactgcccttcccacccactgttgaggcattctctcaaggtagattctagtgttcaagcaggttcctgggctcagggtagctgacctatctttcagtgagtagggttcacttgtctttgacagctttctcttttttaagctgcctctaggctgatggctgcatgggagcgaggccagcatcagcaggcacatggcagaaagttggggggaagtgcagatagttgaatgacctacgcccacattagcctcctgactgctcaggtgttgctgaacacatagaaggcatttacaccatgtatttgttacaggaaaatactaccttgattaatggtataattaactgtgtaagttaacttgtgacttgtctgaaagtctcctggccatgttatgggtgtgtctagtttgaaatgcagagtacgaattcagggatcctggacaaggagtagtctgcctctgttttagagattaagttaggcccctttctgtcttgcctattctctagtagttccttgttcttttgtctgtggtacaaggaactcccaaggtgacagagtacctctgcaaataagctgaggagggctgtgccagtgggtacagggcagacaaggtgtggagaggctcaggattcttgctggcaggactgcgccctcgggtggagatccatttagtagaagcttctcttttgggccccacacaggtggaatggcaggtgtttcaggaactttctgcccctgattctactgtgaccctgcgtgttagttaccttcctgtatacctccaaggcagaaggcatttccaggtgcagaaaaattaaatataggccagaggtcattttgtgtgaaggtaggaggagaggaaggaaggggagctggctcacttacaggctgtcttgaggcttgctttgcttgccctggagacagggcactcccctggcctttgagcagcccagtgtctatccagttagattgagtgaatgctcgtggcctgaagataaacaatgtctggggcattctctgtgagtcttgggctgaaacttttgtggcactcctcatatcatctgcttgttatgtaatgtgacaacatggatatgaaatagaaaccagatgtcagggcagagcactgagattcttcccagcaagcccggcggagcagtactggaattttctgctcttggacaaacagatttggaggggcttctcaaattgaacagagatcctaactgaaggtaaaatacctttgaactgctaagaaactttaagggatttcctgagttctgttatataactgctcagtggtgttcccagtgaccagtgctttggaatcagcttttagtatttgaacttctgggggaccattattcacagtgctacttctaactagccaacagcttgcttctgaagggggtgcatttaggaatgaagtgggtatacagtttgttggtacacttgtttgtatatcccctgaatgtccctggggaacattcatgtgtctccactgtgcacagacagccctgtatagggaagagagctggcaggcagctcccagtgctcgggggtcttgttccggaggctaggcctctgtactgatggagatgggactctctaggctccgcttaccatgatgtgcctggactggactttgagcacatacctttgcccttttgaaatgtgaactgttcatcacctgggcagaaaggtagctcctccagtgttaggaagatagctggccctaaacaacacccgttgtgtcccgaggccctgtttgaattcctattagaaaaattaccagaggctgctctagttagtcagctgtgctgtgtcacagttgtcaggtagctcaaggagatggaaaaggaccctggctatactggctctgaagattgcagccatcttccaagggatgccaggtcttgcattatgtgttagtacagtttcctctgtaacacacacacacacacacacacatacatacatacatacatacatacacacacacacatgcagattgtacctttataaaccctgtttcacagatgaggaaagtgtggctcagagattcagatgcctcgctcatatccttacattatatggctaggtagagccatataatgggcagtcttaggcttctcccagcttcctgcagcgtgatcattctcttcaggactagagttgagagtagggcatggggtgttagctgctgggtggtgtgttcaatttgccgatgagctgcagaagaaaaaagagacagatctctgacacaagctgtgatgcatatctgggtacactatacaatccagtacaactgctcttaagtccatgttggctgcttctagtcaatacttcttgtgaaaagaaaatgcaaaaccgttccgttttgctcatatgagcctggagaagttatgtcccaacattgtacagactgtagtgtaatatcctaggcagaaagttgtctgagaagtagggctttttcaagaatactctttcctgtgggaactgccctctgaatctcagaaagtcagttaagatcatgtgagttgctagaggtctgggcaggtaaacatgggaggccagccaccctgcagtatttggtctctaccctgttctcgtttctaaagcagcccatagttcccaggagcagcagcacagttcctacttgtcagaaggtagctactgttgttggcaggagctgtgggccccaggagtctatgttggctgggcctctgtgctgatccaggcattgagccttttgtatgtcagggtttctagatccgtgagcctgcaagatagaacatgcagagtcaggataggttagacctgagaaaaccatctgggctgcagtggcctcttctgggccccctggatgcttaaggctgtaatatgaatggattaaagaggacagagctgcttaccatggcttgtacttcctgttgcccctgttaccataggctcaggaaagtatagatacatgaccccttgcagctcttcagtctcttccaggaagttctgttggtgaattaacgtggcgtggcttggtacagaggtaggtggggagtgagattgggtggccttgtagttacatgggatagtagggttgagttttgacataactcaggtaattcttgtgcttctatcaccagtaggcccagtgggcttagggccaggctcctctgtgtcagagggtttgtcaggacctgttgggcatgtggggccctggcattgaacagatgctcgtggcctggtgaagatcatcttttccagcttttggtttatgtcacagtcatgaaggatgaagtggttgggctgaatttgggaacaggatggcttggcctggaaggaagtatctatgtggctggtacctgactggcactagatgataacatctcagtgagggctggagagatggctcagtggttaagagcactgactgctcttctagagttcctgagttcaattctcagcaaccatatggtggcttacaaccatctgtaatggggtctgatgcactcttctggtgtgtctgaagacagccacagtgtactcacatacattaaataaatgtttaaaaaatattaaaaaacaaacaaacaaacaaaacttctcaatgagagaggcctggacaggtgtctcaagggctttatgtcccatcaggaaagttgtgtctccagttgtggtctctgactgctggaactggcttaggcttatgtgccaccttctgggtttctgaaagttgaactgtctgccttcctaatttaacaaagctggagccctgagtgtagacctcctgttatcagtgtgcagtagcaaggcagcctgtggccagcagcactttgaactagccagtcattcagaaacacttcctatgtgtgaagctaaactgcctaggacactgtggtggcttccactgtgacatctaatcatttgcaggaaaggctccctttccctgttaacaacttgaccagtgagggagagggaggccttgttcctatacatgatgggatgggagtagggaggaatattaggtacaggtgagtgtgtatgtgcacgcgcacgcgcgtgtgcgcgcgcgcgcgcgtgtgtgtgtgtgtgtgtgtgtgtgtgtgtgtgtttgtagtatagtatttaaagtacaaaattcattgtttgctgcctacatctggctagaagtaagttcgtgattgaattgcaactaagctgcacatcgacaatttaaatatagtgaaaagccaaactcagctcttattctttctctaaatctagaaacttctagcacttgttctaacattcttatgataatagttcagaatattttataatttataaaaattaggaatagaaagttagagagcccttccttctcctccttcccctcctcctcctcttcctcttcttcttccccctcctcttcctccaaggtggattcataaagaaaggggacaaaagtagaaaccatgttgccaccagtgtggactttatacattcaggacattgtcagcccccgagaagacacagactcttcaataaagtcacacagctccacaccaggcctagtgaagttgtcagggctaaagcaataaggagtgctctattctctgtcctgaatggtgtggaagtgaggtttgccgagtgaggtttgctgctgtggcatccatcagcgctcacacagatctgcagactaccaacaagaatacgaactgccaaggtggtgatggcgtctataggaaagtaccaggcccacctgcttgacctgggccttgtggttgaactgtaggggcctcagcgtgtgtacttgactgagctgtgtgtgtcgctaaggaggtcttaggttccaaagggttttgtatgttcttctgaatatggttttgttaactttagaatatcaccagataaagtcctattcttcttgaaaagtaagtgtctgtgttttgtggttgctaatctcttgtcacatggaccattttcctttagaattttagtggcactggagtgacagcttgattgaaggcttctaaccccaggactctggcaaagtggccttgccatctgtgtagtttgctgttggtcccaggtccctggaaaacagcatgtcttttgaagaataacaagacctaaacactgtgttttgccggctgagtttgcaggatggtcttgggtgtgctgaattctacctattgtccttatgggtattcagggttaaataggacccacactgttcatctgctgcctcagattaataattcaagtatcactgtaccaccaagctggtgtcatttcatacctgtgacatgctccttgtagtcagggcttattttatgtggtccttcaagtagggaataaaagttatcagcaacaagttttgctcctgtgtgacacacacgcacacgcacacagaagcagcattgtagctgagggcttgtttgagttttctgtcttcattttatacataaggctaaactactggttggggtccactgatgtagatgtagataggacgctggaaatgcagccacagttcatttctagagtacctgctggtctttcaagtttataggtaggacctgatacgggacctagaagctagtctttgggacagggctgggagagataagtggacaagatgatgccttgactgccactcagtgactgtgcctacacagaacaggctgaggctgggggaagacaaaatagtgctgtgctctttactagcagtcttgcagcaagggcttgcttggagcagagccatgtctgcacactgtcaccaagttacttgatttcttctactttgtagctggaaagagggaaatacctgctgagaaccgtgggacactgggaatgctacctcctgaattctcctcctttgtgggagaagctgctcctgtccatacctgcttctgcctaagccatggtgggtgaggaagaatggcggctctctttaaccagctctgctcttctttcctagcttggcagaccttatgattggcctaggaagattacttagccactttgatttgagaagccagatgaggttgctgctaattttgctttgcttttgactttgaagtgaacttgttcaaacttccatggaagcctctgctgcttcctttggctgacactggtctaggttttgaccactgcatgtctatcacacactctctttgggcaaactcttgtccaagcagaattcaggttttgggttccagcctcaggatccaataggaatgaagggaagctggagttcggggtgtttactggctgatttggcagtggtgatttttggctagggtgtcactcttgactcctcagtgaaagactgagaggcctaggaaaggctggtgccctcaggcttagacacaccctccttgatgttagtagttttgtaaggcttctaatggatgtccagtaaacacatccaggagcatggtggcagctgaagatgcctttcttgctttgcgtcacaaagaaataagtcagtacttgggaggttgaagcaggagcatcactgtgaattcagggccagctcagattaaaaaaacaaacaaacaaaaacaaacaaacaaacaaacaaagaagcatcaggaatagggcagccttgtgaaagcctgatgtaatccagcctgtgttcttatcccaggctcgcagctccctgtggcaggcaggtaatggtatgggttaggtgttgcaccctactccagtccactcttggaggaggaacagtccctgtggtaagaaatattttcatcctttgatggtggcagctgtcacgtgagacaattgccatatcaagacttgggctgaggggagtttcccctttcccagaggggcctgcagcaggtatttggaacagggaggctgacctctatgaagtgactgctacctgtttcaaaggcactgtagaaaggccttagttcccatcagcagacctggaaggcaggctttgagggctgggtgttcttagctggagccgagaagaggatcaggggtgtatcttctcagatgggatgggtcaaagaggactgagcttttctctccaaggagggcttgtgtggaccccttgtaggactctgccatgaggtagcatgggcacaagtgcacatggtgagaaaaacggacttctacactagtgagatggctcaggggggtaaaggtacctgccaccaagcctgacttgcctgagtttagtcttctgggcccacatagtggaaggagacaactaactctaggaagttgtcctctgttctctacatgtgtgctgtgacacatagttagacacatgcatgcatgcatacacatttagggaaaacaaagtgcttcctataggcctgcaataagtcttttagagagaagggaaaggaagaaaggagcaagctggggaaattggtccctttattcttatgctcgtggggaggtgggagttggaggtgcatcctttctgtggtggctgtttccacttctgtttcatggtccacaggaagactctactcagcttcactccatttggggaacagagtcaagcacagctgggaatatttttcttactcacagaaggaagtacagggcctgagatataaagacaactttataaaagcagaagccttctggtcctccagcctgggactttgtggaatttgaatgtgattgtagttctactatccatgaggaaaccgctagcagagtgttgctgagcttttcaagggaggctaatgtgactgtagaactgagttcagttcatttagccatctgtggctagtggctgcccacagagctgctgtggggcagccagggctagagttggcaggttcttcatgtgcttatttgagtgtaaggacttcatccatttgaaattcccaaatagggtgaaaacaatgatcctgggtcaactgcagtcatcatgggttctgggacccttcttagagccatatgaatgacagcccaagcaccgcgtgtgcttactgttctgagatcactgaaacaatatagagcagatagaaatgtctgggtgggcttcagcggaggctgcacagcagacacttatcacttgtctcacctgcttcttcctcatctgctggatccccagctgtttctgcaggctgtcagcctgtgtctcagtgcttggactaggatggtgtaccctctcatttctcatggcagaccaggacaggaaacttcatggcagaccaggacaggaaactggccctgaagtgagtaacctggctaggcttggtgtggtgtctggaagtcagcagagtcggcagaagatgggacccacccaaatggccttttctaccaagtcatgcctctttgtgtgggtgctgttgagacttgcttggcccctaagtagctctcagctactgacatattaaccattactataaactagcatgtgtcacctgtgcacctgtagtacctgtttcctccttgtgctgttacacgtttacatgctgagtgtgtggtcacaagaggtgtcagatcattggagtattctgttgagtgtgaggtaaacatcattgacttcatactatttgtattaagcatcccaaagtgtccctgtactgaggtgcttttgcttggcacttgtctttctgcagcagcttttcatgaggaaaagcctaataaatgaaaggcctgtaatacagggaggccctttactttagtgtatgttgacctaggggaaagctcatggtgtcgggtaccatcccattcctgagtctgaggatctgaagcaagaggcctggtagaagaagaggacactccgggtgtccattctaaaggaaagtgctgcacactgtaaagtgcagccaggctctgagtgatgcttgtcattaaagtttttatcagtgtcagtgccattctagtgtcggccacagggcacctgcaaaagctctatactgtgagcccagatgcaggagcttttttacctgtggcacatgttctgtctggagcctgaagaaaggttgctgaggtgatgacctctgaggggttgcaaagactttgtaaggaaatccccatagtacacttagtctttgtcaagtgatggtggtacttgtgacaactaggattgctgggactctagaaggttacagggtaagtaaaacttgtcccaagtcttcctggagatgcaaaggttccagtgtgtagcggggttggtctctgcctgtgttttagcccctgtgatgcccagaggtctgacctcctcggataagccgtggcttgtcaaaggggtctggcccagtcagatgtgaagcctagattcaatctgtctcttctctggagagacccaaatgtttctgtcttgttcctgaacgtttcatgagtaggcttgcttgggggatggggtggggtaactctgtctcagtccctaacatctctgttgtgtgaaacacattttttccatcatgattgcaacagggaaaagaatacaccagtgactgatttcaggtaggatgctaccttgaacttagtgtccatgtcccacagcatggccttgtgtgcctgagaccttggtggtgtgtgcctctgtggcagtgtgatctgacgggactgagggcttgcagcatggcctcgccttgatcagtttgaggaacaccactggcctctgtgtctagaagctttgatgttacttctaggtccctgtttcctttttgtgtttgtggttttctgtgtgttcctaccctgtgcttggtagggctgtgcaagggaggttgatggtgtgggtttctgggaagtcttgggaacgttttaagctaggatagtaatttagtgatggattgatctttgacacttggggtgctgctagtgtggccaacactcatactactttgttagcagtgaacagagctaagggggcctacctatcacatggtaatgtagtctccttgtgtttacccagcaaaaccagttttcttaaggacaacttagctcagcaaggtttcacagtgccttagaacacatggtacctgagctagagtctagacttgaactgttcactctccctctgtctcagtgacataatacagagattaaggttatgtttgcaggtagtttagtggcatattactgccacacaagcaaggtgggctcttttcaacagggaatctactttgggggacctatttcacatagtgattgtggtggcatctggacaggctgcagacactcctggtcttgtgcctggtgctcatgggagatgttgggtcttgagtgtacctcattgtctctttctggtttctgattccatcagagctgcatagaacagcccagtgggactagagggtgactactgcacttgtcttgtgaccctccatgtgaccctgactgatgccaagaaaggacataggccagcccttattggcataaagtgtcattcctgttgttctttatataaaaattaacatgaatggggattgtattattttctcctataagcagggaacatcttttggaagccatttccatgtctgttgatgtttttggcagaaatagtgaaataatgaatgtcaaggaattagagacaatagttctaagattgtgtgcctcagataggcctagtgaatgagtgtgatcaccaacccagtgctgagcaaattaacctgctacccaggtttcctgggccatgtcttaggcctctcaggcactggcatcagagcctagaatggagaacaagcagcaccctgtccatccctatccctaagcacctttgggccttagttcagtgatttatcttcaagggaaatgagcggaagtgataataagatgaatgtgtagtccttaacaagcagaaaacaaaaacagtgcagattcttttaaatgccagccagccttgtgaccctgatctaaagtggccctgaaacaggaaatgtttatggggtgacctttaaaatcaagcattggcatgcagctagctgtcagcatctaagaaaagggagaccaactcctgaagacaggcaaagcagagactcggggcttggggcactgaactctggggctgttagcagcacatactgccttgatactgaagtgaatgtgtgcatgcttgcacgttttggtgttggggaaaattccactttttgttagtataggtcctgctgctggtctgtttgcatagactctggaggtcagtttgtctcttgattggagacattggatctctgaggctcagtgttcctcatccataaaatgggatgcctgtctcttgggctcttctggtgcttactagactatcacagttagccttcctgcttgttgaccacagttgtcatctcttaccttggtggagacacttttatttcagaagcaaagtgaagtttggacacaaacaggacagaaatgcttggagaggcaggggctgggtaacaaatactgaattgatagtgagctggtacagagcccatgaccataaatagtcatccttgtttacaaagcaggatgtaccattttacaaagaatagaaacctgtgaagaaagttgatgtggtacatacctgtggtactaatagatagattgtgacttcgattaggtagcatggccctgtctcctctcacatttatccttcctccccttgcccctgaaatggctggagatgcctctcaatggtggcatgcttgctctttagcctcaaagccttggcttccacccccagaaccagagtaaaacaaagcccaagcaactatgaaggtatagaaagaaaccctttgcttccttcaccaaggccctggcttagttttctgtccagcctgggccagcctgtgtggtgtatcactgtcccacaccacatgaagcatgcctgtcacaggctgcttgctctcctctacccttaacattcattcgtgcctctgctttcctcctcctcttcctcctcctcttcgctcccccttttcccctcccctacccctccctcttcttcctccccgtctccccccatggccacctcctgcctgccctggtagctaagtagtgtcctgattgctatcatcctgtccctgcttccagacaactctgcccacaaagtagataggattgcttatatatcttcttttgcaagttgttcttccaaaaactgacattacccattcccctataatgatgagatgggcctcatgttgctcctccctctaggtcctctggcttgaagtgtcaccctcttctgaaggggaggtacctgtgtggtgaacttggtcctccatgtcctcttggataatagcatgaagggtacttgtatttggacatcagtgttgcctgacctacagtacttggcgtgcttgccaaagtgtgttgttttatttgagaattagcagctcctgtaggatgattgggagacaggctggtgatgaggaagggtggcctggctccctctatagacatttctgtgggtggtttgctatattttttcttatggcatttgaagtcttctctcagtgtttacccccagcaggtgcttattagtaaatgcccattgccttggtttccaccaggaaggaagaaaggagggcaggtttgctgcctctggggtcttcaagccaaccacttagagtgttcatggagcataggccagtatctcagtgtgggccttgagtggatccagagagaagacaaatagaacaacctgggcagcagctacaagacaccagaaggcctgagttctccctgctcctcagttcctcggggtagccagggtctggccttcctgcttctctggagtcccgccttgtgtcttcactccttgggctcgactgtgccatgtttattaatctttgggttgggcactttatttctaaaagtgagttttctgcaagatgcttaaaattcttcactaacattgggaaaggatcaggtcttagccaaacttctggaaagggaatctccatcattctaaggacagctactatatcgaaatcctgggaccctaaagttcaaaagtcagctggcctctgctatttcaaggaatccaaattccatagatctcagtcccttcataggcctctgttgggggtggggttggaggctctgggttccttcaacccccaggctagtagctattcctggtatattactgtagggatgtttggttgcatgttctttaaagtaaggctacatacatctaatggggcttattgtttattgtgatgtgataatttaaagttactgacttcgtgcctgccagagagctggaatgaacttgcctgtggggtgctgttgggtacctttcccatgtggggtttggtcccttgtaggcttttttttttttttttaaaacaaacaaacaaaaaacagttaaaggtttttgtgaaagatggcctcactggctgtcttctattctgccttcctcctctaaaaggagaaaaaacagagagagaaataaaattttctttctttggtccaatggctgtgcctgtgatcactggtcactggacctgacttcactcattactttgtttgaatccccagatagactttgatttgcttttctggaataaagataggtgattttaaataaagttttggtaggtctctgtttccaggctctatgcctgtccgctgtggtacaaggctcttgtagtgcatctgggtcactgcccccagtccatcagattcttggattctcttggcccctgcctcaaggacgtctgtgtttatggggttgctattctctctcagaagctctcaaaagcctttgcgtcacatgtccagcaaacaacaaatgctggccagaggttgtgttctcacccagagcactgtgccagagaactctgctttctttggagccaggactggatgaacctggacctcaatgcctgtgggccagaccaaagacagcacttggtgctcctcgacaggcagtgcacagggtcacctgaactgttgacactcttatactgcacccaggttcccagccaccaggggccagacctgtctctgtgtccccacttctttcagagagctgaagttccaatccctcccacccccagccaggcttttgccccaacagcagtgtcctaccctgatctgctgccaggctgcagacaaaagcctgatcagtagtcatgaactcttgcgaacaaacattccttcttctgggagggcaaggcctactaactcttttgagtctcaccctttctctagaaggtgctagtggacatttaagatcttccttgatatcttccaactggggacgtcgagtaaccagatgaaaagcacccacacagatagctctagtacacccactgccaaaaagggctacgaagcagagattaccctaaattaggaagatgattgttgctgtgttaattgtatgctgtcttctaaagctgtttttgtactctaggccctggcagcaggctggctgtgggttctcccatgaggtattacatactggcacccgcacagccccagttcagggaggggagtatgtgcctgtttccagagccacccagctccctagtctctctttaggtgatgagctgaccatctttctttgtatttttagacaggtttcatgctgttgtgcaggctagccttgaactttgaaccctcctgacagtagttgggattgtaggcatataatactgcacaaggctttatttaactttattaaaatctcactccagtctgctctggtcttctcagtgctccacccccacacaggtctttatcacaggagatgcaaacaaacacccttctattttagtgtgcccgtcgtcagtgtcacagctgttgtggcttgtcttgttggccaggaaggcagtccttggccccgcagctggccctggaagctcacacttggcctggccagcctgggccagtcatggcaggccaggatgacttgcaagtccgttccctgccttggttcttggctttctcacaaaactcccaggtccttgtgttggtgatccttgtgttccattgcacaaggcccagggagcctgtgcagctgagtcctttgttagtagtataggtttctgtttgagagttaccccgggacatgcagacatcctgtgggacatacatgataaagtggggtgggcacccacttctgagcagctctttcctttcagttttcttgctgtctagattatttattctgccaatcatattgtataaagcttttcaaattgagaaccttaatttgtaattgatgggactcagaatcccttgtctgtctaaaactctgttggaaatctcagagatctccccctcctcttgttatacacagaaagaaatgtccttcagcaatgaaaatagatgtgccttggtttgtggggtccctgtgtcattggcactggctgtccccatggtcagctttttgggaaggcttctcttccccacgtgaggatttaactgagcatggaaccatgtaagagtaataatacaggaaataatagctcatatttggaaaagaaataacaaatttattaaaaactattagtatattcttaggttttaatttaaaaagtggatttttctctgattactgtcaagcatggttttaaagacattatttagtacaagaaagattatatacaaaaatgcttcttaaattgtactgtggctgagccaaaacttaacatttttcctttggtggtttatcttttatattttattaagaaacaaaacagcagtgaagcttctacctaggctatagattgctagcccttgattctccagtagcgttggaagttctgtcttcgttggagtgagtctttggagcagggatggtcttcatcccccttcccatgttcccttgatgtcggagcttttgtccttcccctgagcagctgcactgtcatgtgtcagggtcatgctgttggtgtccagctttgctcattcacagtgttcctgtcctggtcccaggggcacttctcttgttcataggctccttggcatgggctccagcctcttaggggaactttcctgttaccaccctgtcaccacaccagctcctccatagtggtgacatctctgagagcaagttcctttcaaagtcaaaatgaaaactttgtttgttatacatatattcaatatatatggatttatttggttgagaactgacctgttcacagtatatttacttgcctagtttgttgtcaggtctcttgtaactttttgtattaatgggtttgcttgcttgcttgtttatgtgtgtaagtgtgtggtgtgccacagttacatgtgtccataagaggaaaccctcagtcacgtgtggattttggggcttgaattcaggttgccatgcttggaggcaaaccgctttacctcataatcaggtcttttatatttaccacccacatatgccctggtccttcagattgggttcaggactttgtacttctatgtcttttagttggtttttatacttttttttcctataaagatcttatattgaatttaataatttgtaaattgtagctaccttttctgttaaagatgatccttttttaagaaacttaaaatttagtatgtgagtgttgtgtgtgttcttgtgggtatgtgcacgtgtgtgcaggtgtgtgcataagtgcatttggaggtcttcttcaattcctttctgattatttttgcgatagtctctcactgaacctgaagctccaatttggctaggctggctgggcactgagctccacagagtctgttcttctacctcctcgccagtgctggagtacaggtgtgtagctcgttcggcagtctaaacttaggttctcatgccttgaaagcaggtgctttatttactaatcaagccattttccattctgtgtatctttcttttaaattaagtttattttcttttttaagattagtatatgtaaatttattataaatggatctctctctctctctctctctctctctctgtgtgtgtgtgtgatcatctcattattctaaacttgtatagtttctgagcagatttctgtgacttcttcagtgtttctaggacaaaggagcattaaatgtagagggggtagtttttcttcttcctttctcgttttagatgcatgttctagtcttgtggtgtggccaggaaggagttctaggacattctacaggggcagagactagatttcctctggttttttggcaatgggatagttcatctgcaggccgtgcagcccacctgtgatcccagcacataggaggtggaggcagcaggatcaggagttcatggcccacatttcaggctgtcctggctacatgaaaccctgtttcaaaaacacactgtagcaagttccatatagggtaagttcatggtgatcacatttcatttgctcagcatctttcttgcctctgttgctgtggtgaggcagagatgccttcctgctgcagctcagctgagggtgatgctgcctctctgtggactgcagtaagtcgacttcttttaggatcttcattctgttgctgagttgtagtagcctctaatctctctttgggatgtcagcttttaaaatactttccaaaagaatttaatattagaattacttatcaaatgttttgagactcttaagtctttgtggtcctgtgttcttggtggttggaatttttagtttcccaggatctttaatgattgccagtagtctgactttattatattcttattctctctttctgttcctttcccctttatccccctctctatctccctcccccttcctctgtccctccctccctccctctcagaagtctcaggaggtggccttaactgtgccctccctccctcttgtgctaggttatagacatatgcaacgatgtccattcacttggattcttagagaataatcttgtaagagtttgtcttattttatttaaaatttattgtcatcaactgtgcatgatataaccatatatttaaaaatctctgaatctgtagttatgtattttattttattttttccattttttattaggtatttagctcatttacatttccaatgctatccaaaaagtcccccatacccacccacccccactcccctacccacccactccccctttttggccctggcgttcccctgtactggggcatataaagtttgcgtgtccaatgggcctctctttccagtgatggccgactaggccatcttttgatacatatgcagctagagtcaagagctccggggtactggttagttcataatgttgttccacctatagggttgcagatccctttagctccttggctactttctctagctcctccattgggagccctgtgatccatccactagctgactgtgagcatccacttctgtgtttgctaggccccggcatagtctcacaagagacagctacatctgggtcctttcaataaaatcttgctagtgtatgcaattgtgtcagcgtttggatgctgattatggggtggatccctggatatggcagtctctacatggtccatcctttcatctcagctccaaactttgtctctgtaactcctttcatgggtgttttgttcccaattctaaggaggggcatagtgtccacacttcagtcttctttcttcttgagtttcatgtgtttagcaaattgtatcttatatcttgggtatcctaggtttggggctaatatccacttatcagtgagtacatattgtgtgagttcctttgtgaatgtgttacctcactcaggatgatgccctccaggtccatccatttggctaggaatttcataaattcattctttttaatagctgagtagtactccattgtgtagatataccacattttctgtatccattcctctgttgaggggcatctgggttctttccagcttctggctattataaataaggctgctatgaacatagtggagcatgtgtccttcttacccgttggggcatcttctggatatatgcccaggagaggtattgctatgtctaattttctgaggaaccgccagactgatttccagagtggttgtacaagcctgcaatcccaccaacaatggaggagtgttcctctttctccacatccacgccagcatctgctgtcacctgaatttttgatcttagccattctgactggtgtgaggtggaatctcagggttgttttgatttgcatttccctgatgattaaggatgttgaacatttttttcaggtgcttctctgccattcggtattcctcaggtgagaattctttgttcagttctgagccccattttttaatgggattatttgactttctgaagtccaccttcttgagttctttatatatgttggatattagtcccctatctgatttaggataggtaaagatcctttcccaatctgttggtggtctttttgtcttactgacggtgtcttttgccttgcagaaactttggagtttcattaggtcccatttgtcaattctcgatcttacagtacaagccattgctgttctgttcaggaatttttcccctgtgcccatatcttcaaggcttttccccactttctcctctataagtttcagtgtctctggttttatgtgaagttccttgatccacttagatttgaccttagtacaaggagataagtatggatcgattcgcattcttctacacggtaacaaccagttgtgccagcaccaattgttgaaaatgctgtctttcttccactggatggttttagctcccttgtcgaagatcaagtgaccataggtgtgtgggttcatttctgggtcttcaattctattccattggtctacttgtctgtctctataccagtaccatgcagtttttatctcaattgctctgtagtaaagctttaggtcaggcatggtgattccaccagaggttcttttatccttgagaagactttttgctatcctaggttttttgttattccagatgaatttgcaaattgctccttctaattcgttgaagaattgagttggaattttgatagggattgcattgaatctgtagattgcttttggcaagatagccatttttacaatgttgatcctgccaatccatgagcatgggagatctttccatcttctgagatcttctttaatttctttcttcagatatttgaagtttttatcatacagatctttcacttccttagttagagtcacgccaagatattttatattatttgtgactattgagaagggtgttgtttccctaatttctttctcagcctgtttattctttgtatagagaaaggccattgacttgtttgagtttattttatatccagctacttcaccgaagctgtttatcaggtttaggagttctctggtagaatttttagggtcacttatatatactatcatatcatctgcaaaaagtgatattttgacttcctcttttccaatttgtatccccttgatctccttttgttgtcgaattgctctggctaatacttcaagtattatgttgaaaaggtagggagaaagtgggcagccttgtctagtccctgattttagtgggattgcttccagcttctctccatttactttgatgttggctcctggtttgctgtagattgcttttatcatgtttaggtatgggccttgaattcctgatctttccaacacttttatcatgaatgggtgttggatcttgtcaaatgctttttctccatctaacgagatgatcatgtggtttttgtctttgagtttgtttatataattgatggattttcgtatattaaaccatccctgcatccctggaataaaacctacttggtcaggatggatgattgctttaatgtgttcttggattcggttagcgagaattttattgaggatttttgcatcgatattcataagagaaattggtctgaagttctctatctttgttgggtctttctgtggtttaggtatcagagtaatagtggcttcataaaatgagttgggtagagtaccttctacttctattttgtgaaatagtttgtgcagaactggaattagatcttctttgaaggtctgatagaactctgcactaaacccgtctggtcctgggctttttttggctgggagactattaataactgcttctatttctttaggtgatatgggactttttagatggtcaacttgatcctgattcaactttggtacctggtatctgtccagaaatttgtccatttcgtccaggttttccagttttgttgtgtatagccttttgtagaaggatctgatagtgttttggatttcttcaggatctgttgttatgtctcccttttcatttctgattttgttaattaggattttgtccctgtgccctttagtgagtctagctaagggtttatctatcttgttgattttctcaaagaaccaactcctcgtttggttaattctttgaatagttcttcttgtttccacttggttgatttcacccctgagtttgattatttcctgccgtctactcctcttgggtgaatttgcttcctttttttctagagcttttagatgtgttgtcaagctgctagtatgtgctctctcccgtttcttcttggaggcactcagagctatgagtttgtattttatttttgtaactatgggtgcactgtagttgtcttcagacacaccagaagaagttaccaaattccattacagatggttgtgaaccaccatgtggttgtcgggaattgaactcatgacctttagaagaatagtctgtcctcttaacctctgaaccatctctccaggctgtattcttttatttatttatttatttgtttgtttgtttgtttgtttgttttgtattcttttatttttaacatcacttgtttcaccctttgaatcaatctttatatgaatttttttaaaaaagatcaactttagaatccactccaggatgtctctgtgtagtcctggctggcctggaacttgttctgtagaccctgctggtctcgaacttagatttgcctgcctctacctcctgagtgtattaaagacaccaggaaggcctgagtgctaggattaaggacacatacctccattgttcaaccctccttggactctcttaggcagccactttccgcccccttttggctgtctgcctgagatccttttaggactctctggccttgcttcttttgtaatctgtccttgtccctagagtgccacatgaaatgagtacagcaggtattgtgtgacttttcattttctgagcagtcgtgttgacagtacacaacctttgttgtgatggaaggattcgacagttaccctcagtgggtttactttaaaccatacactcctatactcatcatagtacagcagacaaatactagatctagtacatatctacactatatccagtggggctcctcaaaattgtcaaggtcatcagaaactaggagcctgctgatcaaactgttgcacccagaagagtcatggtagtcaatgagttaaatggatgggaccctagccctggaaaagacaccaggcagccttctgatgcatcttcattggtttgctgcctgtaacaggtatgctttgtgccaagttccagccaagtggatggtccctaggtctcagactctagacagcacttggtcacttgtttcccagattacttcctgtcacctgctgcatctttaacttttctccggaataccttcttttggggcaagagactgtagtagctttaggagttagtgacacagttgtgggtcttgtttttgttacttatatgtgtaatgtttgtcttttctcttgaacagttgcattacaaagtttcaagatggctctcctctcctcatacatgtagcagattcttcctcctttctgggcttccaagctccttgcacgtgagtggctttgtgtcagcacagtgttgctccttccgcaggccgcctttgtaatgtgcgtctgtggctttgcttctggagtccactcactggttattgaggtgtagtttctcttggttctagcatacttctctttccctctgttgctctagcacacccttcttaccttcctttccctctgaatttgtcctctgtcaggcctgagcataccagcctgcggctctccaagtagggcttcactgccctcattctttacctgttggcttttcaagattcttggcttctcatcgtgtgtttccctcactttttgccttttcttgttgaacagttttttacaactcttttccaattcacttaatttccttgttgatagtatggtatctgtgacttaaagcatctgaggtgttttgttttgttttgttttgttttgtttttctcttcaattccatcagttgtccttcttagttttgaaagcttaattcatacagtgattaatgtggacagctctggcatcccttttcattgctcaaactttccaagtatttagcgaactttttacttaatcaaaacatacatgcagagaaagattgtgtgtgaaatattaatgaagttgtttctttaaagttctagaaatatccatctgcttctaattctctgggtgtcagcaattagcttgacttaatgcctccactcttgcaggctcccttgtaagtagagttcttaggctcttggttgtactgtgcagctgtagtatggctttgggtcaggatacttctccagacagggattccacatgctttgcctacgggcctgctgttagcactctgttgagtgaggctgggactgaactctgtcctgagcccctgcacctctgggtatcctctctgccttcccttggtctgaaaggacattagtggagctcatcgctcaagctaagcaatgtgacagaaactgtatttaacgcagaatctcagcttctaagggtatgtgcctgtgagatagattctcttccacactcccaggagaagaagctcccagcattgcattagctgatttattgagtttcttctgcccttctaatttctcccctgcccctactgagtctagcagggctagtactttctggcagaaatgtctttgcctctgtagtatgcatgctctggccctggttagacccactgcctatggcttcttccttctcatgacccactccttgtatccagtgtggccatgttcttctctagctattctgaatgggttgtgttcatgatgaccttgctataggcagtgtggccacatcatccctactaggagaggttctcaggcactgggaagatgcttgttcggagctggtacaatacagtttccaccagggctgctctggctgtgatttttgtgtggctggcagtgcttcaggcagatataagcttacctagtgtaaggttgttttctcttattatgggatgtattatgtatgtcacctgacataatggcagctggctctgggttaccctgggcactgcagtttgggaatcagcaatggaaggcagaggtgagatgtttgtctgaggcttctcagatagagtagcagctggtagtcagtactctgatcctgatgtagcagctggcttctgcatcctgtattgttccaaccctgctctggccatcctcatgggacattggcattcagtgtaacattctgatgggatctgacgtttgtcctcacgtggaacacaattgatcatggtgtcaggagtgtccagtgcccatctcatgaggtgtcagtgtttgggcccagtagtgagtgaatagctgcatgattttcctgtggagactctgccctgctttgtccgttggagggggcagtgggcatggattagtcatgttaccaagaacactggacgcagcatgaatggacttcccagaagcatcttgtattcatctgtttctgtgtggtgttcctcatgaagggtgattaggacacttgtttcagcctttactctggccttgcagttgtgctcacagctgcattgctgctctccatgttcatctttagtgcttagtgcccttcaaggttgacaaagaataggagagcacggcccaggttgtttgctgatccacctaactagcttcctggaacagtgttctctagaactgtaagccagtattccttctccacatcaatcgtaaggacaggacctgggaagtgcacatcattcatgggccatgggcaccactgaagattcagagtgctacatacagcattgggcctcatttaaaatgcctgtgagggtcctttagagttcacagccaccagaggaaagtgtggccagaaccctttacatagggcacaatatgatctgtttctacccaggatgccagtagttaggcacagactcatactatactcagtagcatcctcaggcattctctgcatcagctgtaggctgatcagggagtctctgtgccactgtgactggacctttgcttgcattagtcacagtgagacagcctagatgttgtggctactttctcaagcacatctttccggggctgttgggaccttacttggtgtcttgctcctaggaaaggggattctggtgttgaccgctattgagtctgagagaccagtcagcatcctagcctttttgcttatatacaaggaacgagacttacctatccctcttcttactctagtgtgtatgtattgggtgtgggtttgcagcatgatgtctagtaaaggggatcccctgtttttaatacatacagtccagtaagggtcttctggtcaggcaccagcctcaggaacccagaatttcctgaggaaaacaggaaaccctggctttgtttttgcaaacatagagtggttgttaaatttgagcttgaatgttctgagatctggatgggccttcagctcactgaagctctggactcacccggggccctttttgacctgcctgatgagccaataccctgactgcttcctctggtgtccagttatgtgctgtcacctgagtgcgcagcattgtggatggaggatatctatgagctgatgggcattaaacaagtcagacttcccagatagttctcattgatggatgctgcaaagtgtacctttctacctttttttttttcttacaaattgttttcaagtcagttgaatcctaagggtggccatgtagacaattctgtttgctagagatagtaacctcttctggaggttactcagctaatctatacaaactttgcagcctgtgggatttgttgcacctcctcatagttcttctttcccatgtctcagaccaggaacctcaaattccccgggtgcctgagtagggtgggtggttacatgtggacagggtccaaagaaggagagattttttttcccctggctcttgcagacgcagaacgcttggacttgctgtgaagaaatggcaagttttttatacatgttgctaagtgctggtgggaaccttggaaaggcttctctcgtgctgatattatttaccattctggcttgtgggggtaccagggaaggtggcacccttttttcctctcagcaggcatagtagccctttgcttattggcctgtaaaaatgctacaggtaccaagacccagtggcatggggtctgtgcttctcaggttggccctgtagatagtcttcttcacactaagcctagcttgtatcctcgtgctgtgacccaggtaaacatttctgcccccatgctgaccccagctttgtgttgatcttgtgtatctgccaaagatgacagtgctttgtggcatccgtacctgagagtttgacagtttgttcttcaagtatgcagaagggtccagaactgatgtcattttcttcttcttgtccttcaacaaatagggaatgcctggtctgctagatgggcacagaacactggcaccaagagtagctggatcagtcttgttctcagggatttctgtgtatttaggaagattagctacaaaaactcagcatagtacagagtcctagatgccatcagtgcagggaggagcctaggagagagtggctgctgccagtgagggcttcatcactgctttgtgtgacgccttgtaagtgctaggggtgtataagtgcttgggacttgcgtttggccattgttgaagaaattgcaagagtggggatggctgcaggttgatggtcatgttccttcttgccctgctgttcctcaactctgctgctctgtccttgttgccaacccttgttctgcagaacagcccagactagcctgtctgagcctggtctccagctggacagtctttttccaccattgaggatgatgctgagggtcctaggtacaagtactcatccatttttggagggatcannnnnnnnnnnnnnnnnnnnnnnnnnnnnnnnnnnnnnnnnnnnnnnnnnnnnnnnnnnnnnnnnnnnnnnnnnnnnnnnnnnnnnnnnnnnnnnnnnnnnnnnnnnnnnnnnnnnnnnnnnnnnnnnnnnnnnnnnnnnnnnnnnnnnnnnnnnnnnnnnnnnnnnnnnnnnnnnnnnnnnnnnnnnnnnnnnnnnnnnnnnnnnnnnnnnnnnnnnnnnnnnnnnnnnnnnnnnnnnnnnnnnnnnnnnnnnnnnnnnnnnnnnnnnnnnnnnnnnnnnnnnnnnnnnnnnnnnnnnnnntgcaaagctaggcacacatggaatcatgtacctacatgtgtgtgagggttccagtcaacggtgtcttctgggacattatagcctcttggtgaatcagcaagtttgaggtggtgtaatttctgtgtgagccttcagcttggacaattatgaatcatttgcttgcctcttgatttgcgtcaatcaaaccacatgtgaagaaagcaccatgagcaaggctctgctggcagcttggcatccagcagggaacattcgccaggcatagtttcagaaggctggcctgtgtgcttgccctggtggtctggacggtgggccttaagtggcttatgagttgggctccagagacttgtgtccctgcctcttacccctgtcttcccttggcaagcacctcaagctgcaggtagaatgtgtggaggtgcagttccttggcttttgatgagtgccctctgtgtaaccctttggcagtagctgcattggcacctctgggaatgtctgcaacttatagcagagccattggtccttccttccatgatgcataaaataacttcaggcaagatttcttttaagaaagactgaattacaaaggaaattaccccctacctgagaaatgaggagggcttagcactgtgtagaaggctggctagtgtgatatttgattccagtcctgctaagaaagagccttttccttttgaaacagcttttgggcaggtgcaaccagtctgccttcagtcaagtcacagtgacagctctgctgtgtgtctggctacccaggggaccctagtttagtggtttgcttattttgttttgtttgaagtaggcgggtgttgttgtttttactcttgaggttcctttcactactgttaaatcagctgttaagtgtagctggtgttcttgtctcctgcttagtcacagcagactaagcagactcataccaacactgccaggccctagcctcccaatgagcctggaacattcattttgcccatatagccaggaagtcaggtcaaagtggatttatctctgtttctgtcccctgttggtaaaaactagaatgactgtcatgtggcagtcaaggagattgtagggtgcttgtcttttgtgtgacctgggaatgtactcctcctattgttgtagacaagtggaggcatctaactacagtgagcatcagtagtacccaagtctgctgagcggtgccttcagcagctatgcccccgaaagttctaaaagtgagacagaagacaaggaatgacctcttgcatttaacccccttcagccatgcctcactggggccaggcctggcttggctgttctagctttctcactgcagctgcataaggccttgggactgttgacacaggtgtctaaaagatgcaaccacaaataccattgccactcttcaaatagttcttagacacctcccaggtaccagtgcttaaagcttgaatgttttagaaaagttttgtgtggcattgagtctgttagctgtgagggacactgggctgccatttgtttacagcttcctgcctctgcttgcattttgttttctcttttgctcatggacacacactatagttgcagagtgggagcgggttgtcctgtccagtgaccactgcttgttccttatggtgctcccttcatctgtcccattgtatcttccaaagctaatgtcttgtcgtgtgtgtgtgttgtgtgtgtgtgtgtgtatgtgtgtgtgtgtatgtgtgaactgtgaaccatgtgtttgagtgcactaatattcttcttgttgtatatagggctccatactctggcctttaggggcccttaagcccttttgatgtgactttgtagtctgtgatggcttccttgctttgtgacatcttgttatgccgcacagttcccatccccacactgggaactaaccatttactcggtcctcatctcaggtatctctgattacaccagcaaagtcactctgacatggaaaatagacatttataggctgtagggatgagggtatggacgccttctgaaggctgttgttgatcttatcttcagaatatatgtgatggccttgaaggcagctctcctcaagccactgaagaaggaagaaaccctttgaggaatttgtctgtaggtcaggaatagggtgtaaaacagcaagaactagtgttgtgcttgtctcagaattgaaggcctagagttgaccttcagcttctcatcctgcaggtacgatcatgctccaccagggtcagatagcaccaggctgtggtacctacagctagacaggcgcacccatgggtggctgggagatgctatatgtatgctactgatggtgctcttgtcctgattctcatgggtgtgaaacagtgcctcatccctggctgccatgtgcatctgctgaggctggatgctgagcatctctcccatgtggtctttggccatttgctctctctttgcagagatatctgcttaagtcttttgcctgttctcacttgagttatttgcctctttatgcttgaattgtagatgctgattgtgtatttctgagtacagctcctttatgtgatagccagataaccaattcctttgtgggatagtattctttaagacacactgtgtgtagccgggcgtggtggcgcacgactttaatcccagcactcgggaggcagaggcaggtggatttctaagtttgaggccagcctggtctacaaagtgagttccaggatagccagggctatacagagaaaccctgtctcaaaaaaccaaaaaaaaaaaagacacactatgtgtgtgtatacttgtgtattttggggtgtgcatgtatatgcatgcttgcagaggtcagaggaaaacctgagatgttgtcatcgggaatgctgcctatgtgctttggggaaggtactcctcattagcctgcaactcaccagttaagctaggctggctagccagtggaaagcttctagtttcaacctctccattgctggggttattaagtgtgcctcaccacacccagaatttttacgctggttctagagatggaatttacaaggcaaacggtttactgattaagctatcttcttgataacatcttccccccacccccaccttcttctgtagtttgtactttgctgtcatatcagatatttattgaactcactttgggtggggtgaggtgtggccctctttcttgggacctaggcttctggcttttgtcaaatgtcagtgctgaaaggcttctagggctcttaggagaatgcctattttatggcctcactggcatctgctgtttccagcggctagatttgttttcccacagttgtttttaattgaatgtccatgagaaagtggccaagtaaattgaaggtttctcagagagagccgagtttctttgttggttttttaaactgtgctttttcatcgttattgtgcagtttgttggaatctgcgtcatgtagtgagtgttcattgggggctgggattgctggtctttttttgagcattacagcatttaacgaatcctttcctgctccgaacaaaagtcctaaaaaacattctcaaagctctgtaattttcaggatggctctttcccctattgataggttaatcatggggcacagagccacctggaactcagaaagtagacatccaagcagagtaacagcaggattacaggcaggctctggcacctgggataaggtcccagcacctaagactgatttcctacagctcatgtctgtcccctgagagtccaaacaatgcctgccagcagatgaaaagctctgaagagaccatgtgcaacggtggcagatgcgtcattgtagacagtccccgaggattcagaggtgtgttctcagaacccccaataattccacaggtggggacttttgagactagtgcaaaacccaccacagcacagtgtaactattcaaaatcagtaccctgtgcctgacctttgagttctgcaccctgcactgccttaggtgctgactgatgagagaaaacagaaggtaggttgtgtgttcaccgcatacatgaggtctttgagttgcaagtgtgctggggagagactaatcaggctgtattaaaccttgaactagatatttactgtctctctgacagaaagtgagtcactgtattcttagggtggtattatagaatttcctgaatttggtttcctaaggcctgtgtatgcactggtcggaactggaagccacttcccacctgcctatggtgctcctggctggtgctgcatctcactttggcaaaagtgagatgaaaaaaagtgaggtggaaagttcagctacttcccctttgtgaactttatgtcacccgtgggtgcttcttggattctctctgctcttttttttagctctgcatttctcctttctagttgagcacatgattgtcctgtgggaaatgacagaatttgttccttcagcttgctggagattgtattactcaatgtagaaggtcttttctgcttttgttttcctgttaattgacatgcatcctggggaaggacaggtttcagagagctggctcagttgctagggaaagtcctgtgacagaattgatggcatagccacagaagtctaagctcttgtccagtgcgtgtactcggtgatgtcaagaacatctgtatatggcactggagaggtagcgtagtggttaaaacagtagactctctaacagagaacttgagttcaagtcccagcacccacatgacggctcacaactgtctgtaaatccagttccagggtgcccagtgtcctcttctggcctctgaggcaaatgatgctgagagagagagagagagagagagagagagagagagagagagagagagagagaacgcatgcacatctgtacagaactagctcctttccccagaggtgcccagctgtgtcttatagctagaatttactaaaagtaggacttgggggttggcaggtgcagctaccacacccattggagaatccagagctgggtgtctacgaagctttggggcatgcaccatgaatgatgaattaatgaactccgaaatcaagaacctgaactgggcttgactaccatcctcactgggctagtcatcacactcggcttatggcgagctcgtacttcccttcattgactaccctttgaagaagtagtgtggaagttagaagggctgtttcatcctgtgccttaaacccatagggagctatgacagtagcctgctcatgtgaggacagctcccgctgaggctgaaggatatctttctctccttcatttggggaaactgaggcactgcaggtcagagttcacagaaatcagtgctgagctggaatgctttgaagtggtaccttgtcagtgccaggaaatgggacctggccctttgccacattctgcagatggtaccttttgttcagtaaccctgcacacagatagaagctgcatgtaggtctgtaaggcttcatctctcagtaatttgatgggtccatggaagagtgttttctagcagtgttttctcccaagtgttcacctggaataagcctattttaagctcaagtgtgaaaataattgtcctttatttctgattatgagatggcttggttggtaagggacattgctagcgagatcgatgacctgggtttggttccagaattcatgtggtgcaaatagaaaacctattccaccaagttgttttctgactttcacatgtatgctgtccttaaatgtgaaaacacacacacacacacacacacacacacatgttctgtacgtatgtacgtatgtacgtgtatgcgtgaactaaaaggaaagctaacacaattctattctatactctgttaatggggatctggacatgaggcatctttagatcttctgaggcaggggcttgctgggggctctcctatgcaattgtttcctacccagccaggcccaagagccccagggtagcccatataaaaggcccccccttcttcctagaatcttcccccttttcttccttggtcttactgctcttggttaagcatggattaaaaggctgaaaaggtcattctgatatggaggagtatcagaccctcttttttgacaggcaaggtaagccacttccatgttcactttctgaccatctccctctgcttacctcttggtccttctgagggcagggggcttgtcaacacaaacctagagtgactgtgggatggctgggggacagtgaacaaagaggaggttctggttcccctcatttggtagttcagaactggactggggccaaggggggatgtgtcctctcttgatgactctccttacccttcacttgggctgcctatccattacccttttcagtcacaaggtacccttgagaaagcctgtccttcctaatcaccctagttcttggttggctggctccattggaggcacagcgtggacactgcttttccgagtgttcatccttaggctttctccgtctctgcactcactacttgttagattccaaggaagagctgagcaataaaagtcacaactgaacatcactcgccttcaaaatcattgcctgatttcttttagtaagcttccttcaactgaatttagaccagagttaaagaaagttagttatgcatggaattcaactgtagcttgtagtttgatgtaaagtgtgtttaaaatgctaggtgacatttgtcttttcaggaaaatgcttccattcttagatatgacatttgaagggcatgtgtcaggaatatggtgaatcgaatgactgtatgaaatccaaaagtgggcacagtgggaaaagaaccagagatagtgctgctccttggccccaggcacagcaccgccctgggcctctttccctgtttgttgctgctgccagttgcaggggaagcagttgtagtacgaactcctggtaattcagtctacaggctctctccagaggcgctggggcctgccctggcctccagtgctcacacctcctaagcctgccagcattcatcacgatgaagggttacaagctgtggtttggcatttccggtctgtggctagtttcttgtgtgttcaactctgtagctgtgcagggcttttctcgggaacagttacagatttttttagtttttatttttagtttttactgagttcactgtgtccctgtagtgttgtggaaggtcttcactggatgggggtttgtcccttggttgggactgtgcgtttccgacttacttgtaggcctgtgtaggatgtgacgtgcagttcaggtgaggttttcatggttatagattggagtttatgaagcatgattctaggcacgtggacatggtagatgggagcagagaccaactggcttccccaggttttagaggtgaatccctagcggtgaatgaaacaagtgtcacatggaaggtagaggtggccctagaagttgctccaggcctcctgccttagagcactgctgtgtccccattgtgctcagaaggcctagggacagtgtcctatgccctacctgtggccttcggtactactgctctgtggtaggttgagctggttgccagctgagcacaacttgggtaataggaccagaagtgtcaagcaggatgacaatgttcttgctgtggggacattatgtaggggatgggagagaaacagcatttttcttgtttcactgctacagccttcctggactagctggtccaatactgtgggtcagtgctagcccatccataacatttagcatactaattagatgttctcggttcatgtgaacatgcaccccagcgcctgggttattcctctttgctgctgcctcttgtattgttgaagctctggttgagcaggagagcatgggataggattgggctacatctctctggaatctaggaatgaggtgcatgggagcccagaaaatgaagggcctatgggagcatatatggttgctgaggccttattggagaggccaagaagaactcttgtttcacctctgcagcttcatttaggcagttagagtccaggtctaaatcaggagcttttggagtccagaggcttcccttgataccagggcaggactggagctgatgataggggtttcccagtcctattacttgtgctttctctgctctgttgggaacttcagaactggttcttcgtagctcctctgtcactcctccaattgtatagatttcagcaacttggatacttttctgaagtggctatcaccaggattgtggatgctccttccaagaactcaccattctgtgaaatggtcactttttcatcaagggaacccctttgtcatcagagacaggtacccgagaggcagtggcttgggtcctgaatgttagttaccatatcccctgtggctgtgccctccctacataggacagacatcccacccaggctaacctgccagctgcttccttcactacttaggacccccaagtgccacactgggtgctactcaagcagtttctgtccaggtactctgttagataataggaactctggagttttagggttactatcctttttttaaattattattacacattttcctcaattacatttccaatgctatcccaaaaagtcccccataccctccccccccccccacttccctacccacccagtcccatttttttggccctggcgttcccctgttaccgggggcatataaagtttgtgtgtccaatgggcctctctttccagtgatggccgactaggccatcttttgatacatatgcagctagagtccagtagctccttatgtgtacactgtcatggtggcttttctggaagttgcttctggcccttgtttggcagtattcctgagattactgtggtgctttgcaggctgtccaggagtgacggatccccaccacagggcacttttccccctcaccccacagcctgacagggtctgaatagaatctaaagtgtccccttcccccatccaggtagctgcccagtgggcttttctgtcttgcctctactgcccaccagtggctggatgaggcaaacaaggggcttgtcttccacaagcatgcttcctagagggacccatagtgtttctaggagagtgactcttttaaaatatatccattgctgccctaggctgacttcctacgggacagtttgtcgctgtgtctgctagaagtcacaggttttagaaaggaagagttttatgtgggtttctaaaaagttgtcagaaacagttattttttttcccacatgcctgccctagggtcagcacatcccgagggatcttcacttgtcagctggggggtcagaatgacctggggtagcaggtcctttttggctgatagcagagctaatgctttggccttgacccttttctgtcccctttggcttgctgtggatagggagaggagaggcttgtgagagcttctcagatcttgaaagttctgagagatagcttccagcttgtgagaaaagagagacaattgttgtgttgtagatagtgttggggtggctagcgcagtgtatgtgacagcatggaggagggacagtggccctgacctatacccttcaagccgtgcccagggacctgccagagggcagctcaaccacaaggaagtagttagtgctcatgaaaatgtgcgtagtgtgacaagcccaccaggctaggagtccccgactggagaagcagcatacccagcatctgccacagtgcccctcttcctcccttgattgtatttagggacctacacgggactccctgaccatgggaaccctttgacctgtagaagctggtggctgtatccacttctagtctcagacagtcacattttcatttgccaaaataaactgtcacattctgactggtgaccattgggcaggtctaaggtaagattggaggatcttacattagcacagacatttaaaaaccaaattcacaaaaggccatttcccatcccacatccattcaaactcatatgttgtagtgagattagtttgatccacattagggttgatccacctagcaggtggggatccccagattttgaggggcctttgatgtgagccatctcctgagtggctgagtagcctctctattgaatagggctgtgagctgcttttctttttaagggcagggtcctgccctgcttttctttctgccattgggtctcttcttgagcaagcatctgcctcctaaaggcctgactagatcagagctctctgaagtgtgcccgctgtcctctgtgctcacccaaccctgtcgtttccttccaagcctggggcagtgatggacacaggagggctgatcctcactaagctctcattctgtacagtatgggcactaggcagcctaggcaatgtagtagatgacctaagttaccagggacagtgtcagggctgccatcactcttaaaggtgccttgtctccttggaggtccttcagatgttcctgacacctccaactccaaggccttccttgaccatctgccctagaacagcagttctcaacctgtgggttgcaacccctttagggggcagtgttgaaaaaccctttcacaggaattgcctaagaccattggaaataccagatatttacattaagcttcctaacagtaacaaaattacagttatgcagtagcaatgaaaaatgatttttgtggtttggaggtcactacaaaccatggtgaactgttttaaagggtcgcagcgttagggaaggttgagaaactattgttctagaacacattattttgcagtgttatctataagccactgggctgaggcttgacttcccttttccctgcctcacttctttctagcagcagccatgcttgggcctagctctgaggcatgtcctgcctagctagggttgcaaaggtagaagtgctgtacttggccatctgagttctctgctagtcaccctctagacttggaggcattgtctactggaaagactgagtaagaaggggaagggaggatgctgtgcaatgagtagggcattctctggtggccaacaggtagtaaagatgtacagtgcttgttgtacagaatcttgcctgcctggtaaatatgccatgagtcagagccagagcaactcaggactcacataaaatatgtccaaaggggcttccagtcatcttagctctcaagtgctgggggtggaattcctcctccataggccacattacagtaaatatagtatctttgcagttgttatccctagactagggtagtatgtggggtcctttctctttgtttgggaaatttaagcatctccctcttgcaaggaagttctggcttgtgtcttggcttcttctgggctccatgtgggttttctcccagagcacggtgcagtgggtgaactcaggtgctggaacctagattctaggaggagactagcccaggaaccccatgctcttctttgagtgccttggggtgggctcctcagctgtgcacatgacccttgtcatgacttcttgtggtctctgcagaccccagagcacatctgtgctcttgggctgaggtgagggcatagacagcaaaaggcattgttgccttctcccctgctcctgggggtgcacactgggtggcctcctctggccctgtgtcagcttgggcacagggctaaagctaactgttggttggggagtgcatgggcagactacattctttagctcttggaactacatacagatcagtcttgacagacaatggcatccctcaccccctgacttggtcaagcaatgaaaaagtgattttcagaaaactaatccctttctaactaggtttcacctctgcccgcactgaagcctctttctcctgtctcttcctaattatttttaaagtcttaaggaaaacctcccttctctatttatagctccatagacagtgagctgtcctgtttcttttttctgtggggaatctaagcttccattcctaaagtgacttattgtggcctctgacactgagccaaaattgtcgtaatctgttaagactccatttcatctccctggaaataatgctgctttaacagctacaggggaaactgtgcacacggtgtatagtggatagccatttcctgcgggagttctgaggtcaggggctttcagtgggatatcttccacactccaagttcataagacgtggactgagggatcccgtgcccaggtctttcaggtgaaggtacatccttctgaaaatggggagttttccctgtggcactgttcatgaagcaaggtgccccaaaccccctctggagacatagtctgtcagaatctttggctgccctggctcagactgctgggcagagttaccagccaacataggttgtgggagctgctctgtcctcttggaaataatgggggggatagtcctgagttggggatactcagccctctggagggtgcttcagctgtttctcaccccaggttttctcctctgtcttgctattcttttcagggataccaccttttgttctgaaaggagacaccttcaaaggcttccttttcctacctgagttgtctggggatccagaagagtccctctgtaagcctgtagtgttctaggttccctatgtgtctatcattcaatacactggctggtgtttgtttgggggtaataattgaacggtgtttcatcatgtcctctcaggatgttgcacagaagccataaacagcaacctcctgaggcacaggaccctaggtgggtatgaagggtgtggtcatgcactgcgcttcacgtacggtgatttttagcatagcaccctttcttctttttatctgtggcacatcaggtaggacctgccatgtgctctagtgtagagttaatctctacagtgactttggagctgctctaaagctcagccttttcctattagttttcccagttatctttgtaggatcgggataagtgttactaatcttatcctttcctacatatacacaaaagaggggatgagaggggagcagggatgggcagacaggcaggcgggcaggctgatagacttatgggcagactggagtgtcctaagccttgggtatctgccttctgtggggatagggaaagactgcaggtctgatgcttgcctgggtggtactttctttgcaggggtccacagcttgcataaagctgtgcttgcatagtggctactgacaggatgaggctcctttgcaaatttctttggttcaagtgagaatctacatccccagaagagaccaagcctctttctcccagagcagtggacatgccctcataccttcccctgggaaagaggagacagggttcatatcctaggtggagaccactaatggacataagccctggaagttaggctgtttcccagaatgacctgctgtgagaggtcaggctgttgggaagaagaggagtgacacaggccagagggaattgtgcgcctgttggggaggaggaaggaggacacggtgaaaccttcacttaggtgtcctcccttataacatgaccttgatcccagaatgtcgtgaagagggctcaggacacctgatgcctgtgtcagctcagtgtcatttaccctcattcctgaggatgactcgagcacattacgcctcacccagctttcacagtccacattttgctccttacagaacaccttctgtgtgtatatgtgtggtagaaggggtggtgtatcgggcagcatagacttccattcagtcttactggctttctgcatatacaagggctctgtgtcttttgttagattcttgcaggtttttaagattaatgctgttatttttgaaggttttaaaaagatttgcttttttggttgttgttggtcaaatcttgtctagcccacttggtatactttacctctacttctgtgtgtatgggggaggggggttgtgtgcggtgtgcatgtgccagtgcccgctgtagctggatatacatggagttgtgggtcctttggaagaaaaatgtgtactcttaaccattgaactatctctccagacccattctttggtattttataattcttttattgttaagttgctgtatgtagaaacacagtatcaacttgtatattgtccttcctgttgactgtctctgtttattaattaatccctgtcctgatgattcttcttgatgttctacatgccaagtgtaggtgatggtcattttggttttctttcttttacttgcctttagcactggctaggtgtatagaggacattttgctctggtgggggtggagtgagaagtgagtggtacttactatgtaccatgctgagagagagagagagagagannnnnnnnnnnnnnnnnnnnagagagagagagagagagggagagagagggagagagagggagagagagggagagtgagtcagtcagtctgagagagagagagacctatatgtatatgaatgccagtagaggatggtgggtgtcttatactatcactctctgccccttttaccttgagacatggtctgtctttaaatctgaagctaagctggtggccataagcttcagagattctcccctatagcattagtgttataggcacatgctcccatatctaattctcttccccacacaaccttagtggttgagatttgaacttgggtccttatgcttgttcaggaagtactcttaacccactaagccatcttaccagtccccttatttgcttttgggagtacccttatcaattctaggttgtgagattctgatccaacatttctatgagacactctattgtctgtatttaatcttaccaataaatgaatgctttttctgtgcttccctgttgagatgatgtacaatttattatttgttaacgtggcaaatcatactgactggcaatttcttaaaagtacaccaaactattatttattgacctccctcaatttaggggttacagtcattacaagtggagctagaaccatggccttggcgttgggatttttttgattgaaagagttctatccttttctcattcactctagtcccttgatttcaactcatgaaatgtatatgtaagagagggtcagagtgctgaaggttctgcagaattacctgggagccctgttgtgatccttagtagaaatctgccccaaatgccaggcttacccccaggtctctgtctgctgctggaatcccttactatttggctaacttaccagtacctttacaaatacttttgatgtctgtctagcttctgattgttctctgtgataagtcacctttaccctgttcttgtggggttttgttttgttttaagtttattcaccaatttgtggtatttttgtcaagaccagaaatcctgtctgcacttactaaaggagttggtagcctgtgagacagttcctgggagtcaaagtaagtctgacctaattgttattgactgtcagaatggttggcctgtgagtcacatgaacaattacttggatggatatttggaagatattttaatttatgtatatatttgtgctatgtgtgggtatgggcacatgagtacaggtgcccatggataccagaagaaggcattgggtcctttggaactgttactacaggcagttgtgagccatttgatgtgctgggaactgaaagccggtcttctgcaaaaaacattacaaagtttgagccatctttccagtcctgtgactgggtatttttgggttttagcagcaagtatatctgagtataggtacttactttgaagcatatctgatagtacacaggtggcctcacccttggggacacttggactaatacatctgattgtgctctttaggatctttaggacgtcttgatattttgaggaccagctttgtcaggtgttcttggttgagtagagacttggagcttgaattcatttgaagccatttttcttttcttgtgatcagtttccttatatataattgcttgatttgtccacccatgaacccacctattccccaacctgtcaattttgcttttgaaagttactgtcccagcatcatgggtacaaaggtcacccctgtcccccaacacacacacacacacacacacacacacacacacacacacacacacaatagaagctctgtctccatagacaggtagaaaaaaatgagtagagtaactttgggttgactagatagctgttccagataatgcctctttgctagaggtagagaatgcggctcggctgatatcagacagcatggtgctgagctagtctctggtcacattcagctttcccttttaatttgtgttgttataaatggattttcctgcaaatgaatctatgaaaagaaatcttaatttcctcccaaactttttttcattgattttatttttttaacatataagaaataaatgtaataaaccaaatacatggacaaaaatacaagaatcatatgatcatctcaatggaagaaaaaaaaagaaaaagtctttgataagattcaacatgcattcttaataaaagccctagaacaagtaagactgtaggaaacatattccaacataataaaggttatgtatgacagactcatgatcaatatcatcctaagtgaataagactattaataagcctcattaaaatcaggaatgggagaggactgcccactatctctactgctcatccataatgtgattgaagcattagctagaacagtaagacaagagaagggataaaattgagaaaatattaagtcaaattattttcagttgaagattgtactatactatacccaatgttcccaaaatttgactagaaaaattgtagaaattatcaataatttcagcaaagtgttatgatacataattcacttacaaaatttaccagtcttaatacatatgagtaacaaatggacccttccccatacccccccactccccccccaccgagaactaaacctctacaaaagagattgggatcattcttggttgtgtttcttttcctttgtgagagagaaaggccttgggatttgtctgccctctgttcttttgaagagctgcttgctctgttctactctctgaaaatctgctctccactcttaacaagcagctggaactcagtggagtgcctcagcaggaactacaaagcaatggctgtggctgtgcaaaacagatgctgtttgcattaaaagacaaacataatatttgcattaatacaacattatttgcatagactggtttatccttacccaagagctggttacttttaactaagcaatcttttgctgattatttttcacagagttgcttttgcataagtgtggctgatttcaaagaagggttcttggacatgcaaatgtgttgtccatgatgtgtgtagagaatagcccatgcccagcagtgatcttcatcacttaggcttttgcttgcttttgttctcaggcatggctaatgagcattgccttcttcagagaagcactaaactgcagagctttgcggtcccttgcctactccccatggaaagcagcaaccttggtgggcagttggtgtttctgccttctgttttcaaggacagctacacttcatgtgatttattcaagaataaagaaattggcaccaaggaaaattgatgggctcttagaagtaaaacacagcctgcttcagccttaaaaatgcactggttcgggttttctagtatcagagtagaaagggaaattttgtactcggggatttgtatttatataagaagctaacaaggtgtttcaaacagtgattttttaaaacatgcgcgtgcgcgcgcgcacacacacacacacacacacacacacacacacacacaaccctacactacactacaccacaccacacacaagggaaacaagtcttcagaaatatacttgtggtaaaagtggtcttggtgattgtgtgaactttatgttatttcctgcacagctgtgtttactacatgttcactagtgttttatcttagcattgatcattgcactccaccatggagatggcttcttcattgtgaaataatcctttagttgttattctgacccatagtttctgaatgttaaacatttttagttttaattattttattcatataaattttctgactgtgtgtatacatgtgtgctccatgtgcctgctcctttggaggccagaagatggcatcagataccctgaaactgtaggtacaggttgttttgagccaccatatgaaggctaggaactgaacctgcgtcctctgcaatagcaacaagtgttcctaagttctgagccatctctcaagccccagtaaacattttttgttagtctgaaagtgtcttccacctctctctctccctctctctctctctctctctctctctctttctctctctctcccccccctctctcatattaaagtttagctaggtacaaaaatggagttagctacacccttcagcagcagttttatcttttactctttcccctctactgctattagaaagtagttttctgcccagctatcctctcctcctaactccaaagattccttttatatcttgtcttcagagagaggaaggattacatccttgatcttaaccaaaagaccaagcatcaacccgtgttttctttcttcatgggtacgtgtcttactgtctcagtgctgtataaatatctttctatgttgatatttagatattttactgaaaagtgtctacatgcacatttgttcttgtttatactacttaggacttcagaactctagtaatgtttctgaattctagagtattgtcattattaagttttgcattgtgtgtttctttcgggttttggttcagtagttcacactaggtctgtactggctattcttgctcatttgctcattgctcattactttctcttgtttgtttttatgctacattccagtggtctaggtctgtagtcttattcttattttttttctctctatatctaatctagcaattctagaaaactgcattcattcgtcttaaaaatttgcattaaaaactgctttacaggagcaccttttttctaagtttctttttttcattgtagttattattctttacctcttattattagatttgtatactttattttacatgaatattttgtctgcacgtatgtgtgtataccatgcgcatgtatggtatccatagagatcagaaaagggcatgagattgcctgggactggagtacagatggttgtgtatcaacataggtgccagaaactgaactgagaccgatctgagagcaaaaagtgttaattgctgagcaatctcattagcccctttaacgtttattattaagtatataagcatatttttcttttattgaaaatagatcaatttctcacataatacatcctgattatggttttcccttctatgccttccagttcctcactacatccctcctattcagatccactcctttctatatctcattttaaaagaacagattagtaaggaataataataaaagattaaaaatataacaaaatatataagtaaaatataataagataaaacaaaaactatcacatcaagttggatgagacaaatctacagaaggaaaagagcccaagagaagacacaagattcagagacccactcttttgcactcagaaatcccataaaaacactaaattggaatacataatatacacatacagtggacctggtgcaggccctgtgaatgttgcttcagtctctgtgaatttatgtgacaattgatcatgttgatttagagcaccctttgaagttgcttggtcaccaaacagtgttggatataggttccatctcgtagcatgggcattgagtcaaattgtctattggatgtttactcccacaaattgtatgccaccattgccctagtatatcgtgcaattaggacaccattgataaatacaattttaagagaagtgtaaaccttaacatggcagcatccaggcagatatgatgcaggaggagctgagagttctacgtcttcatctgaaggccactaggagaagactggctcccatgtggttaggaggagggtctcaaagtccacccccacactgacacacttcctccaccaaggcaacacctcctcatagtgcttctctctgggtgtattcaaaccaccacacttttaaatataattatgttttgaaaactttttaaaagatgtaatcatatcaatgtgctctgcacttaaacaaaaattaaggaaagctttgtaacatttaaaaagttgactatatattagaacccaagaaaaacctcttctttctactctgcatcagcagctcctcccccatcaggaaggttctgcagagatacctgaggtctagagagcctgtcaatgctgaggaccaggcacttgctctgaagtcagcccagacctgttggctacccaaattgataagatccatatgaaacctgagcttcccagtagggtccaaacaaacctggggcaaaagtcctgttgccaggacctccatttgaacatgtctcctagaataatttgctagattggatttccagtccttaatatggctcttcatcccagcatctgctgtagtataaagatagtcctagccttctagaagtcatctttcctgtcacatcacacaaggtgggcagaccctgctggcttccaggaagaactccttgctagtagcttcctcatggaaaggagagctgagcttattatagtttatacagtaatcctagatagatggcctgtaatggagcaatactatggatcagcatgcccgattactgtaccaaagtgagatgttgagtcttagccagtgatggcccccaagcgcaaagcagtagatataaggacatggtgactgcagtcccctgagccaacagtgggaaggcagtgcccttggactggctggaatctcaagtcacatttacacagtctgcctttcattgttgctacctctgttttcagcagggtggcctgagatcttgggtagcatcctcttatggagccctgagtgctggggacagaatgattccacttggatggtttctccaaggcccctgtccttgagggcaggttctgctttggtctgctcctgatcatgatggtcagaactgtgaaatttaaacaggcatttcctttagttaggggatacatctgacacctcatgggagcagagaacagctgttttttcctcttcttctatagcctgacttgctgacagccattatggagacagtggtcccaaaggtaatgcaggtcaaggtctcaccttccatataagagtaacacaccgagagagtagcactgtattcttggtcataagagtgcgagaacacaggctacagtgaggcaaaagggagaaaaccaaaataacgcaaccagctctattgtagatttactggacattcattcctgtacaacctgggtaggatatgtagcatctagattgtagtataacactgtctgtttctttgtaactcaggtttgaaaacaacaacaacaataataaagaacactatttcataaggctagaacttagcccagtgtggggaggtatttgcacctgtttagggcagttggaacttttgctgttgaaggatgtgggcaagaggacctggaactgacccatggtctgcagagcaaatgaaaccaaagcacactgtggactcttagggattgtgagatttgaacccttaaacaaatcctaagcactgtggttttcttcagagtgctgaatgggtttccaagtcagcagaattttctcttggacttgccatcaccagacctctgcctccacacctctggaagtgtatgacctggccaagctgcatacaggctggtagtcctaatagttctaatagatagtcctaatagactgcctttcaacgtaggccccagagagtacccttctagcttcttgatgactgcgggtgtcaacccttgggctctgtaagagctccccaacctctttcccatgcccactttactagttagtactgtggtcctagtttatttccttctcagcattggaaatgaacctttaagtcttcctgagccccatgatcctcatcatggctctgggacccacagccatgctcctgtcccactgtgctcttccagacatacagtgctgcctgtgctccatcctcagcctgtgcttccctgctcctgtagagctctttctttctacacacccaaagtgtgctttacacagccctttcttcatgtccttaagatacctgctcagaggccatcaccattgtctctcataccacacagtccatttactagaccttttggctgttgggagtttggggtgccaggactcggtattggccagaatgtatccttcagaccctccagctgctcagcaactagccaggaggacacactgtcagtgcgtttctggcagagtgatgccatgcaccctgtgctcagtgccctgtgtgcagatcagtaagctaaatgctgcatgggaagttggtttactacctggtcagcaccaacttgggacaaggacagtaactgtcctttcccttcctcttcccaccctgaggactaagctcaggtgaaggaagcacttagacaatacctaactggtcaaacaggagcctgacttgtgagactcctaatttaggacgtaggctcagtgctaggaagattctctaacaccagtctagaaaaagaaaatgtctttttcatgaattaaagcaaatattaattctacaaaattccagaagagaaagtctttgagcccacactgcccttgtggtggaggggagagtgatcttggagcctatactggtcagtccaccccttcggcacttggctgccatgccctctatgctatcctcgctcctggcatccaaggcaccaggcttctcaaacacgtatcatcaagacaccaagagcaccacagggcaggcagagtcacagagagggtggctaacaggctcagcactgtttagccacagggtgagccgacgctgactctgatggctgcttagggcttattgttgtggattagtgactcattcctttgagctgattgttaacgtctacctgttccccagcttcctgtcacttaaccacagacacctttagctgatttgtgatgttcaacagtgtggacagtgtttggaggcaggctcatccataaagtaggtttggttgctgactcacccttttcagggagtcggatgctttggcatttgtggggtggagcaccttagggaggagctagcctagactctgactgaactcagatcatggtcttccctacaatataagtcaacctaactccccatatcagccagtcttgatcagatcaacagacaagggagtccagctggaaggtggttctgcaggactgatgtagctgggcaggtctgaccccaaacctcataggccacaaggccccaggttatggcctttcccttctcctcaagtcctctgtgagttggctaccacaacttctgcttctacagatagacagctgatgtctggagtaggtaaggttagttcattcccagtgggcatcagagctggggctgcatctttgcttgagataattgtccctgtaccatgtcctttgcctgactgaaggtgcctatattgagagctgctgcttgtagttcaagagcctgtgggtactgctgcactaccctttgtagtcgtcatccattacttgttacatgggctctgggggaacatgcatatcttatttccaaggttattttctcctcctctactttgagtaaaactgtcctgaaacaatgcacccagttactccccatcccccagggatgaagatgttctggagcagagagatgagtgctgtttgcagacctgtctaggtcatcatcctatctgtgtgcccatttataaatgtctgatggatcatgttgttctctgaggcggacctgtccctgagagccaatgtatagcaccttccacaagacacctgcccctggtcaggagacactacaacgtggctaaggcgaccatccagacaaagatgtttcttctgtgtattcctttgcatccttgctgtcacacacctgctggctcactcagtgcttgttgagcctctgacacacccagctatgtgtactgtgccaggaccccctatggctaagctaggcctgctcttcccttggacagtgcctgcctgtgggtgtgctgtcttccacacatgttcctctgtgaacatgctgtgtgtttcttgtttctagagcttcttggctatgtgcatactgccactttctacatttatatcttcctagggaagatgttctagtggtagacagtttggggttctttgtggctcaggcctgacccttccctttgtttaggcctctgtgtgatgtctgagtgtttgggcagagaccgtgtttttgtgctttgccctagttgatctgactgaccatgttctaaagagagcatggtcctagacagtgagccttcctggtgatttgacaaaagccaaatgtgctacctgtgctaagacagaactttgaagagccatgaatatctgtgttaagggccagtctgcctgctaccacttcatatcagccagtcttagctcagcagaggaggaagtccagcgggagggcagttctgtgagaatgatggaggcaggcaccacattttcacatcctggaagttcagcacctgcttataggttgacatgagccaggagtgtacactcattggtcagcaaggagttggtgacacaccaaagaacatgggaacatttgagacaagacaaggtagtcagattgtattggttcaaagaagggaggacctatctttattcttggctactcaaggaaaaaatgcaaacacatgtaaaaggaacgggagattcatacagtagcccctgcttccctgtccttaaggccccggaattctccgccatgtcatcttcttacacctgtcttacttctgtctagagtatttcaggcaaatcccagagtgccatcacacttccatgtgcatgtaaccgttttagagccttccatgtgaaagcaatccagacccataggtactgtccttcagatactgaaggtcgatggtccactggggctgtgcagcctgagcctccttcagtgtcgagtgagactgaaccccaccccctctcagctccaagatcacagtagctaagcataagttaactacagctgccacagtagttaaggtgagaggtgcccatagaccaggactgtctgtccttgagctgaatttccagcagacgaaatccattgtcactggtgttccatgtaatagctgttttaaaaacaaacaaaaagccctccttagtcactttttcaaagcaggatcaaaaaaattatccctgactggttttccaccctcccctcccatcccttcttttcctaccatggtttggagctagttgtgattcttaggggaaaatcagcaggaacacctcataggttatccttgacattttaaatgtctgcctgattaccccaaaggaaaaatagcgcttagagaaagagagtctttcttccattttcattttctctaataaatacacataaactatgttgggcatgcctgaggaattcacgacacttactcattaaagtttaattcctattaatgggcagatgcaagctttattatagaactttggtatttctcaataacctgtgtggcaagaaaaagcagaacttaatggattggggcactcaaggctattagtgaaattcacacagggaggagctggctttattgaaagctgagcctagtgttagctgggcgtgcagtactgccttgcctggaaggggctgtggagtaaagggatgtgggggctgggagcactcagcctcagcgtaggagagtagtagggtgtaggtctgtgtgtgggttggggacgggggcaggggtgggaaatcggatagctgatcgtttctatctctgagccattcatggcacatttgtataagttagctgaatggcataattggtgccaggaggatccaaccaatggtcacatgggtcagggccaagggacaatggccttatgatggaccaaagggatgatatgctggccactgcacccaaacaaatccagtaaagccacattaaatacacacaaggagtagagttgcccgtgactgtacaccgagctgctgggtgatgaggcagtgagcagtggcaaggcctcaagccacaggctgcagttcttgtgggcagtctcctaggagaaggggtgtgctttccctgctattcagtcacacagccattcatgttccttctctattcaatacaacaaagcagttttcatgattgttatttttttttgtcctaggctgtaagagctaacctaagtttttccaaatttaatttctttttattacattttaaaatatttactgtgtgtgtgtgccacatttgtgcatgtcagaggacacttgtggggctccttccaccatgtgggtcccacagattgaactcagattgtcaggtttagaggcaggtgtctttacctactgaaccatcatgctggtcctagcctgttttgtttttttttttttttttttaaaggttttcatcacccagtttaaaaagacacacatacaacacatatatccttaactcaggaatccctcaccctctcatcaagtcaagagtttagttcaataccagcagttctgtatcccaggtgtgttgcagtttctctcagaaccacgtggttccagatgtaaagtggcattgggtgcctcctgctgtcccttgtgcagtaagccgggctgtgtctgggtagcagtgttctttcagaccttttacaaagatccgagtggcaggaacagataacaggagcaaagatagatctgagaggagtgggatcatttcctgtgtgtgtagcaagagctgagctctctagagactggggcagggaggagagcaaggaagacagagaatgccttcacccagatctctgagggggtctgtagttaccctgcgttagagatgagacatagagctcctggagcccaagattgtatacacatggcagagcccagcctggacccatatatgtgggtacctttccaggtccttcatcactatctgagcccctgaagccatgtaggcaacatcagatctggccctgcacttgtacctgtgtgcctgacttcttaggcccagtacctgccaccctctgcccatgaggtgctccttgtcagctcacatcatctgagatgcaggcaggggagaaaagtgcatgtaactttttgtgtctgacctatagtagtgacatttagggaatcaaagacatattgtaacaacagtaaaatgtacctcagtcacacgggtggtcagcactcacacaggaagttggcactttatgtctattagcttgattttctgttgttgtaacagaatactccaaacctggctaatttatatagaaggcaatgggaaagctcagaaacaagttgctggcatctggccattctctggtaaaggtacgttgctccatgtaacatggtggacattagctgtgtaagcatgacaggagagctgtctttatggcaaccatgcgtgctctgtgtgagaaagaagcctgttttcctagagcagtgccttctaccacatagcacagttgctttggaagtcaggtttcaacttatattttgagtagacataccatgtttgtgctatagaactgcccttgatatgaggtgataggaatagccagtagttcattgtctaggtcttactcactgtcttcctcttaagtctgctcatgagaatgagggcagggcatgacctgacaggtcctgacagggccatcggaaccaaggaaagcctgtgaagaaccttaagagatacaatctgtgtttcatgagcaactgcccacacaaactgtcttaaagtaggtgcaaaaaggaggggggacagtttacagagaatctggccacaaagattgtttttaaaatgttcagtggccaggaagactggatatcatgaagactgtgattatcatggctaccccctacctataaggttccatgttagccatatattttaaaacatctccagtagaaaaggaatacaccattcattattataaccatcccagctttccccagttcagtcctctaccaagtactttaatgtattaattttctctctttcttttagagccagtgggcagaagtgtgactctaagcctgagaagagtctccaagttttgactccagagtagaaagggtttcagatctcactaactacttactgtctctagcctttggctgtttttctctttctcaaaacttgtccaacttgaccaggtctttttcctgagggaaacaatattggctgctgttgagaaaaagaatttcaccaaagttgaggtgaaaggacgagtttctctgcctcttgattgatacagaaaagttaaatacattgagcaaccatacctaattagagatctgtcttggcacaccagaaacaccaggcagcttccttactagcatggtaaaagctaccagtcagaaacctacaataggtgctgtgcttcttgccaaaacagcattgccggggagactagagacaggcaggagtttttgattactatccttttgctgatagccccagcctagtactgtaagagaaagcagcacatggctggggaagggagtgccggctgcactgtcacttcctgtgtgcagagctggagaggaaatggataggtaagtagaagggggaagagtagtgagagccaaggatgccccattgccggtgtgcatcaactaactaaagtggacatttacagtacttaaacaacgtgaatatttttatgttttaatattttaaatgttgtaatgaaaatatcaggtatctatgaagaagaccaagtagctcaagagttttgacactgcatactttaaagcatctctaggagacttaacagcatcacagatgcagctgggctctttgtgtgtgttgtggggtgaaggggcttggggtgttcagatacagattcctcttaagcagtaggatgcctttgttcttcttcattcaaatccagtataggctagagactgactgggagtctggtcactggaaagtctgagattcaagggttggggttcccagccctattcactgagtgtaaagaaagaggcaggagggctagaaattggctcataaaatctctttactagtgatgttgaacttgttgccaggaagaggatgatcactgttccagcctcatttctgttgccatgataaactggactaagagcaagtctggggagaaaggatttctttggcttctacttctatcactgaagagaagtcacagctaatcacaacacattcccagtccagatcagagagaaatgaatgcatctgtgcttgcagctagctagcttcacttttaaacagttagggcccagccatgaatccagatgccaacatttacagtgggtcttcctccatcaattgactgtcaaaacagtcccccatggacattcccacaggccaaccagatctagataattcttcattaagactctctatccatgtgattttaggttgtcaagatgacagttaagactaatctcacagccggacgtggtggtgcacacctttaatctcagcactcgagaggcagaggcaggcggatttctgagttcgaggccagcctggtctacaaagtgagttccaggacagccagggctacacagagaaaccctgtctcaaaaaaccaaaaccaaaacaaacaaacaaacagactaatctcacagtcagcccaactctatagggctaggatgtctttgggcattgtgcatctcttcatataggtgttaattttcatccttaattaaaaaaacaaaacaaaacaaaaaacccaacttgagtgcaaaaacacttggcccctcatccacgaggtcatgttttaagatgctcagtgaaagccgaaaccacagtgggtgcttactcctctgtgtgctgttttccctacgcacgtgtatcagtaataaagttgaattgacaaatcaggtatatcaagagaataacagctaataattagagcaaacacaacaaagtgctcgtgtaaattctgtgtgtgatctttcaaaactctgtcctgtgtaccacttactctcttgggatgatagtgagatggaccgagaggccttttcagcttctccttggtgtgccagaattgctacatgactgtcttgtgctttgtggccggctgctattaagtaaaacaagagttgcttggatgtaagcttggcagtaccatggcacttggtctggtaatagaaacagctgctgagtaatgagtaggtggcatatccccaaagtggatctgctgaacaaagtttggctcgcagactgggcaggagaactcaagtttgcatttggtattcagaatgtgatttaagatgtaagggtttgttgtttttgttgctgttgtattcagaatgacatgtaacttaagatgtaagggattgttgtttgttttttagaacaagctttttaataatttaggcctgaagttcccccattctctacagtagtatcaatgtgaacaatgtggcagatagtgttagagccaaatcagaggacatcacgtagctggtggaagaggtagtgttctaggaaaggctggaccatgtcgggcttaagttatgacttatatgtagaatacatgttatctcattgtattgttatttgagctgagacagcaaatttgtatgcttggtgagtacatcctgaacgctaaatggcatacaccagtcctgcatatgggccaaaacttggtcatatgacatgatgaagatatagactgtgtctctagcttgcactgttcatcagccacttggaaatgtggtaagtctctttcaggagtgcagtaggcactattgtgtgtcattcagagtcagagtcagagtcattgggtccttagagctcagggcagataccaaccaattcaagcccttacttcagaaatagtctccatgagtgctctgaactggtcagctaatagacctgggcttttcccagacggaaaagaggagactggtgacatagaggagactggtagaggccttctgttgatgcactgggggcaagaacaggaagagccctcagagcaaggcaggctgtaactttctatgtgtgtgtacgtgcatgcatgagtatgtatgtacacacacacacacacacacacacacacacacacacacgcctaccctttggagcgttttactgctttctacgatgaatacttatttctttccaggaagaaaaggcttaggaagtgctttctgccccttgagatttctcttttgagtagacataaagttcgaggacactattgttggttttacaacctgtggtcgggtgggtgtctcaggtggcagtgctcctgagaaggccttcagtctctaagtggcagggtgattatttgtgactataaggtttggcagtgacctctctgtcttccttctgaagcaacaatactccagatagttcagtgtgcttcttctgaccattatgaaagttaagggagctagaactaggatgaaggctgttactggagggaagggagctgtctgacatccttgtttggttctggacaagactgagaagcagtccccctctttctcctgtgtgattcagagagctgtctgcatgttgctgtttctctcctttggaagggtatgtttggggattcctggcttgaggcttttgtcttcagagttgaaattcctcacagagattgactccaaattggccactgtgtggcctggcctgatctgttacctccttgtgttctgctttgaaattctgaccatgggagctccatgccctccctgtgaagttactgtgcatgagtgcatgggtgctactgatgcaggtctgcagtggaatgcatgtcactgcagaacgtttaaccttttacatggtgcttttaaaggaaaggtctgcttctgggaggttttgtgggtcttctttccttcatgtttggcaaacacagaggtaccaggaagtctttttatccatccagtgccaagtgttggtggttggtgggttctagtctcattcttgtctaagtcagaacagccgattgtttcctgaatatgatctaaaagtgactttcaaagaaatgattatgtaatcagtaagtccactggtgctggcaaggcattccccagggctgcttggagtacaccagcaccttctgactgccaggcacagctgctttgtttgtgtcaaagtccagacccttcattgttatcttggaagaggggaacttttgattttaatgctcgtggtctctgcagtaaagcccacttctgataagctcagtgtggaccaagtgtgagtgtgagccatgctagctccaccagatgccttcaggcaggaatcccagttcaccatatcttaactgggggctgttttgattactctacaaagagcttttcatcttttctggcaagtaaaaacaatctgtgctggaattgaaactgtcctctaaaaggaggggaccattgcctgcagaaaacttactggtcaattcaccatttctgaagtcagtgtctcctctgtttctcagatggactttctggccgagaccagcctgtggagctgctgaatcctgcccgtgtgaaccacatgcccagcacgggtaagtgaatatacttgtgctgagaagtccttctttattggggaagaatgacaggaggtgcaggtcactttacaagtcagtgtgacaagagccgaatggcatttcaggtgtctttggtgcctgggctccacctctcttttcgccactattggctttaccctaggacactgagcagaagtaggagcaggggactaaatatttcatgggcacgtccagcttaaagtctgactgttttgagaagttttaacttacactttccctcaagtatagtttgctgaagtcattttgtctaacgctgccatagtttgggcgtttggagatagtttcctagttcttgcccagtgtggaatgagataagagtttcttacatgccctgatggaccgtggaaaaaaaaggataaacaaacatagtttctaagaaaaccaaagaagtaggctttgtgttcatctttctgcaatgaacagcgcaccctgctctttgagagtctagtgtgaggatgggttgtggcttgcagtgctgtggcctggcctgacctgcctcccgtctgctgctgttgctgtatgagctcctttgctgagtacctgcgttttgttttcttgtttctcaggcacggatggtaatgctttcctgcagagttctcactgagctcaaatatgtgtcagctttttagtagttccatgataaatgtcatctcttaatgtcacactgactagctgaagatggcgtaggatgttgcaatgaatcgccagctcaagaaccactgtttgccgtgcctgtcacccttggtttccttctctgctccagcatggtctatcaataagggttaccacacctcctcgacccccgtaccatgctcccttaatttcctggcatgtttaacacatctttatagtattgaagggcagagtgtgtgtagcatggttttatgcctatgtagaagcctcacagaacaaataagattgagctaaaaaaaacttgaaaattgatgtgaaatatctttaatgttgcatttttatactatacaacagaaatgttttaagtgtcttcttgcggttattagttgtgctgtattcctgaccttacctattttctgacaagctgtgtgtctcatctgagcagacatcctttcacttgagtaggtaaagtgcccaggcagtccctctcattgccagtctcgtttcatttctagaccattccttgttttatgaactcatgaaagttctggtgatgacactcaagccttgctattttgtagcaagaattattagggctggaagctgccctgactgtttctttgccaccagctgctgctttggtggagtgctcaaattggagtttttcttgggagtgtaagacattctttgaaagaattccccaaaggcagccggcccagacctcccctgacccagttcagagtagtccttcctcctctgctctttgcttttgctgtctaccacctgggcagtctccaggggccctgtgcgttcaggtcccattcatttccctctttcattctgctttggtctcagtgtggacggaagcagaaaaggacctgtcctgagcccacccaggacaccatctcctgccctgttgcatcctggcttcttcctctggttggcctgctctttgcctctgggttcctccagcccagcccagaggctttgcaaaggtgtgactagtaggaactgtcacaaatgagcaagccactgatacaagaagatcaatgggcaggcaaggatgagggagtcgtgagaggttcttggtagatggaatcaacaggggcgaggatatcaggagtagccgagcagaaaggtctggggtgtgggttacccagtatggagtagattgcctggcagtatctctgatgcctgccagccctcaccacagccctgtcacctaacagagtaagcgactcgctgagacatgaggtgagtcggagctgctttccaagcgactggcctcttagttcactctattatgttgttgctgatgggactgacggaagagttactcttagggtcctttctggtcatgcagcagcctactgtccctgttttctgtccccttcctttctctggggacatggtgctgtcaggttttcttcccaggcattgtctgtctgtctggactctgccttaactgatgacattcctattttatgcggtgagctcactgtctgtccattataggagacatggatacccaaaagctggctaggcccttcaaggtcttggccactgttagtagcttagactcccaatcttgttcaactcctgtaatccactctgagatggctgctgggaaccagcatcctggggcaaaaacatctcacaggtagcctgcagcctctactgagccttgcttctgctctgtgcttcttcctctgtaggaaggactctctggctttgccagtggcatgagtaagggtgccaggcgggcttcactctgagcagatgactattagcacttctgctttgtccccggtcctggtgcttccgtttttgtgcctcagagcactttgcagctgaacccacaccatgtttcccatggctacttctggcttttgtgccagtcagtatctgaagaaacacccatgttctatctaacttctcgtacacagtgtgcttgcccaacattgtgttggtttattttgcttgtgtgggtcttgtgtctctttagacaatccacctaccactctgtgttcactgtcatcacttactagaaatgctgctagctttgagtgcaccctcctggcggtctgagcttccgtctcccacccccaccctaagccctgccctttctgctctgtccacttgtttcccgtgggctcctttactaccccagtgtccagggagggagaacgcagccttcccttttgggtggatatggggttgctgactttctaaggtggtccactccttcagttctgtgctgctcttgcagaccagaaatgctccttgtccaccacaggatgtcgcatgaggcagggaaaggtatgtggctcttgggtttagagctgaacaaacactcagggtggctatccaaagcaaacagttctcgctgtgtgtattgtgcacccaagtggtcccagttccttggatcccagtgttctgagactgcatgcatgtgatggttctatggagtactgatttgggtagatactcatgtgtgtgctacatgtgtgagtgtggagatgaaaggccatcctgttgtgttctcttgcacccacccacttcctgatacagaacctagaggtctgggattaaactagctaggctggtaagcccattgtccccttctctccctcacaacagaatcacatgtactcaccgccatgaccagttttttttacatggtttatggagatgaatctcaggtcctaaaacctgcactgtaaacattttacaaactactaggctgttcataacatctgtgagctctccctgccccctccatttcttaattttaaaaagaatttttttatgtgtagtggcctcaggaataacctccagggttgtgtcatacagtggatggagaactaggctgcattttccatggatatttgagagttccaggcagctagggcaggaaggaagggtttgttcaattgtcatttatgacaggactagtgtgcaaacacagtttcatacactgtgacatcatttgtggtcaaagcactttcagtctgtgcttatcaatttgtattgtaggttttagttttgtatttcaggtgagtcagccaggatatgcaagaggattctgtcagtcttggccaccttagttagactggatgggtgttcagtagctctatgttagccttgtgtaatctttcctactcccaacacttggttaactttaaggaagaattactttggggctgtaccctgtacacctggttggacacaactcaggtcctggtgttcctaagtgactcccatgctgccatgtgaaaccagaaccccagcacatagatcatagataggcctcatgacaaggggctgagtggccagaacagagagcagaagcaggcggccctgtcaggttggtaaagaacgtgaggtatactagctccatctcacaaagggagctgtcttaactccctttctctagcatccctagccacacccctccctctgtgtttcctgctgggctgtgtctattgactgagaggagagctaatgggggcactaggtcagtctggccctggcatctccactttgccttcaaagagcccgttcctttcctatagattccttgctctgtgctgtgtgcattctctcatccctgggctacctcccctgtattgatttggatgttcttattctcttgggttgatcattctgctcatttattttcatcttttctgtttggatagaagagttttaggtcatacccctctgggtagggatgagatggcttttgataatttttatgacttgtaatatttaatttataaaacattaataccaacattttgtaaacatgtttcacaagggagttattttgatgtcgtttatagttctttaaaaaaatgatacttagatgtttttaaaatctgaaagtatgagtttttcagtaaacctttgttaagatacacagctagaagttactgagcccttggatttttagagacagcttgtttcatggtctgctttttgatacttgagtatgttacttgtgtagaatggaagaaaaggtcagaggttttaagtaccatggggagtaagaggacggtggggaacgcgagccctaggtttcgtccagaaaggctccagctcattcttcacttactccttgctgtaggcaggagttactgcatccaggctctgtccttagcttttgggatatgtgcatgtgtgatttaaacagagatccctgtttctgtggtgctaggccgtgactagagaaacagtcaaggcagagagcagtcaggggcaggagagagggcaggggcagggaaggtggttagagttttcttgagaaactgatgattccagcagcgttggatggtgtggaactggtttgggggagacagggaggtgctaggctttgacagataccctagtaccagcaggcagggaaggtggggcagaaaagatgctggccccgtgatggcacttatcaccagtcacttacctgtcctaggcagtcagcctttgtgtacaggagagagactcctggaagttctggttggtgctgtgaaggggaatggtagcccatctgggacaggggcattgggcatgaagacccaatagagaccagtgacaaactagataggatagtggcacagccgattggtacagtgggagtaaagaaaatcattgggactagaagtctggcagtcagtgctattctcgggtgattctacacttgtgagagacagcagagtggaagctggagtggcattagcatgaagcacttggatggtggagtcatgttaatcaactatgttgggtaatgtggatgggacctgccttgtggggttgtggattcagaaggcacagaggtgaaccttggatgcaaatatggtttcattcaaggtcaccaaaaagcctttgttcccagtgcagtctgtggaagctgtctacaagaagtagcagaacattctgttaccggttctccatgggctgtgccatgggcctgggctgaagccaaagagactgagtgtccacatatgaggcatcaggttccataggtttcaggaggacttgttcaaggctcagctctggcagctcagaataaatgatgacaactgttatcttgtgacaacaaccttgtctgttaagtgccttgtatgttctgctgtgtcagttgcaggaagtacctcaataggcacaggttagcaaatagactggcaggccaagtcacttccccaaggtcactcatttgtcaggtggctgactcacaagctcccaggagattcttctagatgccaccatctgaactaccaccacgcctgcccaacacacaccagatttccagttgccttttgcactgtttctatccccagggatccaggaagcccttgaaggatgctgcattcctctttggccatctgaagtcaggtgaggtcaaatgatttctagaaagcccaggctgtatgttcttgcttcctcgaggggaaggagctggaggagacccagaccccagcaatacagctttcaatttgctcttattccttccttccaccccatgcaataagcatctatttttaaatatttctgctgttcctgttgggtaatagtggttcctactgtggcccagctgtaggtgaaatgtataaccaagtgtttggaggttgctaagaaggaaattccgaaattctgtgttcttatgtaatattgaccttatgtaactggaatggcaaaaacagtgcagatttggtacccttcccagaccattggggctatttttaattttccaataatacctttttatccattgagtctagggtaatcagactgctttctaagttagtttgagatatatgttgttgtaagcaggtccagtggtgttgcaggtaagacgtttccccagggccctcactagaccaactttaacacttactggcaaggactaagttggctgttaacaattctgaagacttttccacctgtgagcatggctgtggccattgggtgagtcagtagtcaataatacaatgctggtttggatgtttctgtataattgttcactcttagaatgtctcccagtaacaccttgtttataatgtcatcacagcaaagtctcccgtgcgtgattctgcctcctcatttctggaggttctgcttctttggtagtgacactcacgcatgaaagtctggggcagtttactgtgttttggtggtaagtcctggtgatacatagtttccagaaagtgtttgtatgcttctccagtgctatcacccactgcaccaggctttatcttcagttcttgctcatatgtgcttgcaagtcttctacttttataagatagttttcttcttgggggatgctgaacgaattaggaacattaaaagagttttctaaggaactttcaggatagttctgaaataggcatcaggggaagtctaaccctgacttcaatgtttagtagatcagcccagatggctagtcatcaccaggtggccccttgttgatacagccagcatagcgggctttttacatgcaaagcattgcctagcctgtgcaaggctctagtttccagacccactagttgctctcttccaaataaaatcacactgtcaggaatgcaagagaggtacagtgaggccatcaggtgtggtagccctcatgccctgggttggtgtgtcgctaggaacccctcaaacagctagctagagttgtgcatagcctctgaagacaagaactaagggatatccttgtcagtaaagtcttctgtgttgacagaaattcttggaaatgatttgtaaagacatttttgttccttagatgtctgcagcatcgtcaggactaaatttatgtttgttgtttggtaagcatcttgaaaaaaaaaaatgcacttatcaaaatgactctccagccctggcaactgtagccggcaagagaatactgacagatgtggaagtgaccgctcttctggttgaagggcttctgtgtcccgttgtccacatgcagggagatgaaattggagttggaagggggtacacagaatgatatgaccagacattccctggaagcttctggttagccaagggaaccccaaaacccctcccaccaacccctcccatgtgcttgccttctgtttctttgttctttttgtcccttgctttcatggaacaagcagatacctgtagttttgtttgtggagctatcgtaattcttggggcttccttaagaactttttctttgggatccctttgcgtcattccttttcttcctaatactgcctcaagaacttagtggtgtttcatgaacactcttagttttacccctccccccaggttctgttgttattgtttatcattattatttatttattcttattattactgttactattatatgtaaaagactggcaattattttctgtgttcaactttaaacaatttataagacttttgatgtattatacttactattttatagctgttgacatagattcagaatataagtgttgtgctttcttgttctggtggtcgcttctgtttgtctcattacttgtggttcttgtccagcatgtttaggctggtggggtgctctcggtaatgcatgtgtctgtgtgaggatttgctgttgtaatgacagaatatctaaggctggtgtcttagttagggctttattgctgtgaagacatcatgaccaaggcaacatgataaggacaacatttaattggggctggcttactggttcagaggtgcagtccattatcaacaaggcagcatctaggcaggcatggtgcaggaggagctgagagttcttcatctttatctgaaggctgctagcagaatactggcttcaaggcagctaggatgagggtcttaaagcccacacctactccaacaagccacacctactccaacagggccacaccttctaatagttctacttcttgggctgagcatgtacaaaccatcacagctgggtactttacaaaagagagaagtttactttagctttataggtcagaggctggaaagtccaagagcatggtgttagcctctggctggggttctttcgcttcatccataggaacacacaaggaaagcagtatggagaggtacagcaccttctttcaagttggttagtccaacctcacgagaggggctccaagggctcggagggcctatgcaaagctgagctgctccttgacctccaacacaacacacacacacacacacacacacacacacacacacacacacacgaaactaataccaacatgaaactaataccaacatgagtttggagaggacaaatcaagctgtgtctatgtttggaagttttctggcttctccttgaaattcatttttgtcagtgcttcatggaggcttggggaaggcatgaataatctggcatagaactggaagcatgtgaccactgtagtaactctgctgttgaatccaaggcactagtcctttgtgtacctgcttatctcaagtcaagggcaagttctcatctgtcaatgctgtttctgtctatgcattcattctctcttgccctctgtatcctctggtgtctcctctaagctcatgcatttgcatctgctacatctctgcaaagctagcacataacatttatgggtgggtgtggcttgttgttatacacctagaggtaagtattctggacttggttggacaccagccttctacccctttcttctgttctctcctctgtttctctgccaacattatatgcctggcttctgagaatccacagagtgacgtagatcctttagccacatcttcagcctgtaagtacatagggttgctggaggaatagcaaatggtacacatggagacagtatttggactggagactagaagccccaaaggctccaggaaacacttttttcttagagctgcttctgttttcaaacttgagttttttttttcaaatgtgatcctgagaccactatcttaaacgctagcaagtggggcaaatcataatgaccagcgccctcacatggtagaaataatgggtggggccgtgtctctccaccaagagagaaccctttccactccttccctagactcagatccagttcaaagctctagcatctgttgtgccaggcctcagtgccctgattcatgtcatcaccagtgctgcaccaagcctggaagctcaagggacagaacagtactttccatttagaagaacaggaggaggccatgcagagctgagggtagctagtcatcctagcatccttgcagctagccctccggctggccatctgcttactagctttcagaatcctgtggctgcctttacaggatacattttcctattgtcctcagaatgaagtttagggacaggtaggattagtgccaccactgagtctttacccaaagcagttttttatgtgtggagagcaaaagccctcctctcctctccagaaggctaggagaacaaggctctttaaacttgttacctcagtttaagtcttgagttgctaggactcctagagtcttcttatagcttcaagggatgcctgttttcaatcagctgtaaccactcctttttaggaacaatggctggagatgcagattggagcctctgtggatcaaacagcccttacatgccccactggcctctagagcttgctctagagtctctgagaagtctgcatactgaagggccaggctgaggagggccagcattgcctatgcttattttaactttattgctcctcaagttttatagaaagtccctgaagggatctgaagatacagagtctggggatagtatcctaggactcacacttgtctaatggatctgtgtaagcagaggcagaagaatgaatccctgcctgggacgctttgttggtttgtttgtttgtttaatttaatgattatgatttaaaatttgtggttctggggagcaacctctgggctttgctgctgctgggagagcctgtagcactaaactacactgcagcctagtgctgagaattcaatcctgtgtttgcagtgttagctgctgagtaactaaagtctttgcttcagagaactcagcagattggagctggtgagggactccagctggcagttcagcacactgagaggtaagatagggacagaagggtatggcactccagtgcagatttgttggcatttctctttccttagtgctgtgcacaccatttctttgcttactaagcctggcaaggagactataggggagttgaattgcttggtgattttttactgtgaaagacagagttctgggtttattgataggtaattttgactgggatagagttctgtgtttaggatattagggaaaatatgcttattcatattttttggaagatttactcaaattaatctcaaataggttgatttaaaatgaaatgtgtgtgtgtgtgtgtgtgtgtgtgtgtgtataccaaaaattagtaaactacacatctaacacatgtggattttactgtaagcaggttatacaataaggctgtaaaagaatcaattgacataatccagagtaaaaaccaaatatgaatgtattttctgtgagaaagtgtgtttaaataaagctggaagatttcaagggatagtgctagatggcgttaacctacaggactgaccccactccttcccattccttaaagcagtcccccacccccactgtcactttggggaccaagctttcactatataaacccttgagccactgcctagccacagcatttggtcctagatcccaaactgagttctaaaggagagaacaactgctttccagaaggctctacatcccattacatagctcagtgcttctgcaacacttggggtcatcagaggtgtaggtgtaaaactggatgggcatggactgatgcacaaatctggaaccaccaaactactctgatggtggctaggccttttgctcctcctttcatttgaaggtcttccttctgatctcttggtcatactacctaacagaatttgcttctgtcctgagggcagttctttgctggttagtttattgtcaatttgatactgttgatttatttggactgagttgagaaaatgcctgtgaattggtctgtcgtgcattttcttaattagtagctagcacccagttcattgtgggtggtgccagccctgagcaggaggtggtcctgagttctataagaaagcaggctgagcaagccaaaaggagcaagacaataagcagcacccctccatagcctctacttcagtatctgccttaacttctggataatggactataagctgtatgatgaagaaataattttcttctttcctaagttgattttggtcatgatgttttatcacagctatagaaattctaactaaggtagctggcttggcgtgtgtcgggagccttctggggctggcctgctcatcaggtccagtatactggcttaacatttcatggtaaagagctcattctacattgtgagtgcattccagaaatatgaggatgttttcaataacattgtgtgaaagtctttagtttctttttcacttgagttttggtacatgcgggattcattgtggttggtagagtagagacagttgtgtccctagtcacagaaatgactgtctgtgctggtacctcagtaagtctgttgtctttctcacaggaacctccggtggaacctgtcagcttcctgggagtatgtctactgctttcctcagcccaaaatctctgcttgctagggctttatggaagatggttttttctagctttgtcttgtgctcatagttacagagtggcgacttcatttcagcgtgtcctcagtgtgaactgctgtttgttttagctctcgtgagtgagtccattatctctgtatagatgactggggaaagctgactaatgtcatttgagaattttgtggtggagaccatgatctttctgttgttttttcacagtgtctttgtctagttctgtaatggggttttctactcctgctagggtgaattagagctcacactttgtatttctttgaagaatgttgtttaaaatgaatgaccacttggttggtactttgccaggaagctcttggaaatgatttttgtggtgaggttttgaaatattgtttcagattatgatgatagtgtagaattaatttgaccagttttctgtcttaccaacttagaaagttatgtttttagaagtgtgtctatttgacataaactatgaagtatattgtttgaaatcactgtcacatctaaagtagctggctttttttttagtctataatatttttgtatgtatgtatgtttaatatatgtaaataaaaacatgcagtgcctgagatgaagcctgggccccagaatgtggcatgctcacacattaccacatgtctcttgtggttcggcttgtctcttaccttttaatttgtgacttttctttattttctgaatccttgctatctgaaatttgtctgcttctagtcatttcaaagaatccattgtttttgttttataacttgatctgtgagcatgcaatgagtgtctctctcttcattcatgcatttattttgttttgcatttgttctgatataaacataacttttattcttctgtaataactgtcatttcagaggctttcctaggcctagtcctgggagcgtctagcttctgtctagtcttagctaggcctagaatgcttcagcctctgagactcactgcttaataagcgcacccttgctttatagtccttgctttatagctctttgtgagctcctggtcagtgcagctgttctggctcagagctcctctccactcagactcaagctgcttctcttggtctttcctaaattgctctgcttagtctaatactaactttggcagtctgttctaatcttctggcttctcattctttagctcattccgtcttctgtgtctagcttgttctctctctgtagcccatctctgtacaattgtccctgtaaaactgcctcctctttctgcactgcccctcaagtagcttccctttcctctctcttctcgtgaaagttggcacagcctatcctgtcaaatctttctctgattcatcactttgtctgttactaaattagacatcaatttcaacatgtatgctttcttctacaaactaactgtaccttcattgtttgggatttaagggtgtattaaggtgtgtctgcattctagagggattaaaggtgtgagctaaggctaagccacacaacaactagaaacaggtttttccagtaaacaacagattctagaggttcacagtatgatcaaatatcctgcaacattccaaaattgtttaatttcttaatatagatctaacttaggcatctgtattcttactgtcagataaaaagttcctactttgctcagtgtcttccaagaatgaatttatttgtgtgtgtgtgtgtgtgtgtgtgtgtgtgtactcgcatgtgtatgcacctgtgtatatgagtgtgtatctatgtgtgtctgtgtctctgtttatttatgtgtgtgcatgtttgttcgcgtgtgtatctgtgtgcgcgtgtgtacatggggtgagatggaatgggacagatttttatcagaagctgcaggttacccagattctgtcagtgtaatgtgggttcccggagatgaactggctgcaatcagatagacctgggcattagcttggttcctgaccctgcctaccctgaaaactgctgcgctggctgagctatgagttctggatctccctggactgtgcatcttcctcagaattcttgatgccagttgtgtatagcaggacttttctgggtttggtgatcactagctatgatgagcaccttacttagacaccctgttttaacatttcccacttgtctgatagggtgcagttgcacactgactctatggaatcctatgtacatgaaacaagtcaatatatccagcagaccagcctacaggtagggcatggtatggaccaaggaaaggagttgcatgtgcagatttctgacttccagcttagagcagtgcctctcataggactggatacaattgcgtaccgtcctgtctagaagaaaaaacatggggttaatcagtgcctagaaacttatgttgcctcctccagaaccatgcatggaaaactcaactcagagaatacatatagcataggctgtgtatggcatgcatctctcctgcccagtgccaatcagacagctttcccatagatgcacccacaatacctttctttacagtttggttactgaagagtaaataccacagtgcatcttctgtttataccatcgctagcttctttctcaagcatgatttctatcctgatgaattgctagcaaagttcttgggcatttcctacgagcattgcagtgaggcagagaaaataaaactttcctgcctttgaggctcaggccatgcctctgtgttgtgcatgcattcttagatgcaaaacgttcttagatgtttgctctataacgtgcttttgacttttccactgtaagtccttcatacaattgcacctgcatgctcacgtgcacattaagtaattgtaatcacatttcagacatctttgggaagggatgttgcagataaatcagaattctgagtagagttagacaggctcttcagtacttgtgagtgatggtctgaataagtttggtgctctcaagtgacaaggcaagatggaggttgaaacacatgtgtgctatttcattccctttagaaatgtacaagaatgacagtaacacactatgccaaaagtccatcccataatagcactcatcccaatagttaaagtctgattgctaaacattgacctacatgagggtcaagacaattctaagagccaaaacaggtcagtatgtcccatcagaatagagctattctgaaacctttggatttcagaacttgggccagccccaagtctccctgtgactgaggacagggctatttaagtatctgtgagatctgtagctaagagagactcacgtcattaggatattgtaaaacacaccacccacactggaagactgatcattaattttaaaacttggcaaaaaaaaaaaaaaaaaaggcaagcacctgtcctccctttcttacaaagccctctagtcagagtaacaaggcagagagcttttacagaaaaacccagtgaacactcaaaaagaagcaactgtggaaccagaagggttgttgctactagcaacagccatggttagctgctaacacctacctgggatgcccccaccagcctcctagcttctcaggctcttgctggaaaatcatagccagatctgccaggccctaagaacatatcccagttggcagaaagccaactgtcatataataatatgttattatggcaaggagttcattgatccaggcaagcgtcatgagtagagctgcagggcaggtagccagtttctgtagctggcatgtgttcatgagaggagcaggggtggggtgggaagctccttcacatgtgctggcacattacagtgtctctgagagatacagtttgctggcagtgcctgcccttactgggtcctgattcaaacaatataaaatccatttttaagactaaaaagtggggtgactttctagtcacttaatagcgtggaattcttactaacttacttggatatgctgacagtatcttactgttctataagaatcttccagagacatttgtccggtatgtatggataaaatggtgtgaaggaagaggtatatataggtgtacactcaaaagaaccaggaccaggtgaagagtccattgcacagttctttctgttttatgtactttgaaaaaccagttattctgtgtacatgagcgtgcatgtgtgcatgagtgagtgcctctgtgtgtgtgtgtgtgtgtgtgtgtgtgtgtgcgcgcgcgcttgtgtgcttgtatgcatgtgtgctagcctatatgcctctgggtgcaagtcagtttactctttccaccaggagggctctggggctagaacttgggtctttacatctcctaagccatctcactggtcttgctttgtgtacttttgaaattgtccccaaacacgtaaaaatgaacatctagcaaagggtggtaagccagcaagagtgagaggggcatgcaggccacatcttggaaggtggaaagtgggtttggaaacctctgcttacctggcagacccaacaaagccagagccctctccagaacactgagtgactaggtgacaccacggagtgtcttcccctcaagaaaagaaatggaagcaagcagtctgctggtgtggaggcagaagaacccccccccccgcagtgctgcatgactgtctcccttctaaaggtgtccactaaaggtttgtttgctacagactgccaggtgcctccaaggctcagccttcattctgcagggctcaagtagctacagacctctctaagagagagaaggaggcctggaagcggaggccttaggcaccaagctggcaactccctaactgatgcctttagtgtgagattccattcagttctgttccacctgggacaggtagccccaggccaggctgggagcagggactgcaagaaaagaacactactcttgaaatatctgagctgctcctcagcccaaaggccagggatctggatagcataaacgtgcgggagctgttggtctttgaatgtgactctgtggcttatcaaaatagcaggagtaatgacaaacttcaaaaggtgagggtatacattttaggaaatctcagtgggtataagaaaaaagagaaagatagggaaatgggatagaaagctaaagcattatttcagaagaccattgtcatgcattcaaagttccagaagaaaaggcggtgtcgatttcttgatccagaatgaccctgaaatacctattaaggtgtcccttgtctggagtgcaggactaacactggggggccagtgaggtctatgcacaggctagggagcccacgtaggcagtctcagaacatcaggagaaaaggaagtcgtggtacagggtccagatctgatgacttcccattttcagtgacagacacagcaccaagaagatatggatcatgagtgccttctcatttctgactgacggtgtggctttcgatctgtgccaagggaggaggcctcatcacctgccacaggtgcaggtgtgccccttggacatcctttctaagtcagatcgggcctgggctcctgcagaatgagaggaaacctacaaaaagaagtataacaaaggtgatgggagaattctgtgggacttaggccaggagaagttagagatggcaaacccaggtaggaagttgcacaagagactgtgctgactggccatatagtagcaggtggacctttaagacaagcatttctatggctagctgcctactctcttgtcaacctgatagtgaacctgtgtagacatgttttgacccacatcacccctcctgcttcttaccctgctaccctggttgcctgaggatactgctttctcggaggctgctcagctgcaactgagtcctagagtggccgtggcacaggtagaagagcaataatactgagcagcttgctttctggattgtagaaagtctgtgctgggtagctcttgattcttggcattactcatatgcttgccccagataagcaatggttatttgtcctagaagtttggactccaaagacctctccaccttagcctgtcacctgctattgtacctcactcatgcccattgcatttattctgaccagtgagagaattcaccttctcgattgcccatgccacaaagaagcaagagaaagtcaggtccaggtccagatgtgtttcccctgggaaggtgtatggagtcccaggggctcagtgagagagaaagaatctgggactctgttaagtaccgatgttccttctggccttttacttgatgactatgcccttggttgtggataacatgctgttgcaagaatcaagttctgcatggccagtgccctcatcctccttcctcccactcttgctctccctacccccgtacaggcaaatgtcagtgagaggaagctatggttacatagttgaaatatctattatttttccctggagctgaatgagttattctttactgaggggaccctcaactctggcgtgtttcctgaacagtgctgctttcattctgtgtctgtgtgatggcatgaagtggtgtcagggaaagaagagtgacccacgtaatggaaatcaggatctgggagggagagttggaggcctttcctgtaggagggctttctcccagcagacccgtctttctcctctgagcactgaatgtgggctttgtgtcctcactgacgtcatcagcccaattgtattgataagcttttcaaagcacagcctatggaggagttttcagcccctccatagaatattcctgagcatacaggcattattgttctgacgctgtactctttaagaagagaggatttcgttttcttctcctggagccctaggtcaaaagcaccaacagcttctgttgggaacttgtggcatttccagtgatttcgatacagaaatagcacaagtcattcttgtcataactgccaatgccatgctctcatgagtgaatggggaccatggcctcaatctctgcagctggcacttgagcagggctacagccagactcctgatgatgactgtgggaatgagcaggccatgttctcaggagcccatgaccaagtctccttgactgtgtgggttccaggcctcattttgtgtctgccaaggtggccttacttgagaggaagcaacagcagtgacaaggtatggatgtgagtcacaggtaacagagggcctttggtcttctgctgtcttccaccttctgtagccaagagtggacttctgattggtacttcaggataaaggccgaggcaggctttctgtccttcccaacacttattgtggcaaggaagtgcttcttggagctcactggcaggcagactttattgagggaccagtgctgggacctagcactgccctctgctctcatgtagaacagttgagcccaggcccactgtggacttgaagaggggtctcagtgaactgtcacatgggtcttatttgctctgtggtgctcgtgctctgggagtgatgcctctcttcttcaatcctccagtgtaggtaccctctggagagctgtagtccacacagagcccagaacaaaccctgtccttggctgcttcttcagctgttgggctcctagaagttaggaagtggagactggaagcatgggcactgcctgagggaagagtgggcagcagtcttaggtgacactcactcacttttcagtccagctcacaagtttagggtaccttaaagtacccaaggttacagcttcttttaaagctttaaaaagaatgccttaggcatgaaaacattagtaaactgagcatacggaatgaagatgcagcagaactcaacacaggtaatagctctgcctccccctgtcatcagctttagtttgttaagataaagctctgttcagtgcatggcaagtaccttcagagtgcccccctgctgttctttatcaaagtgtgccccatcagtcacacatgttggctcttgttcagagaccccaatgacccttttactttccttggtaggggactggccagcttgacctggaggtcaggagctatagtgctggatttgcaatgggaagtctcagtgctgtacagttggcttctgactgaaaagagtttcagttgttacaacactcactttagtatcctttggaccaagcgtgattgtggttttcttgtaacaggctctaagaaacagggaagtgctactatggaaactgttccagctggctatatctctgccctataactgaggaggagcagctgagcagcttagtctttccaccgctggagctatactgccggatttgcaatgggaagtccatcccaccccccagctgccctctgtacatcctgccctgccagtccctaagcattcagtacccccagctgtgcctgtagaggccagaggaaggcatcggatttggatttcttgaagctagaagttattggcagttgtgagctgtttaccgtgggtgctgtgaactgaactctagtccttaagcagcaagtgcacttaaactctgagccatttctctagctccagtatctataagtttaattttttttcaaatcatatttttaatgatggttcttaaatgctttaacctcccttgtaacccaccactcaccatagaaagtggaaaagaaaagataaggggtagggaagtggacctctttaaaaaggttctttggagcaactcctgtctgtgttgtctggaaattggcagttcggttcacaggttagcaggcagtggcagctcaatccactctcacttcagatacaccagtaatccagttcggtaggtagcaacactggtaacaggacctagcagacacagccaggccttagcctgggctcgagtcagcagaagtgactagatggaacagcaggagaagttcttggctgtgcctctctcagagaagggaagacacgagacccgcaagcattgcacagccgtactagcaagcccagcctgtctccatcactccatcgagtactaattataccctccaaacatcacatgtctaccttgtgccttgcttcagcatgtgcgtctgtctcagctgatattactctgccaatcagcctgagtccctggaagtggcaagaaactgcagtacaccaccagaagatttttttttactgtgattctctctatggagtcctgacaaatgcagctcaactatgcaatgtaagatggaccaatacatgcatgttgttaaaaaagaatccttcgtcatgtgtgcttttgagtacttgctttagcagaacatcctctccagtatctgcttcagtgaaatgttctttcatgagtctgccttagtctttcacctgtgtccacttcaggaaaacactccttcatgtgtttgcccagcaaaacaccatccagaacaactgactctccgtgaacccttaagtttccacttcaactatccctgtgaccagtatatgggttcactggcagggatgattggcctgtcgtgttcttgaagttaactcagatgatccttttaaaggttgtatacttgatgttgaaagagctgctaggcattcctaatggtatcctcctgtgaaaattagagatgggcagatggcatgctcttgtggccagcatctttgatacagccttgttaatatgtagatcataagtcatgtcagcaaaattataggagtcacacctgcctcctctcccagggtgaggtaacacacagaaaaagacagcttgcaagctgtgaggccgtgccatggtttcattaattcttcatgagtttttatttaagccaaattatcactgtttaactagacacttaagaatttaaagttgtgtgattgattataggctaattatcacccctaatcaactcatattctaaaataaagtggccacagactaagcccaccagggaccctatgtgtctctacctgagaaaggtgatgtaacttaccccaggaaatcaaggcacattaaatagcttgagacatttaaccaagagagtggcaagtttaaggatcgtatatgtgagctcaaaatagggggacagttaaaaccccagcatgtagcagcagctgttacctactgtgccccctgaggactgaggaaggagcttaccctgaggttccttcaggaagtcttcccctttctaaacggagatggctcactttaattccttaccctgaaaacatggaaataatgtcgttctacaaaactggcctgataactttttcatcttgtttcattttgtaataagaggttaaaaaggcaaggcaaggagagtaatccagtccttatccctgtgtgtgagagagcccctgcccagggagcaagcaaagctcaaataaaaggcttctaatgaaccttgcttgagccaaggtgtggaaagtagaaacatcccttgcctcactgatgaggagggcagaagccttgctgatcctactatgtgtggtaggagagattagctcatgggccacagtgggcttctgttggacatgaagatccaattgcctttttggttgcttggtggccctatggctgggcaggctgttagaccaaggcctacttattccttgggctctgtctgctcctaccctttgacagtttagctctggcagattcagtggagaccaaagggctaggtcagaagtcagtgtgctgtcagaacctgttgatgggtaccaagaggatctgtgtggtggctcacacctcccttctgagtcctatggactctctgcaggagagctgtatcttgaggccgaacaccagggttctggtgttagagttctccccagctttactctatggacaaagcagagtcctggggccagagctctagtcatttggtaacctaggccagctttgggacttgctgggtgggagtggcaacgggaatgccagggaccacaagcacaaggtacctttcttattcaagtctatgtgctcagtattgtcagttagtttacccaggaagaaggtttaggggatctcttggttcaagactaccctgtatccgtgagtagaagaccctaaaggcttagccagaagcagggatacaggatagccacatttaggtctctgatcaaagtcaggttcctaagttgctgaccatcagcaccttatggccagggtctggttcaggcatataccaccagtgttgtccttgaacttccttctaaacttgagttccttccagtaggcaacgttcttgcctccttcccttggattcagtgcttatgtataggcagatgaagcacagcaaccagagcagtgtggaggggctttctggagggaggacatacagggctcttgccctaacccagtgaatgtctgcatagccacctgtttccaggtgctgtatagtgagcagccctgcactttacttagagctttctagctcccacagagcccattcttgacacactgctccagcctgcagtaggagtggtgcttcttcatcaagttggtaatttgttcttttattgtttattgtgtttttaaaattttgtgtgtatacatatgtgcatttgggtggtaagtaggcgatgcatgctatgatacatgtgtaaaagaggatagctttcaagagttggttctctatttccactgtatgcatcctagggactgaactccaattgtcagatatggtagcaggtgtctttactcacactgagccatctctctggccctgtgttggtcatttaaaacgtacctttcctccacattgtttctcacactttaatttggaatcaattttgtaagccctgagactgactcggcttctgctttaaatgagaatcacagtggcctctcccttggcacagtgtaagtgcagaagccacgctgatgaacgttcatgctgcccgccaggagcacactttattggctgcagttggttgggtaaacatgtttttcaagagggtgctcattttaccatggcaacaggctcttcacttgagtgtctatctggaccacttctatggcacacactgttcttgaggctcacacatagctctgcagtggcttcattcagagaaggggcagaagcaaagtacaggcggtttgtctgtccaagtactggcacttggcttcttgcttggctaagcgtaggcttttaccaatatgacatcagatgggcctttgggtctgcagtggggtcctttgagagtggggcctctcattttgacaaagtgtggggtagtaggaacttgatgcaagtatgtttcctcgccagatctctcattgctgttaagatctttatgcttgaggacagagccctgggatctctgagctttgtgcgttgagcctaccaggccttcggccaagggacaccagatgccctttggaccaccaacacaccatgatagttacatctaggctttacagggaaagagggacccgtacctcaaggctagctttgctgacatagtgagccactctcctgtgttgtgctctctctacagtggacgtggctacagcgctgcctctgcaagtggcccctacagcagtacccatggacctgcgcttggaccaccagttctcactgcccttggaacctgcattgcgggagcagcaactgcagcaggaactcctagcactgaaacagaagcagcagatccagcggcagatactcattgcagagttccagcgtcaacatgagcagttgtcccgacagcatgaggcacagttgcatgaacatatcaaggtgagcagcaaccttgggctgtgccatatgtccttctgtccatggtctgtttatctccggagagcttagacatgtgaatcaggtaccctctgggtgatgtctgcttcttcttccccgtggttggtatgattttatctagtactgaggtatagacaggtgacagctcctttttctgtgcccaggatgggctttatccatctactacatagtcccatgaaccaggtactttctgggtgacatcttctccttctgttccaaggattggcatcatctatggaatgctaagacccgagaaccaaataccctctgggtggcacgtgattccttttgtccccaatgtacagtcttactcacaaaatgtcaaagcccaggtaccaggtgaccctcactttaaggctgttccaaatgtcctaggttttatgcatcctgaagaggactcaggacctcattgtatagaagttgccttctaaaaatacatgtagggagatagccagaatttcagattaaataagttgaaaagaaacccacacaagtggtatgtagatacatggtgaaactggcagaccaggaaaatctctactgagaaccatgttgagccacactgtccagtagaaactatacttgcactcgtcacagtaaagcaaaaagcctcccacacgagttgttcgagttgcccacagctgtgtaacagaatcacacaacacatcatagctttggtgacaaacagtctttactgtggcaagggatgggtcctgccctgagtgtcatgttattgtactatgttggtcatgctattcgcatctgaggcctagctgggcttagaatgaaggatatacagtcagacatcgatgtcctagtccagtcattgcacggagcagcttttttagacccgccttccctacccaagagaacaggaccaagatggagtcccagcatctagaacccctggattggtattaaccactccacaatgctgccgtaactagaccagtcttataacctgtgggaggatcctgggcaatgactcctatctatataggctatactgtagattcctaagagataggctgcataaggtttagaggctgcattgtcactggtttagatagcagagccctgccttccctggtgaataggcccagtaacagctctaggttccctttcaggaatgtgtgctgagaacattgttctgcttgggccttgtgagaaagagaatctagaaacctcaccctgggctctgaaagctgcctgtaaggaggctggggcctttggtattatgatggttgctctcttaagtgtcctaggatgggaggccgttgctgctgctgctgctgctgcatgctcttaggttagaatgggctagttaaggactgactctaccaggaccaagctcatcatccttgaatccttttttacctggtaggagaggccaacaccagacctaggaaagaattgccttgctgataattgcccagtgctctgctgaggatggtcagggccacctcccatggggccctgttttccaggactaggagctgtgtgtttcaggttggcctcaggcaggacggtgtgccagctggaaagcagtagaagtcattttaggcaatggcacccagtggccctgatgtgccagctgactgagtgccacctcaccaggctgctgccttattttcgacatgagccatagcctcacatatctgtgcctcttaagaagcagttcaaccccaaagtcttagccttttttgtattctttgtggccacagctccttgatagcagcttcctggctcagtgtcatcatggccccttctcactattattacaagttcacagtctgtcccttctctgtgatttcaggtcttgatgctgcattgcgtctctggacaagcctgtaggatggcctctgtcctgcaacagtgagctttttgctgtgcttttgagttcctttcccaggggctggttttgtggtcaagtttctgggcctgagtccctttctgaaagctggctctgtatacagaggagctctgccagggattcacctatgttaattccaggcttttgggtgatactagtgaagaccagaccaaaagcttgaaaacagtatagtgagccctgtgccatgagacacaggttcagggcagtggacctcagctggacacgcccttactctactggctatctcagaaccagccatacctgtgcatgcactggctttcctccagactcagtgtagaccctgaccaaagacagactagggagctctgctaaattacagtttacctgtgatgttcccaccattaaacattcctgtccacagctgtttatacacacgatccttgccagcagcatgcagcatgacaggaagatagaccagttgtgcagtggaaggctctagcaggtatagtgaatagtcaacgttgtgttcttgttctatcagttgattagaacagtgagtgttcccatgctttaaatagcgagggtctcagaaatcttaagtacctatatgagtttccagggcaggagcaagaagcataacaaagacccttgagttagggttccatcagccagggtgtagtctttgaccagtcttgcttattagcactttctggtgtcagcccaggtgagtctctagcagcacgccccactattccatatttctagatcctagaagagatgctataggcccagaaatctagcttcagggctggcctcagagatgagatttcagcatcataacaattcaaggttacattttcctttgtgttttaatctctctttttttattaaaattgagattaaaaaaagccttttgactgtgtaattgtgtcattgcattagcagtcttttgttttgatggtttaaactctcttcatgccatcatattgttaacgacacttggcagtggggtttgtcagacagatttcttgaacacacaatctaattagtgtcattaaatcatcagtcaatttgaatagaatttataattggaacaggagtagtttttaaagtaaaacttcagttggtaatttggggtaaacaaggtctttccaggggttgtaattctcagaatcaccttatccctggtgtaaaccttgctattctgctcttctccctagcctgagggggggtagggcagctgaatggagagggggtgctgtggcattagccagaattgcccttacagaggttgtctgctgtttcaggcccaggtggcatggaaaatcaagacagtggcccagaatactcaccttgtacatttgcagttgtatttttagtatttagaggtacctttttaccaaagaaatgcactttctagtgtttgtacttgaaaagtagtgcagggttagcaagatagccttgggccctgcccctccttctccacagagacttcaggccccagagttgacctgggctacaggccagcccttccctccgttaggactaggttacagcagtttcctcgtctaggagattgcttactgctccttctaagcctggctcacctgtcctttggttaaagactcagatgtttaattactgtcactgtcatccatgcactgttcagctgaaccccggctgtcagcttcccctttcctatgtaaatccagtcccccaacctgaagggccagtggataatctaaaatgagtgacacggaaactgactttccaagatgaacttaattcagaaattgccagggcatgccgcctataataaccatagatgcatcctgagaggctggaagggaggtaactaaaagatttagagaacatccattctgctatggagcagagaagaacatccacactgctatgatacaagaccgttgggcacaggggcttgctatagggctggtactacaacatgttagcagtgaccacttctccgagggcctgagaaacaggatgagtgacattcctaggccatctgtccttcattggcttcactatcctctcccacgcttcctgcatgtcttagtcagggttactgttgctatgcaaaaacaccatgaccaaaagcaagccatattctctcactgaaggaaatcaagacaggaacttaggctgggaacctggaggcaggaactgatgcagagaccatggaggagtgctgcttactggcttgctccctatggcttgctcagcctcctttttttaaacccaggaacagcagcccaagaatggccccacccacatcttatatcaattttcttttttttttattacgtattttcttcaattacatttccaatgctatcccaaaagtcccccccactccccccctcccctacccacccattcccattttttggccctggcattcccctgtactggggcatataatatttgcctgaccaatgggcctctctttccagtgatggccgactaggtcatcttttgatacatatgcagctaaagtcaagagctctggggtactggttagttcataatgttgttcctccgatagggttgcagatctctttagctccttggatactttctctagctcctccattgggggccctgtgctccatccaatagttgactgtgagcatccacttctgtgtttgctaggccccggcctagtctcacaagggacagctatatcaccgtccttgcaacaaaggcttgctagtgtatggtgtcatcgcttggaggctaattatgggatggatccctggatatggcagtctctagatggaccatctttttgtctcagctccaaactttgcctctgtaactccttccatgagtgattgttcccaattctaagaatgagcaaagtgtccacactttggtcttcgttcttcttccttcagtttcatatgttttacatattgtaccttatatctcgctatactaagtttctgggttaatatccacttatcagtgagtacatttcatttgagttcttttgtgattggtttacctcactcaggatgatgccctccaggtccaaccatttgcctaggaatttcgtgaattcattctttttaatagctgagtagtactccattgtgtaaatgtaccacattttttgtatccattcctctgttgagggacatctgggttctttccagcttctggctattacaaataaggctgctatgaacatagtggagcatgtgtccttcttaccggttgggacatcttctgaatatatgcccaggagaggtattgcgggatcctccggtagtactatgtccaattttcggaggaaccgccagactgatttccagagtggttgtacaagcttgcaatcccaccaacaatggaggagtgttcctctttctcctttttcctttttctttaaaaacaaacaaacaaacaaacaaaacaatgctaaaggcttgcccacagcccagtctcatggaggcatttcccagttggggtttccacctctcagatgcctcctaatgtgtataaagttgatagaatattagctagcacattgcttagcacctccatgattgccagtgtagtcagccttctctgtatgccttgtggctgcctgcatttcttctatgatttgctgtgctgttttcacctgcagtgctggtcgtttctcataggtgtaggagtgctctttatgaataaggacattattccagcctccaccattcattctcacttgatacagagtagtcacctacttttcctgtcgtgaatcagatgttctttctgaacacataaaaaatgccacctctgttccctctcatgtgtctgtgttccatttacatgtctgtggctgtatctagcttgctcccttgctacatccttatactgggcaccatgcagcctcgatggtgcccacatagatgttaggctgactgcccatctccccacaccgtgtccctctgccaagagtttcctgggcttgtctggcctgtttcttctccttgatgaactttacaaccattctcatgaagtccccacagttatgccaaaaattacttcagattgtggggtaatggcttcctagtattgaatttgtacttgagaaacaagttatttgtttatttatatttctaccctagtaaatccttgtttttatttttcaattaatgcatataaatgtttaatctgggacataatatctttttgtctttattgtgaataaatatgtttctgtattttcattttttactgctaatgtacagatgagccctggatttcattcttacgtgttatctagaataactggatagaattttctgatactgatttttgaggggggtcgttacttgtgttatctgcaaacaaaaatagtttccttttattcttcttttgaattaactgaaattttctcagctcttttaacatctgtgaggccctactgacactgtgggacagtccctgctttgagctctagacaggtgcctgtgcagagtcctgacttagatcctactgttatcttcctgtctgaaggagcagcagcatcagagtgctctttcccatgccctagcctccaagatctttatagtctaagcagtagagaatactgttcgggtagtcgactccagaggaaaggaacttggttgtgtggctgtggagagcaaggtgatggtagttactttactcagtactgtgacctgaggaacagcaagtttagggagaatgggttaagtttactcacagttgaaaaaggtttacagtctgtgctcagtagggtgtggaggtatgaggtgactggtcatttctggatcccttaggaccagagagagagaaattttgatatttaccacttttttttcccttttttaattggggccccaacccagggaattggtgtcacttcattcagggcaggcctcccatttgttaagggagtttctggaaacaccctcacagatgcatccagggttgtttcctagtgcttctagatcttaccaagttgacagtgaagattaatctttacactgcttgttccaagtagtccagggcatgttgcttgaagccctattcatgatggggaaggaccctgggaagtcatgcccttggttacctggtcagtcttcttaagcactaagaagttatgcagaccagccctgcacctggggctctctgtaacaagttcaccttacactcaagagcattgatggcactctagtgccatcctgacaatgcctcatttgttccaggagctcctggctcctgagcattaggctttgtgcttcccaattctgctttttcctctgggctgtggtatctgcagacaaaaatagctttctgtatatttacaagttaacagtagaagttgataatcttcacagaaccctgactatggtaagacacaggtaactaacactggctactctttgctgactctggctgtcagttgtatggctctcccaggttcactgacaccttctgtgtatcagtatgttgatggctaggccctgctggcacctaaaggtaccatggccaggagagtgcagtgctgagctacagtttgaaaatcaaaagttggagtccggctgttgatagatgggatgaagcttagaagagctatatactcgaggaggtgtacagcctttctaagagtacacacacacacacacacacaaatacacacaaatgcaagctgctatgctgctttgggtctctgcccttagactgctcctgttgtcttcttcctgaccacctctgttattctagacacccgtaccttaatgatgctgttgctctggcccacgggacatctcccattccagccctggcacaggctccactgttggcactcaccttcctttcctagaccttcccgatggacggtgcacctgcttgtctttttaacacttgagtgtatgggctcactgctgagtgtgtctagaaggatgaattgtttccagggtgctgtaatgaggttgcctttggatttgagccagttggtccagtagagatagaagtggtttctcattgagagccctgggacattttaatcccaaatgctccattacaaaccatggacaaataccacacgtcctgccagtcagcaggtccatgctcagactctgtttgtatgtttcagctaaagagcataatggatgctgccctgtgcttatctcagaaaaccacatgagattctgccttaaaggctctctgaacatctttaaataaagccacatactgagcattggtcgctttaagcaaatacatgtctaagtccatcaggacagacaggatttaccacagcagactggttatgtcctacctcttccttctcaaattctgccgagacttggattttactctgtcttcaagaatgtgcttgatttaccctcattttatctccagtgttatctttttttaaatcacatgagggtaggcgacaagagagctgttgggccacatctgggtagactaataggccttgtacaatgtggaaggcttgagaacaggccagctgtgctccaggacaagctgctgtaggagctggtatagtctgcaccatcacagccactcatgatcttgagcatgatccacctgtagctaaactatgtgtgcaatgttggaagagaagaaggatccatgcatttgcttagcttggcttgagtctcacagtggtagtgggggtggggggaagtgggttcatgcccatagggcttacactgctaatgcccgtgctggctggcctcttcctgggagctcccatcaacagggtggcaactctcattctcttcctctagttcttgaggctaacatgttaaatatgacatttatccaaactgggtctgtctggtccatatcaaagagaactagcagaggtgacagtggcccctctcaagctactcttttttgactttggccctcaggtatgtgactatcacaggttcactgacagctttctggccctgctggtatccaaagggtgaggatgaagtctaaaggtatcacggccagaagtattctgtggctgcaagatcagtgcatacattcactctgggaagcatgcaggtagccttccccctacatgggagggatatgtaatgtcattttgttgatgaattgtcttgtagtactagaacccactaaaaagctggctctggaagtggggttccctttccccatttcagacccaagcatgttttagtctcagagtatcccttgtttggggataagctgaccctcccacccccagttctgtgacagggaacataaaatattgtgttgggaacagccaggaagtaataaaccttttgcagaggaggctactgttgtttgtctcctgatataaaagtgcctgcagtgggaacaggaaactggaagttcagccattgagaaagtgcaaccaggaactcccactagctcaaccaccccagttggtttctgctagcaggatttgatgatactgtctgttgctgtttgttcttttattggacacctcgcccgacgggaagggacactttgctccccctgagatgttctaagttggaatctcaagctgactgttttggtggggctttcccagtgccttaagcctgctggttacaagcctccagtctgatgtcacatttcttctgctccctgacttgggccactctagacttctctgctggtgttatacatgtagttagtgttttacagtctgtctctccgctgtttctagctatctgctacatcctgtaaaataaaaataaattatattaaataaattatatttattaaactcactcattcaaaatgataagtatagctattgtagaacattctccagaccatacagatcaggctgttggatgttatagtctgtccctaagtgtcaaaatggatcaggaaccagctttctttgaaaaaaatggctatgtttagatgagtatacaaatcccttatatgagtttgttttttgaggcccagtaatgtgaggaagttgacccaggatctgtgggtggttggggtctggttttatgtctagattttctgtttgctgagctagatgccctggtgagcaactgtaggtaatttacttattcgtaatttcatatttgacattactttctataatttatttttattttacattcattgttgttttgcctgtatgtgtgtctgtacgagggtgtcagaaaccctggaactggagttacagacagttgtgagctaccatgtggatgctgggaattgagctggtatcctctggaagagcaaccagtgctcttaactgcgagccatctctccagctccttggtattatttctagtcagaaaaacacccttgacttattgaatattgtcaacttgacaggacctagaatcacctaggaagcaaacatctgacatgtgttggcattctagattgggttaattgatgtgggaagatccaccctaaatatgaacaatactgttccataggctggagtcctggactgaatgaaaaagagaaagtaatctgagtcttgagtgccagcattcatctctctctgcttcctgactggtcctcaccatgatagcctgtgtattcaccagctgtcctagttagggtgaaacaccatgatcaaagcaacttggggaggaaaggatgtgcttccacatcattgttcatcatcaaaggaagtcaggataggaactcaagcaaggcaggatcctggaggcaggagctgatgcagacgccatggaagggtgctgcttactggcttgctaccatggtttgctcagcctgctttcttataaaatccaggcctatcaaccctgggatggcaccacccacaatgggctgggccatctcctatcatcattaattaagaaagtgtcctataggcttgtctgcaactcagctcttatgaaggcagtttctcaattgagattccctcctctcaaatgactttaccttttgtcaagttgacaaagaactatccagtacaccaattctgattccaagtacacacttatttaagaggctgttgtccaatattttgtcacaataatggaaaaataactaacatacatctttgagaaaaaaaacctgtgtggggaccatctatcatgtaaagtctatatgcctcttaaatcagctgggcacatgtggctgtaggacacacacaccatgcaggctctcacacagtacctgacattcctgccctaggaatattagggtcaaaagtagccccctgatccacagaacagttttcctacgttgcttcagcttgagttctgttgagggtgtgacagaaaggttggtgtttgagcagtgccgtgagcagcattaagatgttagtaccatgtgtcatgagacttgagcttgactgtaacctcttctgattggctggtcagtagtcagtagggataatgggagcttcctagagacccagaaggttctctgccctgctggagcagtgggtgaacactttcctcagcatttaaggcctgttagcaaagaaggcttttatctttgttcacttttaaaaagtctgattgggtttacacgaaaaaaaatgtctattaaattgaatgtctagtaaatttaaaagttggggtcaattaaactaagtttgagttaagtatgtggctcaaaactgagcattggcttaaaagtgaacctggtttaagttccagttagaatagtggccttgctgttactgtatttgtttttgttttgttagaaaattttgtctgtgtgtcttatttttctgtgactatgataaagcaccatggccaaggcagtttatagaagagttcctatatttcttttcttttaaaacagaatttcctgttcccactgcaggcacttttataccaagaggcacacaacagtagcctcctctgcaaaaggtttatcttctggttattctcaacacaatattttgtgctctctgtcacagaattgggggactcatggtttcaaagggtgagcccacgaccatcatggcagggagcatgggaacaggcaggaggcctggcacccgcacagtagctgcatgggcacatcctgagaatgatgtgtgcttttgaaacctcaaagcctgcccctagtggtacacttcctaacccttcccaaacagttccaccaactggggaccaagtattccagtatgtgagcctatgccagcatattctcattggagccaccacactgtggttatcttattctaaactgtcctgtggtgatatggattgcatctgccgaagatctcttctcggcattctccctctaccttggcagagtcttggatatggtagtgagttactacgtgcagatagctgactttacccagtgtaaagtcagctcttccagaaggcttgttattatggtctgaattctacactcagtggtgtcttctcactggacagtacaggcccagcccttgtggaaccaaggagggagattcttgtgacagataccgtgtgtggtcaaagaaaggaaagaagcaaagctccgagtgcctgggtcataaacggtcactgacagtgttctgtggtaatgggctgaggaacacagatctggttagttctttctgccctagcaacatgacctcaagatgtcgtgacacacacaggaccagcagcattgttctggggtgtctttgggaatctggccattatttgcaatctgtatctctttaaatttcaggtttgcatgtctttttgactataacaggatactcgctttacttctagttactaagggaaaatacagagagactcttcatcaatgacctactccatgctcctgagttgggtgtctctgagcagagctagttgtttagggctgtttcttggaatggatgattataaaatgattgcactattatttttaaaaatgtcaccatgtttgctttccaaaggtgattatagcaggtaaaaagttaacctgatgccagttgcctagtgacccattgagggtgtattacctgtggacaccaccaccatacctttaagaactctctgactgaccctacttattcacagatgttataatggggctttcctagaatggctgggagtagtctcttggaataaagcttagtacaaagtgttataacctgattttcccataaaggatagaaaaatgttactgttctgaagttattataagaactggagctgggttcagtggctcagtgccattggctgagaggagcttagatcctgacttatgttagacttatctatatattgactgctatcaacaagggtggccaagtgaggatgcaattttgagacttgggtttggtcccttgtcccatccatccagctaggttgtaacttgctgataacttcctctgactttcagctgtcctccgtgagacactgtcctctttaggggatgtctttcagaaacagactcaagataaaactgtggaagtacacatgccaacctcatatcaaactttcagagtgttttcacactccttgtcatttcgtcttcattgtggggcaatactgctgccccgtggaagcatggggaaggcagcaagcaaagtgtgtggtacttctgtaaggatagaccaagccaggcagctggcctgcccatcttcccttcctgctgtgtcacctcatactctgctgaagcatgctgccagctcagggcagagagccactttagaggccattttagtggctgtttgaaatataaaccagagagccaggagtctctgctggccttctctgaccgccccctgcacccactgttgctagacacagtgttaagctttctgcaagtggcctttctgtggggaaggtagccattgtagggtctgggcaggcctgggcagtctttcagtgttctctcagtctctttctctaagctgttatggggaattcctgtaccctctccagttaatctgccatacacccggctgcaaatgacctttgccccatgaatcttcttagtaactgattttctcaggagagctctggaaagtttacataaacagggacataaagtttacataaacagacagtgccacctgctcagtctgcccagtaaatctttgttgcacacaaccacagttgtgactggacagctctgagaagtcttgaggctctaacctcttctggcttacttctatagcattagggaagctagactaggaaggctcactcggcaggttgtggaggtatagcataggtgagaacagagctataacctctgtcctaggggctggggctaggttaggtcagccccagggtgtctgtgtaggtatggtagcctgagaatttgcctgggtcttccaggatagccccacaggacagggaccagcacctcttttgttatgcccatggtatgaataagttggtggccctgtttattttgctcatgcttatgttttattgaaagtaatctgagtggctcaatgactgggccacacaggtttgactgttggggtggaaacaattatacaattgctgtcacttttccatcacattcttgatatgatgtgacttgaatttcccatgctgagtaagtggcatattgtgattctgattggaacaaactcagagcagtttacagtcccaccccctcagtctacccagtgctgtagttgactgtggaagctggtgatagacagtcttgggaagaaatccaaccagggagctgtaaggcctgtggttagaggggagtacaagaaggccttctgtgtgcagcttgggcacttctagaagcatgaaccttgcaatgtgtgtgtcaggattagctgtggctgcactaacctcctggcagcactatatgtagttcatgaaggttggcttaagctcctcttttgagtgctcatccagcatcagagagattggacatatctctgggtacatctatttgtcttccataaagtcttgctggagatgacatgaggcagcatatgaagtgcacacactccatgtgtgaagtggaaccatcttcacacgtgtttactgaaaccacatttgtgtacattcatatgcgcacatgcttggacctcacagctagttcatatattcaagcatatgctgaaggattagctgttttcccatgtgggcatcatcgaaactgcttaggagccagtccacctaaggtaaaaactttattaggctgcctctttgctttagtttcctcttttaaactgttctttcttagtcagggatctctaaaggaacagagctgatatggtggagataaatattttacacacacacacacacacacacacacacacacacactaaaggaggtttagtagactggcttacaggctttggtctggtagtctcatgagggagaggctaagaatacagtaattgctcaatctctgaggatagatgtctcagtaagcccagtctggcacagaagtcctgatcttcaatctgtgttggaatcccaaagaagtaagctataaataccagccaaggaatgaatgtatcagtaacaaggcagatgaatttgccattgagagtgaaggcaagcaaacaaaagcaaacttttccttcttctatctcctttatatgtgctgccaccctaaggtgtggcccagatttagggtggctctttctacttcaaataatctgattaagaaatccctcacaaatctaggcatgttggtacacacctttaaccctgcactcagcaggaagagggatctctgcgttttaggccagccaggcctatacaccctgtctcaaaaaaaagaagaaaaagagaaaagaaaatgcctcacaggggggcccagcagcctggggtttcagtagcttccagttatagtcagttggtaatcaaggtagcaatttagcatcacaagttccttctaaggctgtaggattcaggtctaagtgaaaagcatgccaaaggtcccaagcctctgttggtttcctgtcatggctgtattctgtgctgtgacctacacagtcttgggtagctggacgttcagttctagactgtctccatacttaatcattgatcactcactctgagtgaggacacgctgtgccatatttttttccatagaaagttctacaggccacctggttgccaattccttgatcactgctccttgccactcttcattctatgagggagcaacatcaaaaagtacccatgctcaaaggatagccatctgctagtttagtgaaggttggaaacagctcttggatcagaggaagaggagccaatggccttgctgaagtgagaggcccctcgaggttacatgctcgagctggaggcaagcttcttgtttaccagaacagtgcagtgacagggatatgaccagtagggtaagcacttttcccattcgtttgactatctctaagaatccttactttctttgtgcctcagcctctgtatgggcagctcattacattcttaagaatttatgacaatgttcatatgcatcataagtcctgcagtccttcttctttatcttctgtatctgtttcttacaaggactttatactttcatgccgttagatgtgccatattttgaaacataagctataatgtctacataaagatacatagactttaggtgtgctgtaacatgtatttccatggctgtgggtgggtggtacatgtcatggagtgtctccaacattcctcccctgacccctctgtttcctcaccagtctctttgtcatgtttcagtggttttattctgctctagaacttacccgatgccctgttgaatttgcttgtttgtgactcaaccctgtgctttttgccgtctaattctgctttgaggtgggcagcattcttccaggtgaatgtgcatctgaggcacacatagtgtctctctattcactctgagaatcttgggcttgactctggacctgccttgtatgttgcaagcacactcttaatgtgaactctggtggaggaatccctgaggtcttccatgtctaaggaaatgcctagcagctgaactagctggcttcaccatttctgttctgtggggcacactcaaagagcattcacagcctgcaaagtcacctactcttcctgagtgctctgcagagatccaagactattttatgaatcttgtccttaaaggggcagaggagctttaggccttggcaccatgtcttcctctgtagcaccttagatgaatgggcaggtagacaggtagcaccccgggaacggtgggctggttcctgggtgtccgtgggtctccaggctctgacctctgtcctcctctgcctgcagcagcagcaggagatgctggccatgaagcaccagcaggagctgctggagcaccagcggaaactggagcggcaccggcaagagcaggagctggagaagcagcaccgtgagcagaagctgcagcagctcaagaacaaggagaagggcaaagagagtgagtgctggtgggcaggcacagtgagcactcagggctggccccactgcctctggtgcctgtgctgcttcccaggcagctctggaggggcttgtcaccccacacaggagtcatcagtgtcttcagggtgattgtttcaggtcactttaattgggcctggagaccaaccagtggcactgtttctgaccatccaggtgtcaagaaagactcagtatcagcctgagtgcaggagcattctggggctcccacgttgaatcagccatctttagactgtttggcagtacttttcagtgatgcacagaagagtaaagccgtaaagcacatcaccttccgactctgaggacattgctgtgtcccacacacacccctttggaaaggtttcctgagtaccctcaaagtaggtattggccaataggtggacatgcagctgagggcacagtctgtgtgttgccagtcctgctttgaggcccattccttcattgaagtggctgacctccctaagaagagcccaatttaaccctagcaaagaggccacaggtagcacattattactgaaatctaccatgcacattgtattagttactttcctgttgctgtgacagaaatactatgaccaaaagcaactgaaggaaaagtgaattcatttggtttatagttccacaagggctgggtctattatggtagagaagacaacagaagcaggaagcaggctgatcacgtttcatatgagagagagagagagagagagagagaccccatgacatacttcctctagcaaggctgcgcctcctaaaggttcctaactttgatttatatcacgccaactgggacttattcgagtacaggagcctaggggggacatttctcaatcaaaccatcacatggacagaccccccaaatcttttatctgcaaacactgaaaatggctagccattttaacaaattattgtagcaaatttttgtatgaattttaatctccatctgtactacagaacacgatgcgtatgcttaaaacattcttgtaaagtctgttatttgacgttgtttgaaaatcgttttggcatgtgatatacaaagatgcagacagataggtctatgacaacaaagaatgaaagggaagctggcacctagggaccagctagcaaagagtccaagcagttggacgacagggcctcagagcctccatggccttacccttcccagggctgcggctgccagttctctcagtcccagctctgtagtggaaggggatctctctagcatctagttccctgactgccattaaggtgcgatgtgagtctatgactagcctggcagagctccccttccagagagtgttcagtcaggcctttgcctgtgcttcaggtaagagctcctttggtcttggtgtaaagctgctccttgtgtgttatggaacagtccttgttgtgagttgtgtgcatgatcagcccttttctcccttcgagggttgaccttttgatcataatgctgtttgttagtctctcagttttctccgtgtacttttgggttgtgtttttaaaaatacacatttctcccaaaccattttgcccttgagtagtttcctacttgtgtggatgtccattctgctggaagtggtgtatgtattgcatagtttagagtgtgcatctgacccctcagatctcttgagaaccagtgtctgcacccatgtgcttccatgctccctgttggtgacgtcagcctttgctgtcattgcttcagttaccacaaactagaagtgagcttgggcccagaagtgctagtcttccctattcttgggactttgtgttttcattgaaagtcttaaaattgatccagacatgtcctgagttcacctgatacttagactgactctgtgtatctagttggtgagatgtgatattttacagccttgattattcctaacacctcactattctttgggcctttctaattttttcttaccaaaatgttagagttgtttgctcaggagacttgcatgtattttaccaggcatatttcaagccatctgattggttaacactattgtgcatagcttggttttgcaattttgaaaaagcaattagcaacctgctgactctactctgtgcccagcaaccatgtgaaactcatgttctaattaccagcaaggtgggtcaggttttcagcctatagaggcacatcctccataaacactggcaggttgtttcctccttcccgaccagaatgccctcatatctttcccatctttacctgactgacctaactaggattccactagaatgatgagttaaaatggcagtcttgactcccttctgctgttggaggcaggctcatttttccagaaggccttactcactggcctgtttatcaagttaccctcctttgctagtgctgtgagtttgagtatgcatagatattgattttcctcagatatttcagcatctttgggaggtggtcataggattattgtttatctgacatatttaatgaatgtggcaaatagatctattaggatagaaattttatctgacatttataaatagccctcctcaccttgatcataaagcattatctttttctatgtgttgcttgtattttgtatgtctgcaactctatttgtgagaatttgtcttagttagggtttctgttgctgcaatggaacaccatgcatgaccaaaaagcaagttggagaggaaaggatttatttagcttacacttacatattgcagttcgctattgaaggaagtcaggataggaactcaaaacaggacaggatccttgaggcagaagctgatgcagaggccatggacaggcgctgtttactggcttgcttcccatgacttgctcagcctgctctcttacagaaccaagactaccaacccagagatggcaccacccacaatggcctctcaccttacagctggatctcatagaggcgtttcctcacctgaagactccttcctttctaatgattctagctgtgtcaagttgataaacaaaacaagcaatacagatattggccagcattttccttcttgtaatgccttgccaagtttggtgtttcagcagtgttggcctgaggctgagctctctttggtctgtatgaactgtggtgctttcccatttcacatcctcagtgttggatgttagcaccttctctgttgatgggtgtttgatttctttaaatttcttctttagtctctccagagcacgattctcaactctcctaatgctcctacttttcaatacagttcctcatggtgttgtgacccccaacaataaaattattcttgttgctacttcatagctgtacttttgctactgctatgaatcataaatatccgtgtcttctgatggtcttaggtgaccccgtgaaaaggttgttcagcccgcaaatgggtcactactcaaaggttaagaactgctgctccagagacttaccagttttgtcagtctgtttagaattcttgcttttagctttatggacagtctcttcagtgtttttctactttgttcatttctattaactgtattctccccttgtcttctgttttctttgggtttctgactccttctcattctgtgagttacacatctcttaatcattggttccagccttctcttctgacatctgaatgtaaaactataatttttttctctaaggacaacattatctatattcagtaagttttgacacatagtcaaactttgtcttttaatcaatttttttcatattgataagtttgtccttatgagtgtcaccgttctttacaaaccccaattatcgacctcttgtctttccgttttcttgctctagactttaatgatgccttttcctctcctgccagcttggtaacttgttctgctcctctcctgatcacagctgtggttagcacggcctgcttgactccatcacatctactcaggttcacagagcgagcattctctgattcagttaggactcgcaatctccttttcaggtgcgactcttatccacgagattgaggtttcatctgttgcgattttccttctatttctttcacggaatctagtgatgatgaatttttgtcttttaattgttgaaggttaattttactgagtgtagatttattaggttaatatttattttctcttggtgctctaaagatcttattttcttcaaaaattaccatcattcctattgttcctttttgagagataatctcttatctggctactattaagagtctctcttctgatattttctagttccatccatttgccggcaaaactcaggatgtcctcgttcttaataactcagtagtactccatgtgtaaatgaaccacattttctgtatccattcttctatcatgggacatctgggttgtttccagcttctgactatcataaataaggccgctgtgaacatagtggaacatgtgcccctgtggcatggtggggcatcttttgggtatattctcaagagtggtattgctgggtcttcagatagatctattttcaattttctgaggaaccttcagattgatttccagagtcattgtaccagtttgcagtcccaccagcaatggatgagtgttcctctttctctgcatcctctccaacatgtgttgtcacctgaggttttgatcttagccattctgattggtataagatggaatctcagggtcattttgatttgcatttctctgatcactatggacttgaacatttcttaaggtgcttttcagccattcaagattcctctgttgtgaatttttggtttagttctataccccattttttgattgggtagtttgggttttttggtggttagcttcttgagttcttttatattttggatattagtcctctatcagatgtggggttagtgaagatttcttttcccaatctgtaggttgctgacttgtcttactaaaccctttgccttacagctttccagtttcaggaggttccatttatcaatccctgatcttcaagtgtgcacaattagagttctgtttaggaaatttccccctgtgccaatgagttcaaggctctttcccactttcttttctattagattcattgtatctggttttatgttgaggtcttgatctacttggacttgagctttgtgcaaggtgacaaatataggtctattttcatttttctacatacatacagccagttaaaccagcaccatttattgaagatgctttcttccattgttatttgaaatatttttcagatatgagtttaactgcagtttcctttgttttccttgggagtcttagtcttggctgtatggtttaatacttttacaaaattttagaattgattattttcaccttttatcttttttcctaatgcagtgtacttgagactttagttccacatgttagggccattttctacaacccctacattttccccacttgcttccttttgataatttcttcttttcagatgtccactatactaatttaatattttcctgtgaagtaaactgttaagttcatctactggatttttcatttgctagataaccattttcacattgttactcagatatttatagtttccatgggatttctgccatccatagttagttcttttagaatggcccctctggctgggtctctcccagctgcttgcttctctcttccctctgtcaccccttcccattatcagggtacctctgcctggtgctggtctctaaatggaaggctgagatgtggttcactggcctagagacagggtttcctgtttgctttgtgatgtcacccagatgcattaaaacatttcagttgtcttaagtgaagggttctgagctgatcagaggtgagtgccaggcctccttataaggatggtgccctctatgggcctgcctcggagcccctgaggcttcctcctcactgcactccagagtttgctgccctggtcctctgtgttaattgttctctgatcatcaggtacctacaaggaaaccatcaaccatggtggctcattctctgtccctttctgtccagcttaattaaccctttgttccaggtcccccagtgttcctgagctgccagtagaggcagaaacctgcaggtctcctgaccactcctagcaggtttaatcaagctaacctgcttgaatccctccctggtcattatagtctggagccctcagctctctggacttttttcctctttgttccatttgtggtctgcatcttgtccgcatggaaaggatttgttggggttagaggtttgcctttgtaacaagctttaggttttcacaattgacatctcacctttaatgaatcctcgttagaagtatttacaaatgggacttttctaaaacaaagtccttatggttttaaaagaaattaaatgactgtcaagtaaatttgttctcaagcttaagtgtaaagattattatgccaaattacttctaaatgtaaatagggaagtcatctaataataccataattttgtatgttttaacaattaattgttccaaaacatattttaagtttattgctaatttagtctcttgtcaatttatttctctatctcatgattttcaaatactaagaaattgctttcatttacaaaattaacagttagaattatcagtaatgtgatgtttcactcttgaaatatgaacatatttaatttttttcaccttaactggtagaatttcaagatagtttccttgccagtatttggaaggatatgctaagcctgaatgatgtacacaggcactgttacacctcactcagcagtggccttagggatcaaattcccaaaaggcattgaaggcttttccaaggtaaagttgcagacctgttgggaacaacatataggcagaatttgtgcagattcagcctgtgtaattgactgttcagacatgtatcactctccagccagccgatctggcaaactgaccagcagggaacctgaggtcagtaatctccttagcagctcccaagtgcagccagtgctgggatctagaccagtgtgctgtggttcgtggctttccttacattcatgatgggctgccttcctccaggaagctatctccctgtcctcacaggagtatgtgaggagtttgaccatgtacatgaagggtagcgctgccctacagagcacattcacagagcccaatccactgctacaatgctcagccctggactagccactcccttccccgtttcgtggctcacatgtacctcagtgtgtagcctatatacttggctttggttttgtttgtttgttgagtaggggaaatagtggctgtttatcaaaagattacagttcaaattttaaacatcagccagtcagtctgtgccacaaccagccaacaaataacaatttttctcattgctgaaaagcagctcagtctgaattactttctcagagtttacaaaaatgatccaataaaaatattatttcaaggcttgcagaatatgacttcagaaaacatctcaggtctgtttatgggtcagaaatgatctctgtgctatgtgctaagctccgccccatgttgaccctgtgctggaatgttcccagctgcactccagccctattacaggcagcagccgtggttttcactttgtggatttgggtggtcaggttttattattaataataaactgctcagttgagtgtttggcaagcttgcacaagcttcgaagccctaagaatggagtcctgtggggagaaggcagctacgcagaccaacagtgggagatgctcttatgtcggggctgggcagctcagccatgaaggggagtcttgtttgtgccagcagatgcaaatgtcaggaggcatcttcagtttccaaacatttgcaaactcagtgcaaagtgttcattagttcatttcttaaggttttgtgtaactgactttatttagtatttaatgagttttgtatacatctataagcatttacagtttaaaacattaattcctaatcatgctgcagttttacttaatgataacaagtcataagttcaccccaccaacagtgagttcttaagactacatggcactttctctcacaggtaacagcagcgttacctttatcaaccatgttcccatttggacacacttgggagcattgaggtctgagaacaggaggtctgtcctggcagagtcagatagcacggctccatgtcatgcctctggctacaagcacagctctggtggctggtggcctcacttggggaaaaacccttgagctactttgaaaatgacaggctgggtgatactcagtggcagagcattaaagaatctaacagcttcatctttgtaaaggtaaaaatgctaattttattttccatatgtttagcagtgatatctagttgctttgtgttggtaggcttgggtttcacttttcaaatagctcttctgttcccaccacaccacagggtatttcctttatcactgattgtaaaggcacctggtgtgtttgcaagctttacccttttcttggtttgcattgcttgtgtttctgttcagtgttagcctgttgctttcaggagtatttaggagtgtcacgtggagagcaaacagttccatgaattcatgatccctccaagtccatgcattggcagactgtgggactagggggtgggagagtagtactggagggtggtggtttgctgtctagggtctgtagatcctccaccctccatgcctgcagatcagtggggcagcctgggcacttgggctgccgtgcaggaccagaggactgtaactagcagtaactctgctttggccatgtgttgaaggtaaaagggggtgctcgttctgtagatgtagtaaccacttatggcccatgtgccaagatggctttagagcctgcagagaaaacagtactaaggaacccagggccagagcagaaggctagctgaaaggattgtctgcttgattgtctgattgtctatcttagggactgaacctaatgggtttgctaatactcaccaagagtctccgttcctcactcccaattattatccaatttttgaaagaaaaaaaaaatcaatggcagagctttaacaaaaaggtgagggaagatgtggcatgcacactacatattctgacaagaatatccaaaatagacttcataggaagtaaatgtgtgagtgccacacatccagactctgactggaaatgacaaaatgatggatggatgcagtacctcacctccagactgtcacctgacctttacaccttccacccacaacctgggcctcagaatgcctgcttataggtttccttgtttccaaagtttaaatgtgtaagctctcaataaattatacaagcagccaaacaactaggaactgtccatagactcccaacatagccaccccatctttctctctctctctctctctctctctctctctctctctctctctctctctctcacacacacacacacacacacacacacacacacagagcaactcctgggaagaaccaaggcaaggtagtacagtaggtcccacagctgtccccagctccttagggtaccagtggagtgtctgcattcaggaagttaaccctgagtgctgaaaagcggaatctattgctgatgcctagtggaaggagcctttgtcaatgtgcagagacattttggaaaatatattagcaaaatatcttgaggttgcttgtgtggtaggatcattctgttggtcctttgtgctacatgaagtatttgggatcatccaagatggtatttgaatactgtattatagcaggaagtccttaccatagtcttcagtacaaggatacataggcacagtactgaggtatctggcagaaaatcacagattatgcagggtgagtaggggcatctttatgtagtctgtttctacgaccttacagtttaatatacctttcagcaacagtcaccatatcataagaaagcccttagatacacaacttccacctgagtagaatgataatatctgcccaccagagtatgtggcaccagacagaaggggacagaaatgcactggatactaggaaagccctacactagtgtgtgttacacactggctaccctgctacccagtagaaccttattccccagggtggttgtgtagagaattccttttgtgtggaatttagagtctgctgcttgtttagaaaagtgaagccaccatgcttccagcacttggctctgaaactttagcacaaggatatgaaacctcccagtagaaataagttgtgctagctaacagaagccgttctcatgctgaagtctgtgttttggtagagtgcactcatacagtgcttagatagaagacctccccttaaagctccctggccttgggagagcactgcagagaaagatctcttcctgccttgtgcctcatactgcctgctccatactgcttcctcctccttactctcggcttcccttccaggtgctgtggcgagcacagaggtgaagatgaagctgcaggagtttgttctcaacaagaagaaggctctagcccaccggaacctgaaccactgcatttccagcgatccccgctactggtatgggtaagtgacctgggcctgttctttgggtgtctggcatacacagctctgtggacaggtttgagtttttcaaagatcacccaatataggggtggcagagatactgagcccctaaagctatataagcagatctgaagggaggaggtctgggatagtgtatgtcatggtcagctagacgaggcgtggatcatcttcaggtcaccaagtggcactcctggcagtgaggacctctggctcagtcatccatagacagcactatgttcaagagaagcaagagtggagaaggcagaaggtgaaaccttgtattataaagagagggtggaggagtaggggaggtgaggaagaccaggagtctagtgtggactttgaaacccataacaagtatgaataaggacagaaggaggctagaggccagcatgggctttaatgtgcaacaagaggtatatgtcaatggagagtgccatgttcattttgccagagccaagataatggaaatgacacctttgtgaacacaaacctttttaaaggttcctaaggattactgactgtaggcttttagcaatccttctatagtctaacttgccctcagcctatactgtcattttttaatatgcatgctgtcttgtggagaattggagttctcttttacacctgacaacatctttacgatccagttactgaatccttgggaaagatgggggcaattaagatgagagatcagcctgggccagagcatgcatctgatctgggcagctcagagcagatcatgtctatgctgagatgcaagcagctgacttgcccagcattgagaaaaaaaaggcttgggtggattccccaacatgggctgtttgtggtgtgctgtagagcccactgaggagacttgggcagttctcacacagaacacgtggctaatttgcaataattttatgttgctcttagagtcgtttcatcgctggaaagaaacaatggagtagttttcctaaatcaaaatgaagtcattaattttactcagggaaaaaaaaagcttttcttagagtctcaaaatggacaaccgtttctactaaaacctctctggtcccactaaagtggcccgtttatttacatggaagacctcagttcccacgacacaacctggggaagagcagttgtacagtgagactcttcattgtcacttaggctctgtggctgtacacactgcatgtcttctgaagcaggctattggcctttgtgtagctcagaagagggtgaaataggtggcccatgaggtggaatgaagagtaatcgtgagagcctcagcctgggctgttctctgcagactctgctggagaggtcagcctgggcttctgccatggaggggttctgttgtcctacatttacatgtgggagtcaggatggtcagggggaggtagccaaggataggccttaggatggtgatttgaaggtagacacagggtgcaactggaaaaggcagtaggaccagacagggcctagaagatatagagggacctaggaaggggaagcttcctagaccaggttggttattgtcatcataataaggagcaaacagggaccacttctcagagaacaagatagggcagtccaacttaggtcctatggagttcagtgggtagtgctgttacaagaaagtacagggctcatagaggcagttttgcagggtgtgggacttgggagtgtgtcaacagccccaggagggcagtcacacttgaatagacaaatggaacaggaagaaaggctgactggaacaggggttgtggaggtgtgttgctgggtgaaagactcagccagcaggtagcttcctccagttgaggagttgcggtatagggaagggagtccaggacatacttggattaaaggagtagcacctgaagaggaagggtggcagggggtgggggtggggggcgcctttgcctagacctttgccctgagcaggatgttcaggaaggttcctgaacaaagtcctcttccctgaagcagtttggaattgaggtagctagacagggcagaacttgatatcagacgcatcatccaagaagacagcttgtttttattgagtttgataaccatgtaaggatcctgaccagccatcatggaggtacatccaggtgcagtgtctgacccactaagacaccatggcagaagagagccaaaccatatccagcatcatgtgataattgccaggagcagcccagagccattgagatctgagtatgaaggctaagacaacaaaacttctagaaggaaacatgaaggaggggtttcttttcaacaatgaaattatccttaagagatgaatatggtctgtgtactcatacacacagctactgtgtactcatatacataaaataaacaaacaaacagagtcctcctggtaagagagagatgagtaaaactatttaaaattaacaacatgttctatgtaagaacttgtagcatgtcttcatcagtgtcatcagctgagacactattacctgaaatagttaggccccatcaacatttaaaacagctccttgaaagacacctttaagaaaaagtcaagcagccaggcagtggtggcacatgcctttaatcccagcactcaggaagcagaggcaggtggatttctatgagtttggggccattctggtctacagagtgagttccaggacagccagagctgaacaaagaacccttgtatcaaccattcccccaaaagcaagcagtagactagaaggaaatcctccagtgtgcatctgtagagtgcttgtgaagctactgcagcttagcaaacagatggcaaagatgtgaacagctgtaccacacaataagccatgtgggctgccatcccagtgagacactacttctcacctacagggctggctaaactaacagaccaggggtggcagggctctcccttcacagacaggtagggcaagattaaatggtcctattgcaaatggtttaatagatctaagaatggtgctgtgacccagcagtgcactttcaggtatttgcaagtatacaccaggcgtatactctgtggtcctaacaaatgacccacaaacccgtagcaggtgagtggcctgataggttgggccactataccctgcaattatgcagcagtgtggagacctcacatgtcctgtccttaggtcagacacacagccacacctcatgtaaaactggactcagcccaatgaagctagagaatcatcagcaaaggtgcagaggggatggtctggaattgggactgttcaaggcttgattgatggtgataatccatgtactgaggagagtgttcacaatctggggcttaaaacttcatctgagcctgctttgtgccatgttatgccatgtgtccatgctttagatcccaggcctgtgaaattgaagcttgcagaaactccagaccacaggatttccatgaataagcttcatattaattatattgagatagtatttttatatctcaggttaaatagaattctaaagttaatttcacctatttcttttattcatttttaaatagcttctagaaaatgtaacttaaatgtgtagttcacacatttctgttggactgtaatgttccacttgattaacaagttttatttattttaaatcactagtataaatctgatataatggaaaagcccatctttgataaactttaaatgttttaatttgtgctttatttcacattcaaggtggtagttagaaagaaaacagtagtttgttcttctgtcttgagtaagacaagaactgccttttttcactctgttttacttagtgtttttggtggtactgatggtcctgctgggaattgaaccccaggcctcatatgtgctaggcaggtacttgtccactaatgtatacacctagctccaaagacttcctttaaagaaggcctggtcagtaaaccagcatcctcctatcctggctttgtctgcatcctagactagttatccaaggtcggaaagctggtagctgttcttggctagagagagttagcagctgctctgtggtccttgcctctggaatgtggtggtatgttagtctgtgtgatagaaagttgactatgaagctataaacttaaatggtgggtgtatacataggtgtcagtgatggggcatgtagtgttagcataagactgagcaagggatgggattttgatcttgatcacacatctggatacttcttcagtgagtttattccagggtaaggtgagttagcctggtatctggaagccacaccaaggctatctgctggcatgtcttcccaagtgcctgcctgttcttggcatgcaaagggagcaatgtcaaggaccatgagaaggggctgctccttaagagtgaactggtcatgaggacatggaggtcctccttctgtaatatctggactcccacaaaggctccactgactgtccagaaccagctccagctccaagaagtgtttctagaggataaggagatataagcagctctgagagctgtgggcctggctcgaggcaggtggttcagagtagcctcttgttccagctcatttacagccatgacagaaaagtgggtcttaatattggcaggataggggggtgggtatgggggacctttgggatagcattgaaaatgtaaacgaggaaaatacctaataaaaaaaaaaagaaaaaaaatattggcaggatcttgagagatgagatcagtgggaggaggtctactagatctggagtgaccaacttttccaacttactccttagtaggaagaaaccctgtcatgaaacgtaacagttgtttagttgtctttattgcatttctttaattactatattaaattactttcctatagttgactatctttttaacctatacatgagtgcactcatgtgcatgtgcacaccacacacacaccattctgtgtttggaggaaaacaaaagggatgccaaggaccccattagcttaacatgtaagaagtcttcagggctaccttcttagatgtgtctgagagtcccttcagtccattctttgcatgatacgctttcaaatatttaaatatgcacctgcctgtgctcatctgagagctcccactctaggttcacataactcccgatgtgtggaatgcaaataatgtatatttaaataaatcatttagcaaagtctaaactagaaagtaagcagatgtgttttgagccattaaacagatctcctgtactcaagaccacagaatgtctcatgctgtcagaattcagaggaaggcttggctgctggtacatccacaaagttttgctaaaggtcgcctaggatggcctcagtgccctagacgtaccctgcaaccagactcctatttcttcttctgttcctcctcttcctcttcctcttcctccttcccctcctgctctctgctctgagtatccatctacctgtaaccttttccatctggccatttttacaactttgagttatgcatgtccattggaagttcacttcctatagtaactcccagaatagagatttgagatgctactgagctgtcccagaaaggatatggctgagggatttgttgtagtagtcacgagtggtggacatgttcttccaaaaggccctgtgcttggggagacagacagtcataggtattgccagcatctgctaggagtccacactcaccccatctttctatctgcacctttctatgatctctcatgcctgagcccactgacttccactacttgcatcctgtagacaaactctctgaggacagactgatataaaaatcccagagggcagatctgggcagagaatgggccctcggtcacacagtcaggggctgtggacactgttgtttactttttggcctgtttgtttgtttgtttgtttgtttactcttacctctcctgtgggggaagagtcgctaacagaaggtcagatttcaagacctggtgtcctgagcttgggatgcccgggcacactgatctatctttgcctttttccaggaagacacagcacagctcccttgaccagagctctccaccccagagtggggtgtcagcctcctacaaccaccccgtcttgggaatgtacgacgccaaagatgacttccctcttaggaaaacaggttagtgtgcattctgctccctgaatgcctccatcttgacagcagccctagtgagctctggtgagccacgggcagtgctttggcattttgttcaagatagtttaagagactggcttttgcattcagacatccttttaatagtgacctaaactgtgtgtggtttatcccaaaaggaatgggtctcatgcatgtactcctgtataatagaacttggcctcatccccacaataccttgattcatcccctcttgggaatatgctctgctctacagtccagagcagtaggttagttctaggactagtgacagcttctgcgaatgtgctggccaaggtcagagagtatgtaaggattctgcatggcctttgggtgacacccagacagggataattaaggcacacagagtgaaagcaggtcccatgaaaaaggtgtggggatatccctcctggtccacaggtttgtatatcagctctcttatggacgaagggtataaaggggactagactgttatcaaaggaagaggaatatactagaacataagacaagccagtattatagtcttgctttcttgagtgatagttgtagaggatggtgccttagaaaagggctagaatggctgtggacagttcattgggatggcaagaaggtgggctttttagaggttattccagaggtcatggacccacataacctcatcctgtatggtgaagatgggatcccagcctgcagagcagtgcccagagttcttcagaagtgacatcttaggggcacacctgcttttactaaataagtccatgaaattcaaagtttctctttagttctaagcaaggctgccctagccttcacagggcatcacagagataaacaggttaaccttttatctcttcctaaactaggaagtttcagaagatactacgcttagttgtggtttagtgtggctttgagcaaactggacccaggagggacattttagctcagcataaacagggcttgattaatatttgcaatgtgtgaggtggaatggccatgtcaggtttgttgcctctcaggtgggtgggatcttctgtagaaggataaagatgtggcctaaatcagagtagtcagctctcaccaaaggatagacactcttgaaaatacccatggggtaccttcctcccgaggtcaacaggaaggcagtgtctggcccagagcactgtaacagcaggactgtaagcagtcatcccttccctacagagagtggtgctagagttcagtcaccttctgttcctagtctccgaagcctttgagtcatgggtagcatgctcccagagagatagtcagaacaggaggcagaatccctaacaccattagccactgctgctcacacagccatgtggccttccatggatgtccacagggctctgagtcttctctacaagtctcaacccacttctgttggttcttgtgcatttctctggggaatgttggaagccaagacactggtacagcccacctgcagaccctactccctgagaatagaggaacaaatgtttctcttactctggagaggcttcaaagaccttaattaaggtttggttacatcccaagtttttaagaggcaccaccagtacatgaatgatattaataataaggattcagagaaagcatttaatttcctacagtactcagggaatggcctgcagtatactggacatggcttcttccagcccttgatgttgccagtgctaagtacacttctgtgtatttctgatgaagtggtgctatgaaagacagtcagtgagtgatattcccttcatgaggtaccatggtcaagttacagtgacagtctcaaataactgtatctgaatagtttctggctctgactttatattaattcatgttgaccttgcagtttgtccatctcagtccttaaaggattttaatccttattcaaagtgaaataaacccttagcaatctcctgctgatttcttctacaccctaggcatatttgcatagtccttggttggttccctggggtggcagctcacgcctctgttgtgccttgtcttccttctctcatgaaaataacatgcagcatcgctgacctttctcatgcgcagagcgcagctgcctcagtcctgccccagctactttttacacattcatggcttaggagacacacttaccctccgctccgcccaaccgttaaatggtctggactccttccaccatgggacttcctaccaagcctccctctctgctccactaagcagagggccacatggaaacaactcagttcaggcctgcatgctgctgaatgtcaagcttacagttttccaaatccaggctctagtctgacctctcctgtcgcccagctctgacgtcctttcaaaggccttggtcctttctgtattattgactgacagcagtggtgtctcggctgcaggatccctcttttcataccagaattctgcctgagtcccaggtgaggtagggcctggtcccttcccactgcttcaggccaccctaaaaaagtatcctcagggctggactgagtggtgaagacagagcactggctgatcttccaggttcaattcccagcagccatatggcagctcgcaagcatctgtaactcctgtatcatggaatccaatgccctcttctcactgtttgcatgtagcacaccaactatatgcaggcaaaacacccatacacataataacttaaaatagaaaagcagtaactttttaagttagtctcactaggtttctatggccttttaaaaccactaactgcttttttttttccaacactctcacaaaagctgaggagttgattggctcactgatccttaccctcattgtcaggagccttcttcatatagattttgcttgtcctggtctattttatgttgcaatcacaaaatccccaagaccaaaaaatgtatgggaaataaatagtttagctggctcttgattctgtaaaccaggagatttaagagcacaggtcctagtattcactcagcactagactagttaggtaacaggcctttatgagtttgggtttctttctcttcttgggaacccatcagacccggcctttacatttctgggaagctgtttaggagacctgcttagtcccactctgcctgagaatcctaatgctgcctcattttttccaaaagaagattcagatttgcttacatgtcccaggccagaacagaagtttgcccaaggtcgcctcctcagaaccctagcctgtctgagtcttgattcgttgggggatgagagtaatgccacatggaggtagggaacttctcccaggattcagagaggccaaggtgacatttcactgcctcacaaatgaacatgttgcccaagcttgaaaggacagggggctctggcatgttggctatcttttttctttttttgttttttttttttttgtttttcgagtcagggtttctctgtatagtcttggctgtcctggaactcactttgtagaccaggctggccttgaactcagaaatccacctgcctctgcctcccaagtgctgggattaaaggcgtgcgccaccaccacccggcacatgttggctatcttatctctcccaggttgtcctatctctgagagctgatggctgcagaggttgtccctgccctttcccaacccatgctagactgtgaagctcatggcttgtgccaccccaggagtagggatgaagtgggtctgcagtttcctgaagaggatggaagtctgtcatggcctcacagttgcagattcttacatgaatctgtctgcacaggagagctgcttacagaagccaaaccaagtcccaacctcagctgtgcctttagtgtcagcaaagaaggtcagggtctgagctgtgcctcagtgcagagaagcctcagtgcagagaagcagcctatccaatccttcaccccggtttttggagcatcaattgcccttcacagaagctgctggggtctgaaactgttgtctgcttcaggattgtgagatgcaggtatcttcaggtgaacaaggaggccagtaatttagaagctgtgatgatgtcacaggtgacagacagccttgaaagctctcctcaggtttcaaggcatcactactctaaaattacagatgaattgtttaggagaccattatttaagaggcatcctcattgagtgactgtcatgcttcagtaggttcttgctatgtccagtaaatcagtgacactatggtaatgtcctcagggtagaatggaagcacacctattgccctggcagccacccactgcatccactaatggggctaacaggagcttgtacccactgacagaggagccctgccttccagtccatacttaagtggagatttaccagctgtgcatattttaaaccaccagtgtgatgcccttgaccccagctgtgtctgcctggctataacaacatctccttccatacagcttctgaacctaacctgaaattacgctcaaggcttaagcagaaagtagctgagagacggagcagccccctgttgcgcaggaaagatggccctgtggccactgctctaaaaaagcgacccctggatgttacaggtatgtcagggagcaggtaagcctccgaccctaacacacaccctgcactgtgacacctctaacaatgtgtctcagctcaacccaattccctatgctgtcctgctgagtggtgatgcacatgccaggtccagccacttagaaatgtggggcttgagtggctggctaggtcctattccatgactcagttccctcagagggctgccattgggcccaagtgagagagctatctgcctggcattcagagattttctgaaggtaggtttaaaacagctcctccctttagtgatgatggcatgtttctgcctactttctgctgcccacagacatagtggggcctttgagcttccatattgttccccactaacgtggctggctaatcagagtaagggcagctagttccacttcagtgaccacactgatcctggccccacctgctggtggacaagcagcgggatacagcccttctcaccggaggaagctcctctcagcacctccgtcttaggttaagtgttcacctcagccagggctcacaccagcacctagaatcttaccatctaggaaaaaggaagctgttcagagctgacctgaagagagttccctagccttgaacatgctgttggaaggtcacggttctggttgttggtctataagtggcacctgtctagttggtccagtctgtttcagtgactgtgctgatgtccaggggaaaacaaaagggctcctgtgcccaagtccttcagagcaagtacccaagtctcatatacctgccctcaggacagagggctctgcggccttctaggcacagggccggtgagtcctcctcattcaaggacttgcttgtagatcttggatctgtgcaaagaagatcctgacacttgtgtagcttatcacagccttccttttcatgcagttctctcctgcttactctattagagacaccttacctaaaaaacacaaagaagcattggtacccttagaactcatgtttatcatggttttaatctgtcctctgcttgtactattagaaacatctagggaaacccaagaagcattacaatccatactcactctccatcactgggaatttagttgggaattttaggggcatgtgagtagaagctgctcacactgctgtgcagcctggctgcctgtggcagtacctggtgtgagccactccttgcttatacctaggttatgcactctcactggcaagatcattcataagacagagtctctgtcaggctcctctgagtgccacacacccccaatgactgctgtttcttcattcccattgagagtcatgtgagaagaaggtgcctgccctctgctttctgagtaaagcatgacccaagggagatggcctgaggggtcagcatggtagtgcgggtcagggctgactatgttaggtgggagtcttcatgaaagccttgggcaggcttgaagtgtattagaatcacttgtctgctctgtaaacttgtggagaaggtggcctcggagctacagcttgatggataagtgaaattgggagccagactgtgctactcaggtcactgtagccacctggacacttgtgacagaatggcgcttcagatagagctgttttcaggcagcagagagaaagggactctagctagggttgctccaagaagagcaagggagcagcaaagatccttgagcagaaaaggcctgcaccctgcgtggagggccaggggccacggcaggttagcataccactcttcccagctgggatgaagttcatgctggctgaagagcatgaagaagaacctgtgccacatggaatcaaggttcacactcagtctgcttcctgtcatccttaccagtatgtgatgtgttcacaccacagttgaggatgggcctcctactgtacaaccgcctatcttcctcaggcgcacgcctttaaccctagcactcgggaggcagaggcaggaggatttctgagttcaaggccagcctggtctacagagttccaggacagccagggctacacagaaaaaccctgtctcaaaaaaccaaaaaacaaaacaaaacaaaagaaaaaccaaaataactgttgcaggtactttctgacatcctcttttgctaatgcaaataacagaaggccatgattgtgtgcatttccatagaccggattcctagaaacagaatgaatctaaaatatagtttgtttaaagtgaaaaactataaatcatacccacatttttcttgccctacagagcagcatgtaggtaagaatgtttatctgcatacttagcaggagtttgtgtctaaggaggacttgcttggttctgctgtgcaaagacaggctgcagcagaagagagcatagtccaaggtagggcatggtagctgctgttggcagtgtgacttcaagagcagagcgtggactctgagcaaagtacatgtgtacagaagtaaaatggaaatgcctcttcactccagtaggatctggagctcccctctggcaaaattcagggaaatacaatttcacctgtgtagtaacctagttggcatttggaagagagggatggatcctgtgctcatggtcagtgtctggcagggtatgtgcaagcattgtttacaggcttctagagtggagaggtagggtgtaggcagctactagagaatgagaagtggcctcaggggactggtgagtgacgcagtccacagaggaccaagccttcttcgtctgccaagatagatgtcaggttgtctttgccttggcgtacttctgtgcagggcaggcgatgccctgggcacagcttcctggtcagtgagtgctgtgaaatgatgtctcatcacaactcatagaggcaagcttctgcgctctctgaagggctgcaagcttgtttgctccagtcctccatcttcccatcctctgtcttgcagggctatacttacagacagtgttctgaatcagctctgcagctgaggagccctgttagctgggtgcatgagtggctgtgctctgttaagcaagggtgtccttgaaccccttcagtggcctgctgtgtccagggctagggctagagtttgatctcagagtgctattgctactacctggactgtttcaggaaagtagttaatgtgtgtgtttgtgaagtgttaaccagataatgccattgtcaaaatgcccctgagccagacttcaaaagctcagcatctgcccctgaacatagagaggcgctacccaggctgttgtgataggagatagctgcagccagcccatgggtgtaaggaactgtgtgcccagcccaccaatcagggtcaagcccaacacattcaaatgttaatatttcaaatcacatttgtaagctgcagaagccactgcctgtttcctgaatgctactttgttcatagtaaagtaagtgggttgcatgtaaactgagcagtttccgtaggttgcttgagttcaaacttgtttttacagacacaatgaatttgacctttcgaagctaaaaaaaaaaacaaaaaccaaaacccactgggcctttgtattcacttgtcttttgttcaaatataaataagtgtttaagagcttacctttatgatatttcaaactatcttgaaatggaaaagaactgtgaacaggtaacatgcacaccctgaaaggatcaaccgtgcatccacagagcttcatcactgggaggctcatgggaggttagcagcaaagctgagactgagggcatggtgttagcatccctgcgttgaaacactggtatcaggctagcaggcagaaaccccgggaggcagtagggctctctgagtctacccaatgcccatcctcaactgctttctctcatctacagactccgcatgcagcagcgcccctggctccggtcccagctctccaaatagcagctctggcaacgtcagcactgagaatggcatcgcacccactgtgcccagcgctccagctgaggtgggtcagcacagactcatataggccaagcaccccacatacctgccttgtacctgccttgtgcctgacagtccagtgaagaccaaaacataggagtactctgggaagggccttccacgtgtcattccctattgtcctcatcatggtcctctgaaacatgaggacctcagatcccataatatttgggagctcccaatctgcctttttcttgctctttctccaagtgtgtcacagaagcagatgtcatcatacacactgtgcgttaaggcacatggggcaagcaacagccatgtgagagcggttgtggagtgaaaaggacatttgagagatacacagattataacagccaagaatcaagggttagggaagtgaatgttactggtggacactaatgtgggagaaaggagcagaaaagagaagacaggtccaacatgactccagaacatggtcccatcacactcactacatacttccccgagcaacatgcctggcccaggatgcagcagcagcagcagcagcagaggaggctgctctccaagttcccctgtagatagggaagatgagctctgaccaggctgtgaaggaaacacaggagaactcagactgccccaatggtgttgctgctacaggccaggatgtgggagaacacccagaaacagctccttgggttgagccagtattgttatctgttgtgtgtgagcgcagtgagcaggaaacttcttgggagctgctgtctgtcagctttcaggaacctgtgattagtaacagtgactgagttccttctttagcattgagaaatgagtcttgcccttccaaagagctgataggctcaggtgaagatacacaggcacagtgctttcttcgtgtcaggtttctaacccctttatgtctggaaagttagaaatgagggtcactgcaagaagtgacgttcactccattgtgcttggttccttttactttatacttatatttttctcatcattggtgttctttaaccttccaacttagcactttcttaggttgttacaagttttaacagcccttctgcaggactaagcttttatagctgaaacctacctgtaattagcctcagcgtacaaccagaaaactgtttcctgccctaggatgttaactgtgcttccctcttgttggtcatgggcccagataaatctgtgatgtgggcatttagatgtataacagctccttgtttgggtggagcatcacttttgtggttctaagttgtgtgctcatctttataaagcccaaatatgcaaattgagctgccacaaatcaataaagcatccagagcgtccccaagaccagtaaggttgctggcatttctcagacagtcattgtcacaggcagagctggtgtttgagtcctgggtcacatgtggacataccttttgaatttcacattctagaattggatgaacttgtgcctgagggctgctcatgtgttagctattcatggtagtgtccctggggaaccccagcagtgtcccaaaagcctgaagtgctggtagttaacacacctcttattacaaactgcacatgctcacactcctgcagagtatgcaatgtctgaccactggcccaggctcactgaggaaccccaacactcccaggaagctcctgcactaattttataccaagctgtaacctaatcctaaccctagctctgccaccaatagtaaccctaagcctaacctctgctccaaccccaagaagaacactaactctagtgacaaacctaccctaaatgtacctctaacactgaccttagaagtaacaccagtaatgacagaataataacctctaataaacagaaataacggctagcatgattatcagggcagtccctgacctctgtgtgttgatatgtacaagcccctgtgttcttttagctatgacttgcagcaaggtggaagccacatactctgctgccatcagactgcttaaatgaccctgtggctgacttcatgtgcttgggagccattttcttagggctgtttcttcccactgcattcagagtggagcctcacagtcaagagcaacacagcttttaaggcttccaaacacagactgcgaaatcaatctgcaaaaaaggacagcagtttataatcccatgaccacttggttcagcttttctgagcttttacaaaatctgtcagtttgatgacttggtaaatatgtttttcagtcactgataaaagttgagcattttttcatttcccttaaaatgggtgcttttgtcattgtctttattgagttctgctctcatgttaattggtctatgattgacaagttctttatattccagtctttgtttttcctgcgcattgcagattcctgtcatcatctacctttataagaacagggtttttcctcctcaccattaactttctccttgctttctgcttttgatgtcattcttgaaaaacttctaactacaaaaatattttaagatgtgttgttctaaatatcctacccatagctttatggtaagtaggcagattgaataaaaacaaacaaggtagcaggagcccattaagaggggaaaactcaggaatgggagccctgattcagttccggtggcatgctgtggtcttccctgcactggaggccacagtctgcacagtttgttttgcaccaggcaaccacacatcagcacctcatgctgtaagtgcccttgcagccctgggtatgctgcttgtattggaatgtctgtagtagactctgacggtcacaatgtcttctgtctacagacgagcttggcacacagacttgtgactcgagaaggctcagtcgccccacttcctctctacacgtcaccatccttacccaacatcaccttgggacttcctgccactggccctgccgctgtaagttggcctctgtgggtctgtgtggcatggggtggttgtctactccagttcccacagcctgagtttactggttctgcctttcagggtgcggcaggtcagcaggatgctgagaggcttgctctcccagctctccagcagcggatcttgttccctgggacccacctcaccccgtacctgagcacctcgcccctggagagggacggtgcagcagctcacaaccccctcctgcagcacatggtcctgctggagcagccacccacccagacaccccttgtcacaggtaagaaccacaaggagatctctgtggcgttagcagtttccttggcctcctgtagcttttaaagaaggctggaaagaacaactgagcccatacaacagtagaaactctatggctctctgtaatgtgatagctaccttagctgtggcaaaaaactgtgtcctgcttagaaaaatgaccaaggagtaccagtcagtgccagtggccctctgtttagcctcctgctctcccactgataggtttccctacagctcgaggaagcaagtgcatgaagtgcagaagtgaccgttgatttctcagcttgaggatgattgcatttagaaaaatacaagtttgagacaaagtaaactcgtgacatttacccagttaccacactttggagggactgtttcagaaatgatggcatgtggaatgtttctcatgagacacacaaccctccctattggtgacttggcccagttctctacatcatccttaggtcagtgggtgacttcttcacacctgttgcttcactcagaatcacagccagagcaatcctagaactggcgttgtccatgttccagtgttcccctgggccagcctctggttggtgtgttagagttcccacctactggggtgagttggtctgtagggcttggtattggtttcctgtcttgtgctttttgtccctagtatgcccttggctctcccaagtcagtgatctggacaggaacagcacttggtctgctgggacaccctcctccagctctgagagcagtgtctcagtgaccatggaccgctccctacactcaggccccttcctgtctgttctcttggaagccagggaccatgggcttcatcttcccatctatgagtgagatgctagcacagagtgacaaagtgaaaagactcagttcccgtaggcagcgtctgacacccagcagcccagtcggtgctgatctccaggttgaggtttttcctttggggttagctgggttttggttttggtttgtctctttattgtatttatttgaacctctgttgctgttttgatattaaatcttgctggcctcaaactcggactctcctgcctcagtcttctaagtgctgggatgtcagggctgtgtttgtgactctcccccagcactctatccagtcttcccagcaccccttctgatgcagctctcgctgggaaaggagcctcctgaacaggatttcctctgctcagccacagtggtccagagaggcccacgttccccattgtctagagtaatactgtgtgtagagcccagacctgtgaacattcaagccaaagtagtagggtagcatcccactacttaacgtggcatggctgtcatctcagcacgatctaaacacaacaccactgacaaatgggtcagctcttagcagagaccccagccttgcaccacagccctcttcccgggcagactgaccaagggaagtgtgtgaagcacacattcttctctgagtccttccacttctctgaactctgtctgtctgtcctgcagccactgctgccctgcaccatctgcatgctgtgctgtcactgccccggcctgctctctctgaagcccggctgtcatgcctctagggaagatctgattccttccctgtgcagcccttctttcctctcccagtgccactctgtatttgatacaaaatctcctgtggtagaatccactgaaggtcaaggtcttgacagtgcctgggtgtcagtttgcccctgagtttcggcatgtcagccgcaaactgttcttctttctggtatttggggatgtgcatgagctagaagagccatcctctggaaacgtctattggatgtgtggcaagctgatgctaggctgttgccatactttctggagtgctccttggtgagctcctggagaaactgcatcaatgggatctccaggtaactttactttctctgccctgctaaagcccaagctccaggcttacagcctctagctggaatcgagcctgtttgcagacatgtgtcataggtgcctgggctggcaggcatgttattttctccactggttactcaacagcatctctcccctctcttcttccttttcccctctgctgttttttttttcctccatattatcttcagactggtatctttcaggcctgggggcgctgcccctccactcacagtccctggttggtgcggacagggtgtccccatccattcacaagctgcggcagcaccgccctctggggcgcacgcagtcagcacccctgccgcagaacgcacaggccctgcagcacctggtgatccagcagcagcaccagcagttcctggagaagcacaagcaacagttccagcagcagcagctgcacctcagcaaggtgggtgtgtcctgttgctttctagagctagtcacctgcagccagacggggtgctccttgctgtcctccctcagcccctgctgaccatgagtggccaaaatggggaagggagaaaacagagcacacactctggtgcacggtggggagcctagggaggtatgctgttgtgtggagccttcctcacagcccatctgcacctgtaagcagtgggccgcatccttgcaagaggcctctgcatccttgtgtgggaatccacataggcagttcttttagggactttcttaagtcatttgccaagtagatctttaagcaaactctcaccaaaggcctacaactttacagtggcatcaagtccctgaaacatatttttcaagtcacctggcacctgtaactgtttaaatgtgggagttataccatcaaaagcagcttggaagcaggccagcctggagaggtctgtgtactgtcagattgtcagagtctctcagccccatctacaggaaaagttagtactgtgctgctggcgagcagggacagagagtttagtgtgtccccttcaggtttgtaagtcagataccttccatatcagctcagtgacagttctgcaaacagcccaacagcttttctccaagagaaatggaaatgtctcacagaaacctgtccacaatcctcttctgtactgctcatagcagccaaactgtggatggagcatctccagggtttatcctgtggtgacaggtgacagaacacacctaccgttgtcttggggtcatgcagcatatagaggctccaaaacctggctgtcagggaagtaagcctatcacaatcgcctcctgctatgtttcactcacaggaagtgaccagcttaggcctcggagcagggcttctcaaccttcctgatgctgtgaccctctaatacagctccttgtgttacagtgacacccaaccataaagttagttcatagctatttcataactgtcacgttgctactcttacaagtttaatgtaaatatatgatacacgggatatgtaatattcaagccctgtgatgaaaggatcattcgatcctcaaaaggatgcggctcacaggttgagaaccactgccttagagacatgaattaagttagtgatgtcaagtgctgcaacttgtagggaaatggaaacagctgtctgtgggtgtaacatttatgtttaggagcaatgaaaatgttcccaagttaggttatagtgatggttatacaggtctgtaaactactgaactgttcagtttaaagatgtgaattttagggcttatgggtttaatttattctccctacctgggatgggatacagtccaggacactcagtcggttcctgaaactggcagggaagcaccctgtgaacaacagtcaagcagagaatgaaggtggctcctcaccggcttaggagagcagcccatccagcatgtgcacgaggatgggtgcctgtcctaggcgggagggagtggcttcatgatgctgagcagaacagtgtgcagctgaaaactcaggatttatctatttctagaactttctatttaatatttttagatgttgattgaccacaggacactaaaaatgagaaaagactgagatgaaggcatgccatcactggtcctttgctttctgtggcttccctatggaggtggatcagggatgagagactgtcatggaagttgaatgcatgctcagagtggcacctgtttccaatccataggggcctgctgagccccacagtgagtcggtgtctcccatccacacccatcccactgtaatctctgctgcaagctgagagggccaggatcaagttggtttcccaagaaagttgctgcagaccacatacctagcgcaggctcagccaggcctctcctgcctgtcatgcacagtgatatcagtccctcagcccacagccctcatgcccaacattctgagcatcttagaagttgggggctccagacatcccatcatttacacagaaaggcatttgctgggagcgagacaggttcctgccaagtgtctgtactcccaggtgtcaaagcactttcatatccatccctctaatgccagcctaggcttattaatttcactgtgtcactacctgagtggtgtggtaggaggtttgaagacaggaaacacccattctcatgtggcacattcttgaagatgactttagaagctgggtaatctcactggggtttgttacgtgattgatttgtgatagcaaatgacagttgattgaaacgtttatacaatgttttcctgggacgcccaggaagacagtgatgttctctgtgctgcctggcaccagtgttcctgccctgctctgtgagaggctcacacctgagggccatctacttcctgcttgacccagtggggaccacggctgggctccctacccactgtgcattcagcctccatcttaaagtgccagtgctccaaagatgtgacagaagttaattactcatcctagcattgtgttttcagcagtcatttgtgactgttgccatttttccaagggacaaaacagggcttctgaactggctctcctctggatttcttgggattggaatggtagccagtgtacccacctgggtgtcagctcctgacatgagtgctgtgtccacattaatgtacttcataaaagcatgctaggggagaaattgcccagggaaagaaggctgttgagggcagcagtgtagtgcccatcctgacagggaagcacccttttgtattgctgcctccttatccacctcaccacagccttgttttgaaaagtcagaaattatacctagaacatcttccccatagctgaaagcagttcttgcagcaatggtgggtctacaagatcacttgctctttgtgaaggccaagcgttggcctcactgagcctcactctcttttatatatgagaacttggactgctatgggtggtttactatgagcatccaatagttttaaatgcctgtgcttgccagtggggtcctggcactgaactctagtctgatgttttactcccgctgttctggatatggtagtgtgtgtgtgttcatcccttgataaaacacggtcctggtgtcaagaggcctctggacaacaggaactgacatgttggcaagctactgcttgcctccctactggcctctcttgttatgttgcctgaggccaggtttgcttccctaagccagctctgcttgaagatcccatctctgtggccacaaagaagcaaagatacgttcaaaggggacagagactcctgtgtgactatagctcatgaagtctagttgcaccagcacctgcatcagtactaagcagagtggcccagcccctgcaggccatggcctgttctgcatcattggcagggctctcagtggcccttgttgccatggcagcatccctgatagacatcctctagagggaggcctagccaagctgtggccccttgagagcctccctgttccctgctccctgttctggagtttctgtctgcctatatcgtgccaaagctgcagccctgcctgtgtagtagcatcagtgagctctcatactgtcagcaatccgtacccaacttggagtgaaaacagggaagtctgggcctccccagcatcaggcacagctaggagaagccacaaccatgtactaatttgagcactccctcccaccccccaaacttccccagaggtaccctcctcagccatggacagtcgacattgaggtgacaggccagctaacaggagcccagggttctaaggggacattgctttcccttacgtgtcactttcaggattcctgcctagattaactaggcagactccagcctttaggaatgttgaatgttgtccagagggatactttgaactgtaaccttaagaaaaatagaaggtactcagaatcataggtggtacaaggacactgaagagacatgacaccaaacagaaaacaggacgtgttcaagccagaaaggatcacagaagttgttagtggatatctgtggggccataagacagagactgttgttgtgagcatcatgagactcagctgttcacataaaggtattgggaggaaaggctcctctgtctgtttctcctttagccaagctgtagatgagaggtgaatggcatgcatgctcttctgatatctttctccagtgttgagtaataaacatgttaggaatggagcttgtctgcccacagcacacttacactgcctcctcctctcagaagacaccctgcacccttcctatgacagcttctacctgtcatggcctactttgaacagttgctttgttttctgagtgccaccctagctagagtagggagggacctgagttcaggtccatcatgggccactatccctgggcacttataacctcttagagctgagtcaccttgggcaggtcagccatacagcggtgatacctttctgcctttcttgacccgctcctgtgtgtgtgtgtgtgtgtgtgtgtgtgtgtgagagagagagagagagagagacagacagacagacagacagacagagagacagatagacagacagagacagggaaagacagagagagacagacagacagacagagactgagacagacagagacagggaaagacagagacagacagacagacagaggaagggaggaagagagggcctctgtcgtgctctgactgcttgagcacctatccttctaggcccgcctttctacctctgcctctacttatgcctcctgaaggtagccatccctggtcctgacctgctgtctgcatcccagtgcttatacttcaacttttctagcccgactgcagcttacacttccctgccattctctacccagggcctaaaggaagttctttgagccctctgccatgttctgagccccgtggtctgtctctgcatccatagccctgttgccacctcttttacacctatgagctcctgggcaatgatagcctgttccagaggccctaggttgttcccagccccatctttcctcttgggtcctggctgtccctctgctataactccctagcaggtgaaaccagcttccccagggaatttcctttatgtcatctaaagatactctgtcacttccatccctgccatagccctgaccctgacctgtctcagcaaacctgacatcagacacccagttcacctcattctgttaccagttacactgcccctggtgcttgccagactggtgtcagttgcccttccccttccccttcccaaaatcagagttaggagtttgggatacccaggagtaaggtgccattagcacatcacaaactatgaaggggagcaaatacttaacagtgcattttttatgaagcctgcctacctagtcttttgccatcagctggggagaggcttgacagctcactaaggtgttatgggctcaattcgcctagctttattgaggctgtctacagtgtgcagtgtgctgatctacatatgtacaatatgacaacctcagccatgccagttcacatgtctaggacttcactcagccacctcattgtatgtatgttcgtactcagcatgcttaagatacaggacaagtgccaccatcagcatcccgtgtcccacagagctcatcaatctggtaagaagcagtgccctgtggtcagtgtctccctggcttcctcctctctgcttcgagtcttgaggttttaggaatgagattccctgagcaggttaggctttcagaacataactggggaagtcttgatttcacagccatgtggtagcttcataaaaattagctggggagcttggcaccaccagtactgtcccccacagactgatggtatgtcccaaagatcctttctatttgagacttccctaagcttccagagaggcagcttctgagaacttcttctggaccctcccaagtcttactgggttcttgccacagggtacctcacatctgcttctgttgctcttctccagccacagtatgtcctgctaggtggcatctaaggaggatgttactcacaacatctgtggcctctctcgagcttacctttactcacctctgcacagtgagctgacacttgcaaccttagtttttcctacctggcacacagaaacactgcatgagcactgagtacctagtatctgtctgcgtctgtctgcaggccacattaccttagtcctgagcatcatttcctgtgtgtctcagataatgctagggcccatgctgtctgggtaaatagtacttgctggccctggatcatacaaatgcagaggattcttcaagtcccatgactatcctgacttcctttgtctcctccgcattgcagataatctccaaacctagtgagccacctcggcagcctgagagccacccagaggagacagaggaggagctccgtgagcaccaggccttgctggatgagccctacctagatcggctacctgggcagaaggagccctccctggctggtgtgcaggtgaagcaggagcccattgagagtgaggaggaagaagcggaggccactcgagagacagagcccggccagcgcccagccactgagcaggagctgctcttcagacaggtgtgggatggacagtagcccctcagcttctcctggcctctgagtcacacactcactgttctgaccctagccatcttactgccttcatgagaggtgggctgggtttgttgtacactctcaggtacacgaggatttgacacctgccctcggaaggtgtgcatggacttctcagtcatccagcctgcactttcctctggtatgggaggctgtagcttgtaaccccaaaacaagtgttggtgagattcagcataaccactagaactagagcagagcaggggagttggggtgttaatcagaaaggagcggggtgtgatggtgcgtgactttaattccaggactagagacgaagtcaagcagatctctgtgagttcaaggctagcctggtctacagtgggttccaggcccaccaaggctacatagtgagaccatgtctcaaaaacaaacaacaaaaaaaggagtcgaggtctgatgagactgggaccctaggtgctgctgttgtagtaaccatccttccagtccagagcaggcagtgagcttcagggtgcagtaacagtagcagactgccagagactgactggtaattttcagtgaagaacagacacttgtctagaaagccctaggttagaagccagggagcccccagagaagttgcttttgtctcaggagtaacaggtgagctaggggatccagagttgtactcccaagaagcagtacctgagtactgttctcggtgtaggctcataggtataccctgcttgctggactccaggattctcctagccacgcccctcctcagtccaatgacactctagatttagcttctgcttctctgtagcacttggttagtccagaacatcagggttcctccagcaagcacctgttgactttcattctcatatggttcctggaacagctggatagcagtcacaccatgagggtggcttagcttctcctgaatatctcctttgggaataggctttatagtctgtcctcacacataaacactgctctttacagtctagtagaattcacagagggtgacaaatgccatcagtcttgtgagccaggcacttggaatagctcgtggccagaactgtccactccctcagtctaagagacacaaagggacatgggtgtgtttgtcatgtctggagtagaccctcttaggaagccagtacctacttgccgttgttgaaacccagtattctgttaccatacagatgtacgtcagagtatttcagtagctgctttcggtactgatgtcttatagacaccagatgctccaagcatgagacagttcttaggagtcctaacttcctgtgttctctggagaataatcaatgaagctctttcatggggatcacaggcacagaacagtttgtggaaatgcacagagggaatatcactcagagccagcctgggccccatggagatgcaagctggggaggctctgagccttctgcttcggcctgggtgttcacagcctactagaggtgccctgcctccctactgtgtcccagtgtctgcagttcccctcctgtctgcaaaaaagttcctctcctctgctcacagctcagggtttgctgtgtttctcaggagtgagcattttccataagatctgttcaccaaataggacttgagatgaagtttgtgggtgtgggctggagttagattgcctttttaatatgcagcagtggcatgggataaaatggcttcccttttcagctctctcaggccctaggaagtgttcactactgcctctggccaggccaaccttggaaatctcctctttgcctcactctaccgagctggcttacttcccatgaggacttgcacctctgccagtccctagattccctatcagggtctacatccctcagggtgctaatcccctgggtggtgaccccatacttctcagacacccacccagattctatctcccccacagtatgtccttgccctgggcacctgagctcttagtagcatgtcccttcatttctctcatagttctgtccttcctagcatgagaatactagatggtgagaggccagggtaggaacacagtagataatatagagctggcccttctgtgtctgttttgctttccggccaagtttggtccacaaattagtcaccctttcactaccagaagaacctgtggagagagggatggcagtgtacactcactgtcccattctcacgctggccagaatgattctcccagccaaggacctgacttctgtccattaccagcccctccactactgctcaccatctcttcagagaattcttcccaagccccacctggaccatatctccctgtgggcctttgagatggcaattcccctcatccttttaaacggggcttgtatgtcaaatgccttctcctctatgatcccactcaggtcatggcacatggttaggagccatgcatccatggttagttgtcccatggcagagaggcctgtcagtggctaggggagactatgtaataagtatctctgactgttgggaaatggtctgtactaatggccctctttcctgccttgcagcaagccctcctactggagcagcagaggatccaccagttaagaaactaccaggcatctatggaggctgctggcatccctgtgtcatttggcagccacagacctctgtctcgggcacagtcctccccagcatctgccaccttccccatgtcagtccaggagccccccaccaagccaaggttcaccacaggtaactcatgacctcttgcttggagtaggggataggatgtgggggaggggggctgtggaggaagccactaatgagaggttaagggaacagcctgcagctgtccagagacaagcagccagcaccatgccatgcctgagaaccactcagtcatggggcacaccatggtcctcttattctggggctagccaaaaactcagaaaaccaccttctctttcccctgaagaaagcagtcccacctgtgtgccagcatggggcttcccagccttcattcttgatcagcagcaatagcagctttatcttctgcatatattctcctataccaagcctaggacatcaacattgccaggaggctctgtgacaccctgtacaatggttagtggaaactctgctggagcagagcagactctggacctctctccccctctggcattgcacctgccctgtggactggaagtagtgtctcagtgccactttagtttgctccttaaaggtccagaggtctagggtgagctcaacagagagtgtagaccacagctgcaaggacagagattatcttcccaagatgaccacaccatcccttccaagagttccctgtggtggcaagcaaagaagctagggtgattctttgtattattgatttaatatttctttgtaatgaaatgaagggaaattccataaatccttcataggtcttataaagtgtcttgaagaacactgcaactatagtcatgttcttttcttagaaggaaacttcctattttagggaaaagtttcagtagtaatatctcaaaattaaaattacctaatcaatcaatcaaacagtcaataaaattgcacctctgcatgtccttaaaggactgcagctcagataagggaaactctgcaatgataacctccatggcaacttacatgcaaacagtgctcagtgctacagctcatagtgttctctgtggctggtcagaagagaccttctgtttgtgcggctggctcagctctacagtccaaagctacaggctgtgttcatgtacttgcttgattcacatctgcatatgcatctcacataaaaggtccagttctctttgtattcttgtatacatcttgagtaagcgggtacacgccacctctcactccccccagccgcacccccccccaagttgagctgctctgaattggcaagccacaaaacccattcagacccggaccacctggtaccttggacagtgcccacctaactgacctgcttgctgcagagcctgggcagtgactacgcaggcaggccttgaggggaccaacacctgccattcctagaagtcagtgtagcacagaggccacccagacctcagtgccattgtcttaccttttcgcctttctatccataacttggccctatggtgtagccagtcttcctgagctgcagtgttggccagtgctgggtctctctctgactatgcttttatcacgatcctctcgtaccagcttggaaagggggtgggatgaacttgaaccaagaaccagttctgctctgttccctcctaggaattctgctgctatcttagggccaccttctggcattgggtggctcagccctggggactactctgacttagctctgctccactgtaggtcttgtgtatgacacactgatgttgaagcatcagtgcacctgtgggaacaccaacagccacccggagcatgctgggaggatccagagcatctggtcccgcctgcaggagactggactccgtggcaagtgtgaggtatggggtctatggggacagagaccccttccaccttgtttgtgccaggacatggcctccagcctgcagtattcatattctctaccagtctgtattcatgttgtagtaagggagagggttcaggaaacattgcctatgtattctcatctccatccattctgtctgtggccttttgagaagcctgtcttggttccttttctattgctgtgatagaatacctgaggcttatactttataaggcaaagaggtctgtttaccacctcacagttttagtagctagagggtcaaaaacagagtaccaacatctaatgagaatcccctgactaagccacaatgtaacagagaagcagaaaggagacagcttgctgtgtgagctggcttttccctgtgacagcctgttcatttgagaactagtttaggcatacaggtctgagccataataacttctaagagtgaagtcctcatttcccagtcaccttctgccagatctgcagtgccagcactaccatattgggtgtctagcctcttctccatgagctcttgagggcacattacctgcttccttaagattcggtgtcttctacagaagatgctccactctgctctgttctcaaacccacatgccaggccgactccccttggctgtccctgccttcttcctagctacttctcagctgctccctgtggctgaccagtgtgtacatccatgcttatgaagtgagggaaggatccaagacccagagtgaagaccagcccacatgtcccaccagccctgtcggcttcatgagcccgtgttctcctgttgtacgtatcagaaaggtgctctggggatatgcggagaactctggaccttttcctcctcagaaggaaagttctgtgaggcagtagccagtatagaaagtacccctcagcctggttagctttgcctctggttcctttatgccagtgtctctacccaaggagctgtgtggcagacattgggttgtcactctgggtattggtactcagtttccccaggtgccatgcttgccctcagcagggctggcctacctgccagtgggtgtagtgttcaccccatacctggccacagcagagcaggtcacatagaaaagggctctgtccaagatcatgtcaggcctctctgggttcctgtgtcatgacacagcaggtatgcattcccaggccctgtgtactcaggagtcctaagctctgaggagaaaggatgaatttgggtagggcagagacagagaccagggtcctgtgcctgggagctgttagcctcgggtgagccttcgttcctttccctgtgccctaaggctggcatcacctacctcctaggattgcctgcagtacctgccacaggaacctattgtgtcttctcctcagctagaaaaatcccttcagtcctgcacatcagtataggttagggcacaaggaacctcaaaggccagtaaatacctcatggaacagcagtaatttctgttttctctcagtgggctcacctgccttcccttatgcactggagaattcagagtttagatttagcccagggctcacatagcccttgactcccttaccacccgtattgtacctcacttttgaggatgtctcagtatcaggcccacacctgcttctgaagtccctctggatagaagatgatgaacaggggtgcggtgaggccacaggcacctgctttggaagtctgtccagaatgctatgccactggggggcagcattgaccagtgtacacaagtcgtgagaaaaatctcctctttgttgagctggccttgcaggatgaactaaccattctgtgtgtccagatgttgccctgaggcagccttcagttttcagcattcatcaatttcttgtcccctcccaggaaagtacacgcaggcagaaactgtgaggcatattctcagccaagaaagcaggtggagccaggcaggggtaagaacacaatagataaaagcagggtagccacatctcctcagtccttactgcctgtgtggaggcacaagagcacagtagccagctcctagtgcagcacagagcacagtgtgtcaccatgttcaaagtgtcccacaaagggctagtgttgaggggatagtagagcagtggcttgaggcccctcgagaaggagctcaggcagttccctcactttagatacttcctgctatttttaagcccagaccttggttttagaaaacaaagtaataatttattgaaaattattgtgtgacagtaaagggggtcatgttaaaaagcagaattctctttttaaatgtttttcaaagctatgattaaaatataagccatctacaatattttgaaatgtgatgttatgtgctgttttgttttccacttttcagaaagtcagtaatgatgtgcctatccccatattcaggttgcatccctctggggcagtggccttgtcatggtagatagagctgacacagaaacatgttctccccttgtgtcccacagtgcatccgtggacgcaaggccacattggaggagctgcagacagtgcactcggaggcccacacactcctctacggcacaaatcctctcaacagacagaaactggacagtaagaaacttctaggtactcgagacctccttacatccctaccaggtttgatctgcaagtgatgtttccagcccttggctcctgctggccaggacaggaaggttggctcccactaaggccacggcgcagagaagcctagagcacagtcagctctggaagctgttcaggaatgcttacggccaggggtacccagcccttgccctatttgcagttcctttctaagactgctgaggggaaggctcagagcaggcctggagagtccctggcctggccacactgaagccattggttagactcgggagctgagtcttgcccctgtcagtcagcactcctatgggcaggttcttgctagcagagactcatcctgcatcagcagaaggggctttatcaaataaaagtaggctttgacaaactgtggggccctatgtaatcccagagtgcactctacatcaccaacctggcttaccccacagactccaactgctcagagacagtgatttttgcagtgatccagaactacaggcagtagaaacagagacagagctagagtttcttctggtctcttccttgagactctgacttcaggtcgtggtcccacaatgggggttcttgggctgcactaagcctgtctccctctcaccctctctagtgggccctttgagtgcttgccttcaccctcaatcaggagacaggggacccctctgcgggtactcagccagtccaaagagtactgccagtgagggctcccagcagacatgttctccaagctcttgatgctgtgctcacacagagcccttctgtggtgtagcctggtctagtgatagtaccaaggagcagatgggagtgggatgggtttatgctagaatttcagggcgcctcttgccagattacacggacctaggagttagaccctggcaggcagcaatgaggaagtcttaagagtgaatagtagggcatggcatggggcactccacagagaactggggtgtgctctgcctccctcctgtccctgccacccaacactgttactgctgccaaataaacaggagggcaggcctcttgcagcctaggagttccattccttagcgttctttctcagccactggggaacactgccagcctagatgagatgaagccagaagctgctcagcagccagaggacagccctgtggccccatgggaaacagtcagagtagcctgggatgtgtggtccaggtgctgtctgctactgacccaggctggatgcagggctatcataggtcttctgggactttcactcttcaggccatgccttttgttttgccctctatagcccactgtcctgcacatgggacccttggctatagagtactctccacacaggagcaggacagagccagctagacaagtgccctcctagactcaagccattcctcagccatcccttcctcaacccaccaaagttaccaacctgaattttttgaattttaagctagtttcaaaccagaacattcatagaactagatgtgtaccatgtggtacagaagtgtctgtgcaaggcttgggacatgatcactcagtgcccaccagtcacgtgaacactgctcctcagctcatggccagcaccgctctcctgaggcccatttctgccagggtctttttcttttatagactatttccccatgccccacaccctatactcacccctgcgtcccagcagctgtgtggtggactctgttgctacacctgtgtcgctggacgcagttggtgcccatagctcactttttccttcctgctaagcttcgcacattgacactgcagaaagtacctgctccatcaccacctaacccccaagacccacgcttaagtttctacagcgtcctcaccacagacctacacaaatgtctttgacctaagtacttgaaacattgtaatagcagttatcccaagccctgttaacatagccctaattagatgtttaaatactgctgtgcttttctttcctttttcaatccacacgtttctctgctgtgtacaaaggccatttgtagttcttcactgatgtgcctttccacataggactgaagtgagtggcaggtgtggtgggctggatgccatccctagagacaaggaggggcctaacagccgtgctggagaggagaacctggcgtgggtgactctaaagcaggctaagcagacctctgaaagcctggctctcacagagagtgtgagttacctctcctacctcatccacaccctaaaacatcagccctccttctgctgtgagtggacatagtccttaaggctagacgtcatgcgcgttgtgcagcctgattgaagcagttgtgaccccaaaccaccaacagctagagctaggctgtggcccaagctggcatgatgacatgaaagataatcagtctagagcagggacccttgaataaactaacaatagacacccaagctcatccttgtcatgaacaggatgccctacctcctactcaagtgtgctttctgtgcttaatagaggataaagttcccttgtccttttttgctggctggattatgaacatgacaatattccagtgattgacatctataacatacacagtgttggctataatttcaaagggagatatacttccatagccctggctaccacataagcagtatgcatttcctgaaggaagtctcagtgtctgggcagaggagctctccatcccccacatggccaactcttaaccccctggagattcccctctgctgcaagaacctaagtatgcaaagcttaaaacatttgaatttgttgcccacctctcactgaaggaaagatggatttactgttcctgttctgcctcccatgtttttatatgcaaataaagaccaagacctggacctaggctgtgggtgttcgtccatttaaggagaatggcagggatagtaagaagctggcccaggcaggaaccaagtgccctagccatcaagaaacaataggaagtggaaggccacacagagctgtgaatttgaggactcatagtagcaggaaatatgcaggcatgtccttgttcctgcactgtccataatggcttagtgcatttagctgcaggccaggagtgggcgagtttactcagatccatgctaggaactccagccagatatgtaaacacaaccagcctcccctaacccctagatctgccagccctcaacagaagaggttctgttctgtaataggaacactgtcaggtacaaacaagctcccctacccacaagatgtatgggcagcatggtgtctggactgtgcaaggctgtgccaactcctcaggggcccactcccacctcctgtggctgcctacccataaaacgctgcttcctttcagactctggcagagccactctccttgcccttgctgcctggtggtagagtcttgcagcagagcctgtgggactctaagaaccagtcttgtcctagggtccacagcatgcttttcagactgggcactcacagagccagtgctaccctgatcttctgaccctgtccttctccccacaggctcgctgacctcagtgttcgtcaggcttccttgtggtggtgttggggtaagcatttctttaatgtgtaaataatgtcctgtttgttctcagggcctcagtggtcacagaaatcattgccttgctctctcgagtgggtaatggctgccaggtgttttccataaacagtactatggggtgggcggggccatctggggcttcaaagggactgagagcgtttttggttttttttggtttttttgttttttttgttttttttgtttttttttcacggaactcaggcacctttctttggggaaggttgtctaacaatgcatcttactaggccacagctcttacgcacctcatgtgtacactgtgcctcatggcgtacgttcacagcagtgctacatgcttgtccatacaggccacagaggcctcttagggaattgtggacttttcttgccacgctctagtttgtactccagatagttttctgtgcagtgaccagagcatccatgggtcagatgacatttgtaagacattctctggtttatggtggccttgcatttctataaccaggtgatacgagtagctagtcacttggagaacagactcagacacacaaatgacaaaaaactaggcagccgtcaagatatctactccacctgtgtagacagccttagcttgtgctgccaaattggcctcaggaggcagaggttctgcagtactcttgtcccctgggataagagagtgggnnnnnnnnnnnnnnnnnnnnnnnnnnnnnnnnnnnnnnnnnnnnnnnnnnnnnnnnnnnnnnnnnnnnnnnnnnnnnnnnnnnnnnnnnnnnnnnnnnnnnnnnnnnnnnnnnnnnnnnnnnnnnnnnnnnnnnnnnnnnnnnnnnnnnnnnnnnnnnnnnnnnnnnnnnnnnnnnnnnnnnnnnnnnnnnnnnnnnnnnnnnnnnnnnnnnnnnnnnnnnnnnngatcacagattgtgaggtgaagctgaggtctggattctgttatggaaatgaaacaaaattgttttcttcctgagtctttacagaaatcgctgctttgaaaattgccccgtcagaaagagaatgatggcatctattcatactaccaccaagctctcctggagttattttgttttgtattgtaaataggctgcaatctcttaattcagggcaaatttttggcccaacttgaaaagatttggatttgcactgccctgcagccagagggtcctgtgcgaggcagcatttataatttgcaaatgaaaactaaatgcaagctcagacctaggggtcaaacccaggcagactcctgcacaactaaccccagatctgaggtccaaccggcatgccaaatgaatgcaggcgtactgaacagatgtgaggggagcccatggggcccagcctgcagaagggaggcccagaggcagcaaggcagcccagaagctctgacttagtgtctctttgggtctctgctacagccatggactcagttttcctcccaagatttccagggctcgctccccctccacccactgaggtgtcagaaagagcagtgcagatgctatgggaaatctgagacctgtgtgggatgaggagtggggacctaagggcaggcccctctgtacctggaagcagcttcccattgccagttctgtcatatggtagttcttttagaatgtaaaaaaccaatccttattcgctctgttaagtaaaagtttgaaatacttttgatcttttttttccaaaccaaataaaaactcttctgttttgttcacctcattattgtgaacttgagactagtaaaggcctgtgtctttgacttcctgctcctgccctgccctgcctggaaatgtaggctggcttctgctggcttctacctcctccgactgcaacttgagcccctcattcccagggctcacccagatttgccacatgctccgttgtcagtattcagcttcatttcccagatatttctgtctgtacttcctataaagcactttcctcttgctcccgttagcatcaccaccctaacggaagcagctggtagacataactggggacaaaatagcagaaagtcttgccatgatagcagcctggaatcctggggtttattccttcctctctgcagaaaggagcttggtcaggttacagacactgacctgtgatgcccagagagtagtctacagagagtcctggaagaactggcacatgtcatgtgtagtcccttccccatgtcttagacatgctctttaataaagtcaagctcaagctggagagatgactccatccttaaaggctaggctcacaaccaaaaacataagagttaagttcccagaacccatggctgtctctccagccaccaaaaaagtacaaagaaaaaaataaaataaagctaggctttttcttcacacatgggaaggaaatgatcactgagcttatagcctccagcctggcctggacactgctgggctgcctaggacactgctgccccctgggggtcacaaggcagctggtaatgtctgctgcactgtctgtcacctttgatattataatgagccaatagtaaagatgtgattctccagccagagctggtctgcacaggactacaagccagggtctcggctttgaatagtgatgcctctcaggcattcctttaacatttgagaactatttaaagaatatagcccatgcttggtacccacctcagcaatatcttcacccatataaaagaggtttaaatcatctatttctgagagtgaagcttgtggaaagctggaaagagttgttccctctctactgatgatcagtatcagttagcagatggtgatgaaggtatacacacggacacacacacacatgtgcaagtgcacacatggacacacataccaatgtgattttaaagaatggtaatgtgttctcctttgcccaagccagtaagacaaatggttggccctgctttctgttttgagtggaagctaacaggccacctttctgttacctgggacagacctaagagttcgtttttacgccttgtgtcctggtctcatgtaactactctcagtccttagtaggcttgcagttaaattctacgcataatagaaccactcattatagtttctgttccgtttcattttctgattgttagcataactcttagctccagttccactttgcatggtaagggagtcagtaggttaggatgctcactgtcagcccaggtctgttagagcaagttaaaaggaaagggttactggtgggtacaacatgatatttctggtcatttgcttttatttgtgtgtttactatttggcacatctcaaaaagaaatgtgtgacagcagtgatagtgacacaggatgtggctcactggaggagtgttttctccacaggtggatagcgacaccatatggaatgaggtgcactcgtctggggcagcccgcctggctgtaggctgtgtagtggagctggtcttcaaggtggccacgggagagctaaaggtcagtcagcatcgtggagctaggccacacgaggaagtctgcccactgccctttgccctctgtgaggaagctcctgtccaggatgatgtggtcattcccgtgctgtgaaaaatgcgttgttcacattctgtgatggatctgtagagccctctaaccttcccagtggctgaggagcctagcaaggttttgttcatgtggcccatctcctcagtatcagcagtattaaaattaaaatgagaccttttaatggctgctggattcacacctgagttacaacagtgtaaactgatggagagacactgggataagacagagtcgaaagagagtattttgtgatctttgtgagaaacttgatacttctctgacctgtgttagtgttggcatatggcagatctttaaagccaatgcaatgtgaaccttgcagcctcctacttatgtagttgtctgacccacaggatgtttactgaaccagacagcaactgtcccagcacactgagccctagcaaaaatcaagtgccctcccatgtcagggtgcctctcgtttacataggggcaggcagctctgaaggctgagccccatcactggcagctcctgcccaccctcttcccagaagtaaatggccttgtctacttgaaaagtggcttagatctccccaaattggaaggccagaagtactgacatcattacaaggaaaatgagtatcctggagaaaagagggactatctcagttcacagtgacatgcagaaaggcttcccagagctagcccatacatggccttccaaactcagaaccaccacactgtcttcctactcaccacagtgtgctaaaggatgtgggcctgacagtggaagcttgtatgcactgtggaagcttttcatgaggatgttcatggggaaatgccccttgggagttcatctgcgctcattgtgaatgctgttatgtcttcatgccatgctcagctgctgctcagcaccatgcacacagttgtctgctcaatgcaagaggcaggtgggatctgagatgtgttagacttaactgcttgttagaagccagtgcccgggactcaacgcagagcgcagacacagggttgaggaagtgagttggcagtctgtcttttaggtctgcttcccagccttaccactgccatgtcctgtcctaaggagccagcttagcagtccagcacccttgttagtagtcagccgacttttttgtgctcagttaaagcttcatcacttcttggtgttggtgaagagtcagaggcctaattgagtgtttttacagcagcagtcccaggggtgtaccgttggttctgtaaagtatgagcagcggggagctggttatacaaccatgccatctagtgccaactctgtagtggttcttcagggtgggaggagagttggggactgtaggagctgtctgtttccccaacagctaagctgcagtcaggatagaggtgagtccaagacctgcttgaggcatgacatggatctagcagcaccctatatgaacattctttattctttttaagagaatgagaaaataagttctcatttagccaagctagcctctagctcacagtatagctgagagtggcctcaagttcctgatcttgctgctgggattatagcattcaccaccatagccagctttctttcatttgtatccttgtctgccataaggctgctggtgaacaacatgcaacaagactatcccagaccctaacccacacgccctccaatggcagccctgacccataggcacttaaaaacagaactgagggtctactctctgtcctcaggtcacatgccttaaaaatggagccagattgcctgcaaaacaaggctcagctaaccccattccccatccatatcgtgactagtagtaatggaaaccgcatccttctgtgaattctgaatatagtgactttcttgtggataagaaatgtctttcctcactatttcccactgtctgctgtcatctgcagaatggctttgctgtggttcgtcccccaggacaccatgccgaggagagcacacccatgtaagtgggcaagcaggctgattaaaagcatgggtaacagggctgggtgagcatctgggggcccggggaggaactgagtggccttgtgcacatcacccagggtgtattgctttgtctcctctgcccacagcaaacatagacatgtgatttgaggcccatgcagttggacgaggagtatgggcactgccacctgttagcttccccagtgggtgtatcagaggtggttcaagtggtaaaaatgagtatgacatcagggaggctgtgccacagatgggcgtggtgatggttcccgtctctagcccacaggaatagtaccattcacatttttgatgggttttaccacctttttaaccaagcaggataattgttcagagccttccccagaggctgacccagttagatatattctagataatctagattctgtcaagtcaaccaatattaaccattaacagtgtttgtatgtcttcagtgtgtgtgtgtgtgtgtgtgtgtgtgcgcgcgcgcatgcgtgcacacgcgcatctgatctatgtatatgtgtctgtgtatatttgtgctgtttgcatgtgtgtttgtgtatgcttgtatgttgtgtctgtaggtgggtgtaggcacttaagtgtgcctgtgtgtatatctggggttgggggaggttctctgtggtgggtagatatcttctgtggtatgtgtactcatataacggtgtatacatgtgtgtctgtggaggatagtatgtgtgtctgatgggtgaatcttacgtggcacatgtgcttctgtgcctgtgaatctatggcatatgtgtatttagtgtggcttcatgtgtctataatctgttggtccatcaccaccatcacttgaggtccgcagaagaaccagctggccttcccctgaaccctcatagggactttagacaatgctctgctatgaatggtgtaaaaaacagtaactaggtgtctcttctgcaggggtttctgctactttaactccgtggcagttgcagccaaacttctccagcagaggctgaatgtgagcaagatcctcattgtagactgggtgagtggatgcctcattagccagttctggggagagcatgcatgcccacctgtctccccagtggacagcctgattgagcactgggccttgtcctgttgatacttggaattgaggaactgaactctctggaaacagtctcagagatcagagaagcctgcatccattagaagttggtttcaagactttggccagctgatcctaacctcatgggccctgacctgcaggatcgtgcccatagtgaggattgccaccatggctggtcctcagcagtgtctctaggaagctggagaatcgaaggtcaagttcaacctttctctatgctctgacctggggacatggacctggactgcccacttgtgctagctgaaagtcacaccacacacatgactaagcctccatcttcctaaatgaacagagcttcttataaccccactatggagtggctgatttttctctgagagttaagccaaatgtcactgtcccatgagtagacaggtgttgaggtgtgcctgccagcactccttagttacagtgcttacgtgtcataaactccaaacaccaggaaaagaggcaatctgggcttctgccaggctggatcaccctggtcctggctgagagaagtggtcttcaggacatgcgtgctgggtagccctgttctacagaattatatgttacatgaaaagcggtaagaaaccagtggttctaatatatacctgcacacagaaactctttagtactgatgtctcataacatcctttatactaagcccacatcaggttgggacagcatttggatttcaagcccttctcagtttcaaaaagaaccaacaaaatataaaccagaagaacaagtcaacttgggtctggaacagggcctgagcaaggcaggaaggttgtagttttctacaccagtgaacctgtcccctcctccatcctggcccttccttagggaacaagcagagaagtggcaaaaacaaacaaacaaacaaacaaaaaacagaagtgccatgcagttggtggctacatagatgtgacaattatgttctgggaacaaggaagtcagcaggtgacccacatagacagtctcgtcttcccagggctgcaggacatgctccccagggccacactttgtcttaaaatgcatgatggtaacacacatagatactactatgattcatttacagtactcatccacttactgtacagtgttaccaatggttcctccttccaccaggaacctggtgcgtggcatgaaaggctcttgtgtttgtgagcgctggggcatccatccacagtgtgcactgagcacagatgaatgaccctgtagaaaaagctttcctcattctctgtctctgtctctcttcctgtctgtctgtctgtctctctctctctcacacacacacagagagagagagagagagggagagagagagagagagagagagagagagcgctatgcagcccaaaaccacctagcctgcccatcctggaaactaagtcccatgacctacaacagtggccaccggcctggcagaaaccaaagctgcctcttgataaatgtgcatcaagtcttaagaaaagagctggtcattttcttttcagggtggggggtcactcatgaccacctagggtcaactgccacatatcctatgtcagtcgttctcaatcttcctaatgctgcagactttaatgcagttcttgtgttgtgaccccccaattataaaattattttcgccactctttcataattgtaattttgctagttatgaatcgtaatgtaaatatctgatatgcaggaactctgatatgcagccccaaaggggttgcgacacacagcttgagaacagctgccctttgtgacgtgcctgtaagtagccaacccacaattagtgattatccttaggaaatggctcacttaccacaaataaggcaggcatgtgagattactcagatggctttgttgacatagcagcctcagctcagctagaagcctaaccccatctatccctttcactgaagtcaggactacactatgtgctcagagttactcagactcttgcctcagcatttctgtaatgctgcatgtacccacaatacctgaccatgaggtgtaccagagattccaggctattcacctagtaggagggtcgaactcaaggcctgatcctccctgagccagttctcttgttctcttaggatgtacatcatgggaatgggacccagcaggccttctacaatgaccccaatgttctctacatgtccctgcaccgctatgacgatgggaacttcttcccaggaagtggagcaccagatgaggtatgtggagtgtatgaaactttgtgagtatctggaggagaacaagctatcttggagccagataccacagctaccaagagaaccaggcaggtgcaggccctgcatctgccacagaagtagtatttcacacttgttacagctcaggttgccctgccagaaatgctagcctggattatcctgtgcatgatttaggccagaattttttctagtttagtgggaatctgcacaccaaatctggttacattcagagtgagcaaagcacacactaagggaggttgctgagctgctccccaggactcctgcttctctaccttgtgatgatactcccagccactgtggttagggggcatctttaagcagcatgcccagggacacagagcttgcccctgaagatggtcccacagtagagtcacttttgtctttcagtgattcctcctagttcagggcctgtagataactgcagccctgtgaaaactgtaccgctgacgacagtgcctggcactggtagccagcttcactggtgagctcacacacatatgcacgggacatgtagctatccctgtgggcacgccagtccaatccaccctagttcaagtgttggttgtgccaggtattctcttgagttggtgacagtttctctccttgtggccgcaggtgggcacagggccaggcgtgggtttcaatgtcaacatggctttcacgggtggcctcgaaccccccatgggagacgctgagtacttggcagccttcaggtgagtaccccactgtccaaccacagaggctggttcttctgagtccagggcagccaagtcatctggagactctggagttaattgttgtactgcctcacttctcttaggagttcccttttctgagagcctgttgagtcccagtggtaagatggggaggtgatagaaggggaagttttctgctgtgctagaaagtattcatgagtcactgaaaactgaggatgtaaagatctcattccctgctcattattccacaaaccctttgtaaaaggaaagtggaactgaatgaaggagagcgatagctcacactacatcgtctgtgctgatctggtccctcacactggctgctttttacaaagtactgacttccatcctccacagttctttttattaccatcaggccagactgcagccaacagtggatggctgggccccgctttcttcctgtgttactgtggcagctttccccagccattgtgcactgtggaggctccagacgagttagccatagcccaggagtagttcctgggcctgcatggcccgtggggggccttgggtctcaaaatgcactttttttttgtattatggataagaacatcaacggacctccaagggtcttctctgcctcttctgtaattctggggtcatgtcttgacctctatacatatgaagtacatatgtacaggcaggtgccttgtgtgtgtgtgtagatatatgtacatgtgtctatgtgattctgagtggtactatgtatatgtctttatctctctctctccctccctctccccccccccccgccccgtgtgtctgtgtgtctgtgtgtgtccctgtatatgcctattgctgtgtgtttatatgcttattccgtaagacatagatctctggaggtttgagcaagtgtgtgtgcatgtatgcaagtgtatatgcccctagtcagtgagatgtgtccgtaaagtttatatagacctgccatgtgctctttagctgtggagccagtctcagggcacttcccagcatctgcttgctcattttgaagtaggttttcagtcccacttctcattggacaggtggttgggatccagtatggtagagtcctggccgagtgggtgagagttgactggctcatcagtagttcctagaagtgacatatctcatttgacacgattacaaaggtctgctgttcagctgttggctaggtgcaggcagggatcgctcaggccttagaagcttcatgctgcctatgacctgctcctctcctcttatacctttggttgaaccacattgatctgtgctcacctcacttacaaccctcccctaaacactagaaagtccatggaagctgagcctgagagccaggactgtcatgcactcgcccaatagcactgaagcctggctctctcctcagcactggagatatgatttatccgtggtaagagagaaagtcattgcccagtaagcggcctttatttctgagtggatgctgtttgcaggtcagggcctgtgaaggcctcatggtggctatggtacagaaagaagataatactcttgatgacaataaatggataccctccactcatcagtccttacagctgagtgactgggccggccctcatcccccaggccttgtgcttcacagggggaatttcttgagtgtgcctgcagttctgtggtcctgggccccaagtctgatccctggtgtccctggccaggtatgtgcagtgtctgaacttcctggccggcctttgaggtgagccttccttcctcaccctgacatctgttctagtgtttggaaagtgtatgaatgataaccccttattgagagcgccttctaaagcttcaatcgcttctttgaaaagggaaattgtttcaggttgtctttttttttttttttattgattttaatgtaaagtagcactttgaagttcacaatttatagttccctgggcatcaggtggggaagggggtcagaggctcattctccctttcttcttcagtctccgcctttggggccccttgggacaaggcatgcctcaaaggcagcaccttgttcttcagagccctctcctgccaggtcacattttcaggggatcaaggctccgatgaagaaaagataagaaaattgcccctaatgagatccagaagtaacgggcactttctcctcgggcttagagacttatgagagaaaaggaaccataattcaaaccaggccccaagccagacacagctttgaagttgtcggagctcagtcagagcaccatggactgggaggtagagtgatacgctgtccttagcctcctggacctgtctgcagtgacagagtcatgtgtcatcaggaagcttaacaaagatgtcagcaatgtggtcttctgagggtcatccataatttctcactgatgagacactggcctcagactacaaagcccagtacccttcagtgggccttcggtcctcattcctgtctatagcctgcttctgttgatgccttctccaaagagctattcgggtagtagtaagattacacatagcccttgtgactacacactccgctggtaccacctgtagtcaccactgccttctgaatggcttcatgtctgagaaacaagcactcccagtgtagaaatttggtcaaaccatcaactacctttatagaggtagttgcagttcatcatggcatcccactgcttccttagatagaatttcagcaaacccagtaagtggtggtatgatagtcttagaagtcaagacaggagaagcacaaaggaagtccaatgaatcagcaacctctcttgatctgcttgatcccacagagaaaccagggataaagtttatttacatctgtgatgcaaaggttggctctcaaccaccaggggccctcagaagcccccagaggtgaggcccagggcaagcattatggggaaaagcatccccaaagaaattgcctgttcaccttgatcctggggatgctgttgagggttccttcctgctaaacaataagtgatgtgtctactgcggcctgggtaaaagacatggtcccaggataaagcatgtttgagtagacaaatccaatggaaagaagcctagaagatgagactacctccttaaacagtaacaagccatggaattggatggtgagatggctcagcagttaagagcacctgctgctcttccgaaggtcctgtgttcaaatcccagcaaccacatggtggttcacaaccatccgtaatgacatctgacgtcctcttacagtgtctgaagacaacggcagtgtacttacatataataataaataaataaatctttaaaaaaaaaaagcaatggaattgagaggaactggggctgatatgagtgtgggcactgtgatctccaatacactcacttgcaggaggttgagcagcaccaggccagagtcagatgtgcacctttgggtatatagcagagaatgttcttgctggggccatttctctagaaagtgtctgagttggcatttagtaatccaggaaagacaggtttggtgcattaggacagaatgctttaggtataaagaagtgaggacccttctatggttccttagagactggagctggatcagagagaaagtcagaccagttgaggctaggatagcttcccatgagcccaagccttagccagcatgaggatccaccacacacacagtctgtttgaggttttttcctagtttagatgagtgggaggaggtactgaaaaccagaggaggcccgtggaggagaaggcaagctctctaataacgggctgccagcccaggcggtttggggtaggcttgccatagtgagcatgtggcagtcagagtgaaagcaggatgtcaagacagggagtggaccttggtagcttctacgtgacattgacccctggggtagtgacaggactgggtggggagacacaggttggtgtcccctggtatggcagccatcagcccggagtaagttagagtagtccagtggctctccgcagttgatgctctggggctcccaaagcacaggagctaggagcacctgctctcatgtgagagcatcccctagctcttgcacttacttagtatgcatttcagagatgtctcctgtgtgccctctaataagacatgggatgtgtgactgtgaacccctagattatgcctggtactgaccttcccatgtggctagcaatgaacagtttctctgtgaagtgcagtttggacctgcatctgttcctggtgcagcaaccccacctttctccaagcaaggcacagtgcagacagatgtgggcatgtgtcctctgggctgtgcctatgcatgagagcccacatgccacagctgcagagttggggtgactggtgtgaaagcagggcccataacagtactgataatgaaggtggcctaagctgcagaagagacattcatcacacaacatgtgtcacacagcatacatagaatcactccatatgctgtgctcacctgcagagaagccactgtattctgcatctgagtacctatggggacccttattccctccccacagcaagggatgaacatggtcacatttccaaccctgtcagagctctgctcaccttgactcatttcttcttccttcaggcagatgataaattgatttgttgtctcaggaagctttgcctccctgccctcaatctcaaattcacaaatacacacataaatgcacaaaaggatagaaaggaggctacaaatatttgatcttctatttcagaaacaaggttgatgctttcaaagtttattttgggaaataaaatgtaaactcagtctctccttttcttagagcaccagttaaatagggccattctttgaggttctttcctacaaggatcctgggtaggaggcacatccacaggacagcagggagtgtccagctggtacacagaagttaaaaagtcatgttccaacaaggaacagagacattcctatggtgtcacaaatggatgctcgagacaccctctgacaaataacgtacattcagggccatcatcagttatcctagcttcagcgcattttcaaagcagctgagaagacaccagagactgtgcatctgctaacatccactgctgctgtgtacaggggccactttggctccaacctgaggaatggtttatgtttcattttggttggctctggaccataacacacagcaattgtagtcatcagtactcttggtatgagctctgtttaataatgattttagcagaacattctttggggcaggtaattagatattaaatagctcagctatacttcaaaaactaaatactaaagcccttcatatgcacttattggagtgcttagcaaatggcacagttgggacaacagttggttttacttggaaagacattggcttggctttaaaatccatgtcaaaaacgtgataggttctattattttgaagacaggagttctgtgacagtgtcttcactgagtagttaattaagatgctgtctccttggtataatggtatgacaaccactgttcagacatcttgtcagttcagcatcgcacaccaaggaagagccaagactcaggcctgcagaccttgccctggggagacaagtccacaccatgcaatgacatcagtcacatagaagctgaaggatcctatggcattctctaccctgtgactgactacaacatgaacgtgctcctgaccattgtgccatgtttctagacaaattctagtgtgtgcactgggtaaatgctcacttaaatgctttgtaccaatgaagtgacagtcttatgtgcctctgttgcagcagagcacactgacagctatggagtctaaggccaaggtccttcactgaagagcatgacatgtcatgcagatgagtccagggccaagatctgcagccacagcccctgtgtggaatctaccagtttgcatcttccctcattatctgtggttgctgtttaaacacctcagggcatctgtagtctgtctcacccaagactaaaagattacctgcccagacttttgcaagtctgttggccctcgtctgtggttagctggatgtgtcctgcactctaacagtggtccacaggccccccaaggtgcggactggcttttagaacatccctttagcctaaaacaaacaattccaggagacactagactgtgtacacctccagagcagcagaagccaaatccacaactgtcccactttggtctggaatacctgtgtaggttccagttatctggggttgaatatgtatattgtttaggagacctctgcatactgaccagagccaaggcaactgaagtagcatgtaaggccacaccataccactttactctgcctttctccatctaagctgcctctgggagctccgatatagacaaaatgtattctaccaccctgaagtctggggaactggcagccaaggtgtgacctagaatcattcctaagttggtcctgttgaattgagtgtcttttggctaaagttggtactttgctgattttgataggtaggagaggttgaaggagaaagtggggttgattgttttggcagttgagtgcatggtagtcggaggaaccatagtgcgtctgtcttcccctcctgtggtgctcctgcatacacagattataaaggcccaccacatatgctagaaagggtatgagacacagttgtcttctgggtgggacaggttaggtgaggcagcttcacaaacaggtagtccagaaagatgccaagtacgtcaaccagctcacagcactacctgtgcagtcacatggccagacaacacaaccaccttcctcgtctgctccaggaacacaaaacactcctgctagaactatgagaccacaaatatctccctctcagggtccctgctagcccctaaaatgacactgaatgttggtgttggccattcctcatctaatgaggccgaactgtttgtggccctgcaccacggcttggccatggctaatggtttcatgttgagagctagatggcttgacagttgaacatctcagtggtgcccatgtttacacagttctcctaaatgtgatatcagtttccccttttgccattctaggagtcaccttttctctttaattcacttttacacatacatagatggccattgattattggcacagatctctttaaggtaggtgggaagcctgtatggactgcaccccagcaaggctgcaaaaagctagcctgggcttgtgtcttctcggcattgtgtaggtcctgcttacttcctacattcttgggacaaagcagcttaaggaaggaagggtgtatttttgcttacagggtgtcatggccaaaaagtcatgttgcatttacagtcaggaagcagagaagcatgcaggtgtcagcttgcttggcagtccagggctcccaacctgtgggatggtgtcagcctcatttagagttccttagcccagtagctagtttaatcttgataatccatcatgggtatgctcagtggattgtctccaagatgattctagattctgtcacattgacatcagtaagaatcatctcagtgtgccttagatgacagccctgcaaagcatgttcttgtggttaagggagaggcgtttgcattgctttctttccaattccactgaagccacaagatcttggcccactaaccaatgagggattggacagcaggtgcaccaagcctcaaagaacaatgtgtttgacagctatagtcttccgcatcccatgttttttgctgatccgatgatgccttctcttgtcctttgtagaacggtggttatgcctatcgcaaatgagtttgccccagatgtggtactggtgtcatcgggcttcgatgctgtggagggccaccccacacctcttggagggtacaatctctctgccaaatgtaagtcaccagagttcacctgtcccactgtcatgtttcctcacattgtttgtgttgtctgtgagccaatggagggctctcacctgcatttcttactcagtatgagaatatatggacagcatcagcaagccctgagcagcaggaggctgagagttgaaagtcacaagttctatccttaggacagagactcaaaaggacatcaaattcacaagggcacacaccagttctgtcagctgtactgtgggcatgagctcttctccagctgtcagaggatagggccccagtaccacctagctgacatgtgcttggtgctgagttttgttctctgatggaggagaaggccctctaatctttataaagctggagaaggaaccaactaagaggccttgtatcatatagttgctgctcttctcatggaagaacttactggcactgcctctggcctttgcttctgctctgctgcagcacatggagaagataaggaaagcctctgggctgtagcactttgggtcacacagtgacctggctggctgtcacctgtctatctgtagcaccttgggtcacacggaggcctaattgtgtcacccaaccatgctgagcagaagcaacaggaagcctagggtcctgaaaccatgcacaaatgccttcttcggtcaaggtcctggcatcctctcctctctgcccatcagtgcatctaatcacagagaacagtcagtctctctgctttactgtggtagatgtggacccagcaaaggaataatgagactagaggtagcctttgggatgtcagtgcctctctcctgctgtcattgctcctgcagtggggtcctacaggggcagagagtactctttgtaccacagtctctgtaaccccaaagccagtatcaatgtttccatcagagacattggacctgaatctggtctggtgagtgggctggttactagggctttcctagtgcctaacctgcatcagcctatctggctatgcatagcaaccccatgaccagcaagtgatgtgctgggtgttgactgaaaacagggaagactgtgaccctagatggaagcagatgcccagacatgaatgtgggaaagctccgtgccacacacagcattgacatgggcatgctgccttccacttgcatatgtatgtacacagcatatcagatgcccaggaaggcagggagtgcaaagccttagatggggaagatacagcactgaaaccaaaattcagtcagtcggatgaagatacaatccaaaagccaaactaataagcatgttaagcgagcctcagttactgaagatgatacccagctcctgtgtttattagggatgttgaggggagtatctggcgcgctccactcaacgtgtccctctgcctttgcaggttttgggtacttgacaaaacagctgatgggcttagctggtggccggcttgtgctggcccttgagggaggccatgacctgacagccatctgtgatgcttctgaagcctgcgtgtctgctctgctgggaaacgaggtatggagcggtcctggccctgcagagtgtgctcaccacaggcaccaggccgctgcacagagctcagacggcagaggccagccacctcccatctgaggggcagttcacccagcacggggctacagctgtatcccagcccgggtaggatgtctgaccttggctaagagatgagcagaagggacacagagcggggccaggacacagaggcactcgctgcagcacgttctcccttcctgtttcactcgtgtggaggataacgtgctggccaggcctcatgctgctcctcagctctccagtgtggtccggtgtctatgggagcttgtctgcaggcttgggtggagtcagcatgcacaagccgagctttcagcttagggctgggctgggacctctttactcagctatcatatatcctgtgactcaggagcaatgcttagattcgggttctgcactgccccactagtactgccaggcagagttggggacattggcctgcacagtagtcttcagtgggtcagtcacataaagtttttgagggttaaagtacagtgagcaccatgtgagttccctcctgctatgttgatgaagaccccttgttgacattcctagctccttgtgtttatagctgcacacaacagagacccagttggaatgagcttcaggttagaatgaaggtgatgtcacataaccctgggagccccaaatgcttgtggtaaaactgacacataaccttcattgaagaattcccaaatctgaatctgtctaggccaatggttctcaaccttcctaatgccctattaaaggaactcttttatgcagttcctcagattgtggtgacctccccccccccaaccataaagttactcattgctacttcataactgtaactttgctactgttatgaatcataatgtaaatctgttttccgatggtcataagtggcccctgtgaaagggccattcagccctccccctacccccaccccccgcagaagggtcacgacccataggttgagaaccactagtctaggcctctctggctggtatgtatatctgttacctaatttatgtatgtgattcttgcttcatagatcttactcacattgatcccctatgggtgctgtttaggtgctaggaaggaaagaaccaggagtaaggagcacaccacacagatcctggagcctgtgtcacataggagcccctcggcttcaggattagagtggcaagtgggtcagcagctctgcgatctgcggcgcctgctgcacctgctcttctgggcttatgaaactgctgtccccaccatgtaggccagggactagatggctcttaaggaagaccctctctgacctggtttgccaacacctgccagcccagggttggcccatgtgacacagagatcaggattgctcttgaaggttcttgtcagaattgcacacaataccagactcaaagttaaatgcatgttctgtgtggtgtgctctgcaagtttcactctagaaagcacagggtaggagagaagagtgaaactgctgcctcactatgtacagcttttaagcttctggaaccaaatgcatattcctccctcaaccttctgtggacactattataagagaaaccctgctagttatgccttgctacagctctgacccatgccatcagtggggtgttccttcatcagagaaagtaggtgtacaccttagccaagtctttccatcaggccctgagtacatcaaccaagcactgagcctcaccccccagcccccactccccagtctcatggttgccaaacctccctgccctccattgtagctgtcatgagagaaaaccatctaaactcaaatagagagcaggtacttaaggaggcgggtcagaggcagcagtcagccacacgtgtccccagccctgcctggccagcaaagcttgctcccactgacttccctgaaatcctaaatgtgaaaaggccaccagactaattggcattattttccaagatttccatttatacataggtctccacaacatttacctttagacattttcccttatgggaaagatgaaagagagcacacaggatactttcctactgtgtgactcctggtctaaggttattgaggatgccagatgctcatgggtaggctcagagccctgacatagtggcagctagcaactgtgctcaatgctccaggaagcctagggatggcagcctggcctaggttccccacagcatactgcagatcctgaccctactgtaggaagctaggaactggaattcagagacatgggctctgggcaggtgtcagtggctcagtggaagactcttgcacatcttggtgtcatcccatgtatatcccaagagaggagaaggggctagatagtgtgaaaggacagggcatgccaaaggcagggtaactaggagacagcagggaaaacaacatggagaggctgagctcaaaaaagctaggatgcagcagagaaggaaatggggaagaggcacgcatgaaggatccatctgaattcctgagcttcagggaaggcagggggctcagcctacagctgattgtttcacactgaagaaggcaagaagagacagccagagctgtgaccacgtagtgaaggaagtttgatgtgatactcaggagaaagaccagctggaagtacagccctgaccatattaggcaggtaccttggtacttgggtactcgaaccaacaagacaatagagtaattcccagaggagcagaacaggaggctaagatcacttagagggctgagcacagagcctcagttcaggttcagaatcagatcagcaggaagctagcactactgagctagccatgttttctgctaatggccaatggaaaggaagggagtctcaaatgctttttcatgaggaggtattgagaatgagactctaggacacacacacacacaccaggaaaaagtgctgttgaagcaggtccttaacttcctgcaacctcaacccccaaccccaggaatctacaaataaaactgcatgtcttaggggaagatggtgatgactcaaagcagatacttagagatgcttactgaatgtacccatctccagccaagctctacagaacagtaaattattcagaagtctccagtgacgtgcatgagccacccacacaagtgtcacaagcgagagtaagacagcaactacatacagtcttgcagggctggcaggctagtgtctctggtcaggagtagagtaactgagtctttgccaggcaggtagggcctgtgttgctattgccacattgagacactagacctgcagctttcctactggaaaaaggcagtttgtaaggtaaaatggaaaagcccaagttaaaatgaggtgcttcaacttgattggacgtgttaattggggtggtcaaaagggggcttttaattgctggacttgaacactttggtagctgggccttggtagtcggcctctggaggaggaattgaccaagtaaccttggaggctagctttagggatgtaatctaagggtgttttagcacagcagaggaaaggggagagaagggagcaattcagaggagcaggtctggagaccatcagagaactagacagagcttctgggcctggaagagggccaggcaaagactcggtggaagagatcctctgccagaggagggagctaaagcctcggtgtggaggtgtggaagatgaaagtgcaggcaggtggccggatagtgatgagagggagagctcaggaggcagcttgggttcctgggcatggatttagacaccagttgccaagaagatctgtcttccttggaagtaagagaaaggcaggttctgagttggagggggtgggaatatgagaaaatttccagacctaaaccagctagccctgtggccataaccttgccaagcgcccattggcctgaacatgtgctactatacatgtggattgacagcctgggccaaccagagaaaggtctggaggacagaaggatctagtgacccctcattgctagaatctgtttaagatggaagttttgacctccttcctgggcccaaatgccccagcaaagtgggtgacattctgaaaacacaggctcaactccctgaagctgagtcagagcaagagccctagattgttacggcctctgaagtgagtccatactgctaaaccactgacactgtgactctgtgacaaagagagtgggaaatccctgctatgattctaattccaccacctgacaaagagtttgctcatatacctgacagaggcctctgctaattacaagcgtggcagcagactggtggattagtctgccctcaggatgacaacctggtaaccctcacaatcagggcagagcttggaccaggcagtgttacagcagcctccatgatgttgagtcattgggaattccaaagacagagcagggccatttcctatgagttaggtgtagatccagagcagggagaagggacaaaggaaaccctgggctctttggacagttatatcagataaaactcaactggaaacataactagagcccagagaggagctggctgcaaacctgttgctagtgtttggccaatagggtgtggcagagaggcctgagtcaggattcctggaaagaatggatatgccttccctccttagaaggagcagtgctccagtggacagttgacccagggccctgaccatcaggccgaggcctgagctcacaggagtgagatggatctcactgaatcctgaaattccaggatccagaagggatgtaagtggttcttcccaggagttttgctttgacaggagagagcagaggatggcatctgcttatgaaggacttcaaaggtaaaaagaagactcatctactgccagccatgagaagcaagtcacatttgagcagttctgattggccttgggtgcccatgagaatctcttcctgaattccagcatagaaaacacagctaggtaggcccacactagaaacagacatcatcttgtgagcctcatttcaagtcagccattggcaaggctgtactctgcagggagtggatggccaagtgtgttgtggcagtgccagtgcagggtaccctgcagaagcagctccatgtagctttcatcaggcctttgaaacccggggatgtgtcattcagccctcttgaacaggaggcccactgcagcccagcctgcgtctctctgtagttcctcatagttctttgtatcccccactgtctgcagcacttgctttgtgattgctgcatgttgtcttcctggattatatattattggcaatgtcttgttcagtgatagattccaggtttccagagcagtaattggcactttctacattgctcaataaatagcattaaatccaggaataaccacacactgcttttgctcctatgtctctgtggtactgtatggtgcctccagtattaatttctgttgaggattgctgtgactactctgtgcctgtgtgtttccagctgaatttccagactgggtagtgaatgtcatcagaatttagataagaattgcattaaatctgtagatagctttcagtaatataaccattttcacattgctaagtctcctaatccatgaatgtggacagtctttccatttctgaggttttttgcttcagtgttgtatgacttcagctataaagttatctcacattttaagtttattttattttcagttttgaacaggcttatgaataaaattatttccttggcagatttgttaatgtatacttaaagtactgatttttatgttgacttttgtatcttcttttgctgatagtgtttatcagatctaaattttttggtagagtttttaaaattcttaaaatggggagtagaagaggggtggacacccagagagagaaggggaaggggggataggggaggacctgtgtaaggggtactgggaggagaggaagggctgatactgggttgtaaagggaataattaagtaaactttattttaaaaatcagaaaaaaggatagacatgttgtagggacaggaataatttgaattattccttcgctgtttgtgtcttccctatttctttctcttgtcctcttgccctgatctgaatgtatagtggtggacagcatgtgggtctgtccagagtaggcttcattgtactgatgttgttaccaactgtctaagctttctcctcacctctgctaggatgtgatgttgaattttgccagcctttctctgcatctattgaagcaatcacctgctttcccgtggttttgtttctgtcctacattattacaccatcacttaacttacactgagccatccttggtggcccgaaatgattctaacttggtcattacatatgatctttttagtgtgctgttgaactcagtttgtacttctttcccagttatttgttcatcaaggagacttgtctgcagcgtttccttttgtgttctgtccttacccagcatgggtgtgagaacaatatggcaccagtataaacaggcatatacaagcaggaaggggcagccatcacacattgctgtacctgtgaaatctggaaacaagagcaggatgtaacaggggaagggaaaccattagggagaggaagggacctctggtggagcggaggggaagagtgtgggtgatgggtaggtgtgactgaagcaccttagacctgagataccatggaaacccacagtcgataagcactgtggcagtcagaagaacagtactcagttaggaaagggtggtatttcctatgtgtggagttccttcccggttcccacattcccatcactggactagagcagtcacgcattatgtgttttacacgtgacactagacagacctttaaacacagttgtacacacagattgaccccgtgcctggagtgcaactcaccgtaagatcccaagtgtccacatgctgccatttgatcttcctctgggttgaagtgaacacacagaagctgcatcactgagggcgagtcctctctgtcctttgtcctttctcttggcgacacagagcatctcactgctgaaaggccaccatactcaccccttccagttttcatgtcagctttcatggggcaatattttctcaaaaagggaaagaaaatgcagctgaggaagatttctgagcagctggcacaggcagagaatagacatagccacctccccatctcctgtgtccatgctttgtggactcctgctgggagagagccctggagccctgggtggtctgctcagccatggcactgcacaggcaaaaacagtgcctgcaggaggcaggtcgtagacactagaagcagtgctagcatcactctaaataaagatggagagttttgctgagggctttgggtaccatacaagctgtgagcatagtgaacatgctgtacacagcagcatgttacctagggtgccccgggtgtgcctatcaaacttaagttaacttagggaaagtatgatacaagggaggccctaagagagctgagagaccagggttctggaagaaacctctatagccttctggtgaactttgtgagcacgcgctattacacacatcttgccccaaagtaattatatgtctgttctgggtattgtcttaagtgatgtcgtgcacactctacatctgcactgcaaccatgacccccatatcttgagagtcttcctttgtttcccatcctcaaaaggccttgggtccctggtgaggcataaacttaaactcaagtcctcactcatgcatacacaacacacactgtccactgagtcaccttcttggtgtgtgtgtgtgtgtgtgtgtgtgtgtgtgtgtgtgtgtgtgtgtacgtacacatgaacattcaaggtctctgttacctaacggactgttgtcatacgaaaagaaggtatggttggtgggaggtgctgaatggactgctgctgtggtcagtcagcacagacatgccatgtttttggaatcgcacgtatccaccaagtaagcttgccgatctcttagtcactcctgcttcccgccttgatttatctgctgtgtctcagaaatgcctgctggtatctcccatcaggatggatgtttctttagagtatcattcgtcccgttctttgggtgaactgaagatctgtgtggcagtgcagccttctttacctccagccagtctgccctcgaatctctatgccaagcacttaagatgccacctgccattcttttggccagctgtgcccagcgactcgtgtttttgttgttggcttctgactgccctcctggattttatatgcatcctagttaaatagcccaaagctgggttccatttctacaccagccatctgctgtagatgggaccttggtcacgtccagctcttcaatcccttacccagactcattctatctgtcttgtcctgtagctcccaaggtcccttccttgttctctcttaatatgaaagttccctgtgttcctagtgcccagttgaaagatgtgtagcaggcaccctcaccatgggccagcatcctcagcaggatcaggaggtgtcattatcctgagtgagccaagacctggaccacaatggcctctctgaagtctacagaatgagcacacctctgtatatttaagaaaatgttgttctttagaaactctaacttaactaggtcctacatgtttctctgacaaactggcagcctagtcccaatcccgcccaggctacatgccttcccctcagttacttaatttcactgacaggacatttttgtgttgtcatgtgtcatccacgttgggtctgagccacatgccactcggactcttcccccatttcctgccttctgcaggacattcttaccgggtctcaagaatatcctgtgggttttctctaggaaaacggcccatgcaggccgcatcccacgttgctacagaagatacctttgttccatcttgttggtagtgacagtttctctgggcatatgattccaggtagccaggtctccttttggcacatagcaatatcaacccactaccctccatttcccttgctgtgaagatgatctgttttcctagctgctttcagaatcctgagtctgcctttgctagtctgtgattggtttccgaatacctatagatttctggttttgctgtccttgtgaggctcttccctgcctggcctgggtcttcccagctgtggagagtcagtgcttgttccttccttcagtgctcattgaagatgttttcctggcctccctcctgatcactgtggcttctgttccaccttgtccctttggctgcagcatcagggattggacttcccagctttcttccttatgttccagtagttacacagtgctgttacacacaggtctgaagctctgtatggctccctgtctacaggtcaggtccatcactgaaagcacattgaatgggtataattgcagtctgtgctaatctaaatggactttctttggggagatggcatcagtgacagtgacagctcctacacaccactcagaaaccttttcttgccagccagccttgccactgcatgagtccttgtcacagccatagaactccaactatgtctggatgtcaccagtgcttcatgggggcccttgctctgccccacccaccatctgttcttggttcttttgtacccattggtcccctctgcctgtcacagacttcccacctcccagttgcttttcatgattctgatgacttcaggtcaggattttctggccatcataaaatgtccagtttatattggccagtgtgagcatgaaatgcctcttataaagcgtgtgtgtttgagtaccgttggggaagttatggaacctttggctgtagggcccgagggcagggcctgatgggtacaggcagttgtgttcacacccgtgttcctgtctgatggcctgtgaggccactcttaacattgcacctcccaccaggattttctaagccctcaagctcggagccagacaaatcctcctatcacagcaatatggaaaataagggtgagattctgctcatgatggactgggggagggagatgccagtggccgctgtgcaccatgtaccttggggctacacagtgcagtgtccacctcagtcaccagccttcatttgaagctgcctcttccctacacaaggttcgtagaggagcagtgtgctctgccctctggagttatcagcagttccatcagaaatgtctgtctgcacgtgcgcacttacttagttacgagctgatgctcagtttatacttcaggcgctgagttagctcactgctcagcctgctacctgtggccatgaggcactattccaaggtgacccgtggcttgtccttaagcaggcctcgtgtctgctgcaagtttctctggtgtttccctgcccaccctggcatcagtcattacttcttttgttggtgaatggcttgagggtgccatgttggctctacctgccccagcctctggctggctctttgctgagaaaagtctttggttggaaggtcatgcttcctggtgtaattggcagcactcctgttcagtgcggttggggatggatgtcactcaggggggctgcagtggctttggccagggaattctagccgctaaacatagcagctgtctaggcaggtttgaagccaggcgaactctcagggtcactttattctacagcttcttcccagaggtgagataagatcagtttccctttgggactggctctagctctccctttgttggtctccctagtctgtagcttgtccactgcacagcacagctgctagctgatgttcattctgccctaggccctgctacttaggacttttgccctattgttaggagtttcatctgtgagaggcctacgcacttcctcctccttccgcatgtgtgagaaaagccagattcagagaccctgggcattcaggccgggttgtacaagagtggcttcctccctctcagtggctcacacagataacgccgagctgatgtcctgtgtgcagcctacccctgggaacccatgaatatactccagtgtaccctaaggagagactacctgtagcaagtcttttttttttttttttttttttaattaccaagtcatactggctttttagagttacttcatcttccctacaaatgactatatctttgggagtgaggtgctgtctctagtagacaccatttaatatatacatagattatacactggtcatttgccatcataatagatctgtgtctctcttatagcttgagcctctgccagaaaaggttctacatcagagacccaatgccaatgctgtccactccatggagaaagtgatggacatccacagtaagtggctggccaagtcatcgtggggacccagggcagaagcagaaggcctcacctcccctggcatgtgatcagctagtagagactccctgaaccaggtcctactgtacagggcttcgaaagaatctgggcaccaatagtctcaaactacttggttcagttgcatagaacttacttggactgaaaaatctatgtcatgctagaggtacctagcacagggtagaactcatcccccattcagtcaacaaatcccaggcaacaggtacacagccagatacccacacatggccctgcctcaggtaaaacctgctactccttgcctggctctctgatatgctatcctggcacataagctcacaaagatgatgcacacctgaaggcttcacccaggtacctactgaccatttagttctgccttcaaaactgtttcacctaatgcccctaactctagaaagctgcttcagcggggctccaagtgctgaacctggatgtgatctatccacagcacctataaggctccaggtaggaaactccctaagtctggatgccagcaagtctccatgtgtctgctcccagaatttctggtcacccacagcaaggcagaatcccacagacgtggagagccaggttccacaacagttcacagccctgtgttcaggtgacctgtaatgcagaaattacaccacaagggcctgtgagggcagtgccagccagcactcttcagaaaggcgcttttcagacacaagtgagtctcccattaacctgcagaagtggggagtcactgagtgtttccctctcccccaggcaagtactggcgctgcctgcagcgtctgtcctccacggtggggcactctctgattgaggcgcaaaagtgtgagaaggaagaagctgagacagtcaccgccatggcctcgctgtctgtaggcgtcaaacctgctgagaagaggtgagtcctgtccattccgtcccaaaggcctgctgagtacacctgtgcatgaggacctgacagagtcttctttgtgtcaggcttgccctttagggacagggtagatggtggcatgcccactgactcgacaaaccaatcctgtctatcaggaaagagcttgcactttggtggagcagggattttgacaactctgtgagaaagggaacctgattgcacagggcctccctcacccactgtgcaccctgcccgaccccctttctcctctacagatctgaggaggagcccatggaggaggaaccaccactgtagcccgaagctgctgttctctcctttgtttgtctgtcttgaagctcagccaagaaacttacccgtatcactcctgcgtcctgccttggtgctctcttgagtacaaagggacagcaggcgtgcagcagcaacgggaagcctttctgccgccctggaccacaggtctggagacgcacacggaacaccgggtgtggcagatcacatggaacacaggacagcgcgcaacacacgggcacacagacatgtggaagccaagcacacgctggtggctccccctccccctgggaagcctcgaaggaagaagcttgtggcaacttgggcagagttgctgaatcaagttgacatgaggaaaatgaaaatcaaagatctaataatacagaacaaacttgattaaaactggtgcttaacatttgattcttacccacaatcccacagtctccgtgtaaaccactcaactcatcttgtagcttttttttttttttaaacgaaaacaaaaccattttctatggctctggcctgccttgtgaaccttagtggggtgctgtgggggttcacagcttagtgagggacagagttggaagaaagtttaaacgaaaaaaaaaaaaaaaaaaaaaaaaactggacagaacagaaatgtgagcctgggaatcagctggagcttctcgacgccaccggaagatgcgagtttgtgccttttttattgctctgatggaagtttttgtggctgggttttctgaagtctgaggaacaatgccttaagaaaaaaacaaacaaaaacaaaacaccactgagaattggtgtgacagtgtcctgtggctggctgagcctggcattacaagagtgggcaccagccactgtccccgagggccgaagtacagccagccttgcttggtttgatcgccatttaaggaagatgaggtagttccaaaaagcagcgaacgccgccagcagttttaaagtctaacacattttaaacggatccaaagtcttctttcctcatccgtcacttagcagttgagcatctccattcggttgtgaagcatgtcgtaggcacactgcagtgttacgatcggaatgcttttcattaaaagcaggtagcatgaagtattgcttaaattttaggtataaataaatatatatatgtataatatatattccactgtattccaagctaagaaacttgattcttatgagatcttgataaaatatttataatgcatttatagacaaagtatatataaatatatataataaatccagaccgcagaggtcctggcaggtgaaagacgtgtgttagctctgaggtgctgagggctggggtctggattgaagcccaagggtttttgagctccagattggccagcttccagattgccagcatgttcacccctgggcaacttccctaccagtttgtactttaattttaattattttctaacagaacctctgccctcgccaagactccatgcacatatgtacctgatgagttt

SEQ ID NO: 512 - DNA, 4327 bp, Mus musculus
tgatcagaggtgagtgccaggcctccttataaggatggtgccctctatgggcctgcctcggagcccctgaggcttcctcctcactgcactccagagtttgctgccctggtcctctgtgttaattgttctctgatcatcaggtgctgtggcgagcacagaggtgaagatgaagctgcaggagtttgttctcaacaagaagaaggctctagcccaccggaacctgaaccactgcatttccagcgatccccgctactggtatgggaagacacagcacagctcccttgaccagagctctccaccccagagtggggtgtcagcctcctacaaccaccccgtcttgggaatgtacgacgccaaagatgacttccctcttaggaaaacagcttctgaacctaacctgaaattacgctcaaggcttaagcagaaagtagctgagagacggagcagccccctgttgcgcaggaaagatggccctgtggccactgctctaaaaaagcgacccctggatgttacagactccgcatgcagcagcgcccctggctccggtcccagctctccaaatagcagctctggcaacgtcagcactgagaatggcatcgcacccactgtgcccagcgctccagctgagacgagcttggcacacagacttgtgactcgagaaggctcagtcgccccacttcctctctacacgtcaccatccttacccaacatcaccttgggacttcctgccactggccctgccgctggtgcggcaggtcagcaggatgctgagaggcttgctctcccagctctccagcagcggatcttgttccctgggacccacctcaccccgtacctgagcacctcgcccctggagagggacggtgcagcagctcacaaccccctcctgcagcacatggtcctgctggagcagccacccacccagacaccccttgtcacaggcctgggggcgctgcccctccactcacagtccctggttggtgcggacagggtgtccccatccattcacaagctgcggcagcaccgccctctggggcgcacgcagtcagcacccctgccgcagaacgcacaggccctgcagcacctggtgatccagcagcagcaccagcagttcctggagaagcacaagcaacagttccagcagcagcagctgcacctcagcaagataatctccaaacctagtgagccacctcggcagcctgagagccacccagaggagacagaggaggagctccgtgagcaccaggccttgctggatgagccctacctagatcggctacctgggcagaaggagccctccctggctggtgtgcaggtgaagcaggagcccattgagagtgaggaggaagaagcggaggccactcgagagacagagcccggccagcgcccagccactgagcaggagctgctcttcagacagcaagccctcctactggagcagcagaggatccaccagttaagaaactaccaggcatctatggaggctgctggcatccctgtgtcatttggcagccacagacctctgtctcgggcacagtcctccccagcatctgccaccttccccatgtcagtccaggagccccccaccaagccaaggttcaccacaggtcttgtgtatgacacactgatgttgaagcatcagtgcacctgtgggaacaccaacagccacccggagcatgctgggaggatccagagcatctggtcccgcctgcaggagactggactccgtggcaagtgtgagtgcatccgtggacgcaaggccacattggaggagctgcagacagtgcactcggaggcccacacactcctctacggcacaaatcctctcaacagacagaaactggacagtaagaaacttctaggctcgctgacctcagtgttcgtcaggcttccttgtggtggtgttggggtggatagcgacaccatatggaatgaggtgcactcgtctggggcagcccgcctggctgtaggctgtgtagtggagctggtcttcaaggtggccacgggagagctaaagaatggctttgctgtggttcgtcccccaggacaccatgccgaggagagcacacccatgggtttctgctactttaactccgtggcagttgcagccaaacttctccagcagaggctgaatgtgagcaagatcctcattgtagactgggatgtacatcatgggaatgggacccagcaggccttctacaatgaccccaatgttctctacatgtccctgcaccgctatgacgatgggaacttcttcccaggaagtggagcaccagatgaggtgggcacagggccaggcgtgggtttcaatgtcaacatggctttcacgggtggcctcgaaccccccatgggagacgctgagtacttggcagccttcagaacggtggttatgcctatcgcaaatgagtttgccccagatgtggtactggtgtcatcgggcttcgatgctgtggagggccaccccacacctcttggagggtacaatctctctgccaaatgttttgggtacttgacaaaacagctgatgggcttagctggtggccggcttgtgctggcccttgagggaggccatgacctgacagccatctgtgatgcttctgaagcctgcgtgtctgctctgctgggaaacgagcttgagcctctgccagaaaaggttctacatcagagacccaatgccaatgctgtccactccatggagaaagtgatggacatccacagcaagtactggcgctgcctgcagcgtctgtcctccacggtggggcactctctgattgaggcgcaaaagtgtgagaaggaagaagctgagacagtcaccgccatggcctcgctgtctgtaggcgtcaaacctgctgagaagagatctgaggaggagcccatggaggaggaaccaccactgtagcccgaagctgctgttctctcctttgtttgtctgtcttgaagctcagccaagaaacttacccgtatcactcctgcgtcctgccttggtgctctcttgagtacaaagggacagcaggcgtgcagcagcaacgggaagcctttctgccgccctggaccacaggtctggagacgcacacggaacaccgggtgtggcagatcacatggaacacaggacagcgcgcaacacacgggcacacagacatgtggaagccaagcacacgctggtggctccccctccccctgggaagcctcgaaggaagaagcttgtggcaacttgggcagagttgctgaatcaagttgacatgaggaaaatgaaaatcaaagatctaataatacagaacaaacttgattaaaactggtgcttaacatttgattcttacccacaatcccacagtctccgtgtaaaccactcaactcatcttgtagcttttttttttttttaaacgaaaacaaaaccattttctatggctctggcctgccttgtgaaccttagtggggtgctgtgggggttcacagcttagtgagggacagagttggaagaaagtttaaacgaaaaaaaaaaaaaaaaaaaaaaaaactggacagaacagaaatgtgagcctgggaatcagctggagcttctcgacgccaccggaagatgcgagtttgtgccttttttattgctctgatggaagtttttgtggctgggttttctgaagtctgaggaacaatgccttaagaaaaaaacaaacaaaaacaaaacaccactgagaattggtgtgacagtgtcctgtggctggctgagcctggcattacaagagtgggcaccagccactgtccccgagggccgaagtacagccagccttgcttggtttgatcgccatttaaggaagatgaggtagttccaaaaagcagcgaacgccgccagcagttttaaagtctaacacattttaaacggatccaaagtcttctttcctcatccgtcacttagcagttgagcatctccattcggttgtgaagcatgtcgtaggcacactgcagtgttacgatcggaatgcttttcattaaaagcaggtagcatgaagtattgcttaaattttaggtataaataaatatatatatgtataatatatattccactgtattccaagctaagaaacttgattcttatgagatcttgataaaatatttataatgcatttatagacaaagtatatataaatatatataataaatccagaccgcagaggtcctggcaggtgaaagacgtgtgttagctctgaggtgctgagggctggggtctggattgaagcccaagggtttttgagctccagattggccagcttccagattgccagcatgttcacccctgggcaacttccctaccagtttgtactttaattttaattat

SEQ ID NO: 513 - protein, 908 aa, Mus musculus
MKLQEFVLNKKKAHRNLNHCISSDPRYWYGKTQHSSLDQSSPPQSGVSASYNHPVLGMYDAKDDFPLRKTASEPNLKLRSRLKQKVAERRSSPLLRRKDGPVATALKKRPLDVTDSACSSAPGSGPSSPNSSSGNVSTENGIAPTVPSAPAETSLAHRLVTREGSVAPLPLYTSPSLPNITLGLPATGPAAGAAGQQDAERLALPALQQRILFPGTHLTPYLSTSPLERDGAAAHNPLLQHMVLLEQPPTQTPLVTGLGALPLHSQSLVGADRVSPSIHKLRQHRPLGRTQSAPLPQNAQALQHLVIQQQHQQFLEKHKQQFQQQQLHLSKIISKPSEPPRQPESHPEETEEELREHQALLDEPYLDRLPGQKEPSLAGVQVKQEPIESEEEEAEATRETEPGQRPATEQELLFRQQALLLEQQRIHQLRNYQASMEAAGIPVSFGSHRPLSRAQSSPASATFPMSVQEPPTKPRFTTGLVYDTLMLKHQCTCGNTNSHPEHAGRIQSIWSRLQETGLRGKCECIRGRKATLEELQTVHSEAHTLLYGTNPLNRQKLDSKKLLGSLTSVFVRLPCGGVGVDSDTIWNEVHSSGAARLAVGCVVELVFKVATGELKNGFAVVRPPGHHAEESTPMGFCYFNSVAVAAKLLQQRLNVSKILIVDWDVHHGNGTQQAFYNDPNVLYMSLHRYDDGNFFPGSGAPDEVGTGPGVGFNVNMAFTGGLEPPMGDAEYLAAFRTVVMPIANEFAPDVVLVSSGFDAVEGHPTPLGGYNLSAKCFGYLTKQLMGLAGGRLVLALEGGHDLTAICDASEACVSALLGNELEPLPEKVLHQRPNANAVHSMEKVMDIHSKYWRCLQRLSSTVGHSLIEAQKCEKEEAETVTAMASLSVGVKPAEKRSEEEPMEEEPPL

SEQ ID NO: 514 - DNA, 4923 bp, Mus musculus
gcggctctgcgctcgagggggagcagcatcatggttcaacgttcatctctgcaaggccaggtgacaacgtttgctcttctcgtggattacttggtttacaagacgctgccagtgagacttcaagtttacgcagctgggacccgggcctcctcaattttgttcctgcatgtgctggtggaaatttggagtgtgttggagccactgtttacctggacatcttgagccattttgaacttaaggcactgacgctgctagcaatgagctcccaaagccatccagatggactttctggccgagaccagcctgtggagctgctgaatcctgcccgtgtgaaccacatgcccagcacggtggacgtggctacagcgctgcctctgcaagtggcccctacagcagtacccatggacctgcgcttggaccaccagttctcactgcccttggaacctgcattgcgggagcagcaactgcagcaggaactcctagcactgaaacagaagcagcagatccagcggcagatactcattgcagagttccagccagcagcaggagatgctggccatgaagcaccagcaggagctgctggagcaccagcggaaactggagcggcaccggcaagagcaggagctggagaagcagcaccgtgagcagaagctgcagcagctcaagaacaaggagaagggcaaagagagtgctgtggcgagcacagaggtgaagatgaagctgcaggagtttgttctcaacaagaagaaggctctagcccaccggaacctgaaccactgcatttccagcgatccccgctactggtatgggaagacacagcacagctcccttgaccagagctctccaccccagagtggggtgtcagcctcctacaaccaccccgtcttgggaatgtacgacgccaaagatgacttccctcttaggaaaacagcttctgaacctaacctgaaattacgctcaaggcttaagcagaaagtagctgagagacggagcagccccctgttgcgcaggaaagatggccctgtggccactgctctaaaaaagcgacccctggatgttacagactccgcatgcagcagcgcccctggctccggtcccagctctccaaatagcagctctggcaacgtcagcactgagaatggcatcgcacccactgtgcccagcgctccagctgagacgagcttggcacacagacttgtgactcgagaaggctcagtcgccccacttcctctctacacgtcaccatccttacccaacatcaccttgggacttcctgccactggccctgccgctggtgcggcaggtcagcaggatgctgagaggcttgctctcccagctctccagcagcggatcttgttccctgggacccacctcaccccgtacctgagcacctcgcccctggagagggacggtgcagcagctcacaaccccctcctgcagcacatggtcctgctggagcagccacccacccagacaccccttgtcacaggcctgggggcgctgcccctccactcacagtccctggttggtgcggacagggtgtccccatccattcacaagctgcggcagcaccgccctctggggcgcacgcagtcagcacccctgccgcagaacgcacaggccctgcagcacctggtgatccagcagcagcaccagcagttcctggagaagcacaagcaacagttccagcagcagcagctgcacctcagcaagataatctccaaacctagtgagccacctcggcagcctgagagccacccagaggagacagaggaggagctccgtgagcaccaggccttgctggatgagccctacctagatcggctacctgggcagaaggagccctccctggctggtgtgcaggtgaagcaggagcccattgagagtgaggaggaagaagcggaggccactcgagagacagagcccggccagcgcccagccactgagcaggagctgctcttcagacagcaagccctcctactggagcagcagaggatccaccagttaagaaactaccaggcatctatggaggctgctggcatccctgtgtcatttggcagccacagacctctgtctcgggcacagtcctccccagcatctgccaccttccccatgtcagtccaggagccccccaccaagccaaggttcaccacaggtcttgtgtatgacacactgatgttgaagcatcagtgcacctgtgggaacaccaacagccacccggagcatgctgggaggatccagagcatctggtcccgcctgcaggagactggactccgtggcaagtgtgagtgcatccgtggacgcaaggccacattggaggagctgcagacagtgcactcggaggcccacacactcctctacggcacaaatcctctcaacagacagaaactggacagtaagaaacttctaggctcgctgacctcagtgttcgtcaggcttccttgtggtggtgttggggtggatagcgacaccatatggaatgaggtgcactcgtctggggcagcccgcctggctgtaggctgtgtagtggagctggtcttcaaggtggccacgggagagctaaagaatggctttgctgtggttcgtcccccaggacaccatgccgaggagagcacacccatgggtttctgctactttaactccgtggcagttgcagccaaacttctccagcagaggctgaatgtgagcaagatcctcattgtagactgggatgtacatcatgggaatgggacccagcaggccttctacaatgaccccaatgttctctacatgtccctgcaccgctatgacgatgggaacttcttcccaggaagtggagcaccagatgaggtgggcacagggccaggcgtgggtttcaatgtcaacatggctttcacgggtggcctcgaaccccccatgggagacgctgagtacttggcagccttcagaacggtggttatgcctatcgcaaatgagtttgccccagatgtggtactggtgtcatcgggcttcgatgctgtggagggccaccccacacctcttggagggtacaatctctctgccaaatgttttgggtacttgacaaaacagctgatgggcttagctggtggccggcttgtgctggcccttgagggaggccatgacctgacagccatctgtgatgcttctgaagcctgcgtgtctgctctgctgggaaacgagcttgagcctctgccagaaaaggttctacatcagagacccaatgccaatgctgtccactccatggagaaagtgatggacatccacagcaagtactggcgctgcctgcagcgtctgtcctccacggtggggcactctctgattgaggcgcaaaagtgtgagaaggaagaagctgagacagtcaccgccatggcctcgctgtctgtaggcgtcaaacctgctgagaagagatctgaggaggagcccatggaggaggaaccaccactgtagcccgaagctgctgttctctcctttgtttgtctgtcttgaagctcagccaagaaacttacccgtatcactcctgcgtcctgccttggtgctctcttgagtacaaagggacagcaggcgtgcagcagcaacgggaagcctttctgccgccctggaccacaggtctggagacgcacacggaacaccgggtgtggcagatcacatggaacacaggacagcgcgcaacacacgggcacacagacatgtggaagccaagcacacgctggtggctccccctccccctgggaagcctcgaaggaagaagcttgtggcaacttgggcagagttgctgaatcaagttgacatgaggaaaatgaaaatcaaagatctaataatacagaacaaacttgattaaaactggtgcttaacatttgattcttacccacaatcccacagtctccgtgtaaaccactcaactcatcttgtagcttttttttttttttaaacgaaaacaaaaccattttctatggctctggcctgccttgtgaaccttagtggggtgctgtgggggttcacagcttagtgagggacagagttggaagaaagtttaaacgaaaaaaaaaaaaaaaaaaaaaaaaactggacagaacagaaatgtgagcctgggaatcagctggagcttctcgacgccaccggaagatgcgagtttgtgccttttttattgctctgatggaagtttttgtggctgggttttctgaagtctgaggaacaatgccttaagaaaaaaacaaacaaaaacaaaacaccactgagaattggtgtgacagtgtcctgtggctggctgagcctggcattacaagagtgggcaccagccactgtccccgagggccgaagtacagccagccttgcttggtttgatcgccatttaaggaagatgaggtagttccaaaaagcagcgaacgccgccagcagttttaaagtctaacacattttaaacggatccaaagtcttctttcctcatccgtcacttagcagttgagcatctccattcggttgtgaagcatgtcgtaggcacactgcagtgttacgatcggaatgcttttcattaaaagcaggtagcatgaagtattgcttaaattttaggtataaataaatatatatatgtataatatatattccactgtattccaagctaagaaacttgattcttatgagatcttgataaaatatttataatgcatttatagacaaagtatatataaatatatataataaatccagaccgcagaggtcctggcaggtgaaagacgtgtgttagctctgaggtgctgagggctggggtctggattgaagcccaagggtttttgagctccagattggccagcttccagattgccagcatgttcacccctgggcaacttccctaccagtttgtactttaattttaattattttctaacagaacctctgccctcgccaagactccatgcacatatgtac

SEQ ID NO: 515 - protein, 963 aa, Mus musculus
MLAMKHQQELLEHQRKLERHRQEQELEKQHREQKLQQLKNKEKGKESAVASTEVKMKLQEFVLNKKKAHRNLNHCISSDPRYWYGKTQHSSLDQSSPPQSGVSASYNHPVLGMYDAKDDFPLRKTASEPNLKLRSRLKQKVAERRSSPLLRRKDGPVATALKKRPLDVTDSACSSAPGSGPSSPNSSSGNVSTENGIAPTVPSAPAETSLAHRLVTREGSVAPLPLYTSPSLPNITLGLPATGPAAGAAGQQDAERLALPALQQRILFPGTHLTPYLSTSPLERDGAAAHNPLLQHMVLLEQPPTQTPLVTGLGALPLHSQSLVGADRVSPSIHKLRQHRPLGRTQSAPLPQNAQALQHLVIQQQHQQFLEKHKQQFQQQQLHLSKIISKPSEPPRQPESHPEETEEELREHQALLDEPYLDRLPGQKEPSLAGVQVKQEPIESEEEEAEATRETEPGQRPATEQELLFRQQALLLEQQRIHQLRNYQASMEAAGIPVSFGSHRPLSRAQSSPASATFPMSVQEPPTKPRFTTGLVYDTLMLKHQCTCGNTNSHPEHAGRIQSIWSRLQETGLRGKCECIRGRKATLEELQTVHSEAHTLLYGTNPLNRQKLDSKKLLGSLTSVFVRLPCGGVGVDSDTIWNEVHSSGAARLAVGCVVELVFKVATGELKNGFAVVRPPGHHAEESTPMGFCYFNSVAVAAKLLQQRLNVSKILIVDWDVHHGNGTQQAFYNDPNVLYMSLHRYDDGNFFPGSGAPDEVGTGPGVGFNVNMAFTGGLEPPMGDAEYLAAFRTVVMPIANEFAPDVVLVSSGFDAVEGHPTPLGGYNLSAKCFGYLTKQLMGLAGGRLVLALEGGHDLTAICDASEACVSALLGNELEPLPEKVLHQRPNANAVHSMEKVMDIHSKYWRCLQRLSSTVGHSLIEAQKCEKEEAETVTAMASLSVGVKPAEKRSEEEPMEEEPPL

SEQ ID NO: 516 - DNA, 4903 bp, Mus musculus
tgagattcttcccagcaagcccggcggagcagtactggaattttctgctcttggacaaacagatttggaggggcttctcaaattgaacagagatcctaactgaagttgcattacaaagtttcaagatggctctcctctcctcatacatgtagcagattcttcctcctttctgggcttccaagctccttgcacatggactttctggccgagaccagcctgtggagctgctgaatcctgcccgtgtgaaccacatgcccagcacggtggacgtggctacagcgctgcctctgcaagtggcccctacagcagtacccatggacctgcgcttggaccaccagttctcactgcccttggaacctgcattgcgggagcagcaactgcagcaggaactcctagcactgaaacagaagcagcagatccagcggcagatactcattgcagagttccagcgtcaacatgagcagttgtcccgacagcatgaggcacagttgcatgaacatatcaagcagcagcaggagatgctggccatgaagcaccagcaggagctgctggagcaccagcggaaactggagcggcaccggcaagagcaggagctggagaagcagcaccgtgagcagaagctgcagcagctcaagaacaaggagaagggcaaagagagtgctgtggcgagcacagaggtgaagatgaagctgcaggagtttgttctcaacaagaagaaggctctagcccaccggaacctgaaccactgcatttccagcgatccccgctactggtatgggaagacacagcacagctcccttgaccagagctctccaccccagagtggggtgtcagcctcctacaaccaccccgtcttgggaatgtacgacgccaaagatgacttccctcttaggaaaacagcttctgaacctaacctgaaattacgctcaaggcttaagcagaaagtagctgagagacggagcagccccctgttgcgcaggaaagatggccctgtggccactgctctaaaaaagcgacccctggatgttacagactccgcatgcagcagcgcccctggctccggtcccagctctccaaatagcagctctggcaacgtcagcactgagaatggcatcgcacccactgtgcccagcgctccagctgagacgagcttggcacacagacttgtgactcgagaaggctcagtcgccccacttcctctctacacgtcaccatccttacccaacatcaccttgggacttcctgccactggccctgccgctggtgcggcaggtcagcaggatgctgagaggcttgctctcccagctctccagcagcggatcttgttccctgggacccacctcaccccgtacctgagcacctcgcccctggagagggacggtgcagcagctcacaaccccctcctgcagcacatggtcctgctggagcagccacccacccagacaccccttgtcacaggcctgggggcgctgcccctccactcacagtccctggttggtgcggacagggtgtccccatccattcacaagctgcggcagcaccgccctctggggcgcacgcagtcagcacccctgccgcagaacgcacaggccctgcagcacctggtgatccagcagcagcaccagcagttcctggagaagcacaagcaacagttccagcagcagcagctgcacctcagcaagataatctccaaacctagtgagccacctcggcagcctgagagccacccagaggagacagaggaggagctccgtgagcaccaggccttgctggatgagccctacctagatcggctacctgggcagaaggagccctccctggctggtgtgcaggtgaagcaggagcccattgagagtgaggaggaagaagcggaggccactcgagagacagagcccggccagcgcccagccactgagcaggagctgctcttcagacagcaagccctcctactggagcagcagaggatccaccagttaagaaactaccaggcatctatggaggctgctggcatccctgtgtcatttggcagccacagacctctgtctcgggcacagtcctccccagcatctgccaccttccccatgtcagtccaggagccccccaccaagccaaggttcaccacaggtcttgtgtatgacacactgatgttgaagcatcagtgcacctgtgggaacaccaacagccacccggagcatgctgggaggatccagagcatctggtcccgcctgcaggagactggactccgtggcaagtgtgagtgcatccgtggacgcaaggccacattggaggagctgcagacagtgcactcggaggcccacacactcctctacggcacaaatcctctcaacagacagaaactggacagtaagaaacttctaggctcgctgacctcagtgttcgtcaggcttccttgtggtggtgttggggtggatagcgacaccatatggaatgaggtgcactcgtctggggcagcccgcctggctgtaggctgtgtagtggagctggtcttcaaggtggccacgggagagctaaagaatggctttgctgtggttcgtcccccaggacaccatgccgaggagagcacacccatgggtttctgctactttaactccgtggcagttgcagccaaacttctccagcagaggctgaatgtgagcaagatcctcattgtagactgggatgtacatcatgggaatgggacccagcaggccttctacaatgaccccaatgttctctacatgtccctgcaccgctatgacgatgggaacttcttcccaggaagtggagcaccagatgaggtgggcacagggccaggcgtgggtttcaatgtcaacatggctttcacgggtggcctcgaaccccccatgggagacgctgagtacttggcagccttcagaacggtggttatgcctatcgcaaatgagtttgccccagatgtggtactggtgtcatcgggcttcgatgctgtggagggccaccccacacctcttggagggtacaatctctctgccaaatgttttgggtacttgacaaaacagctgatgggcttagctggtggccggcttgtgctggcccttgagggaggccatgacctgacagccatctgtgatgcttctgaagcctgcgtgtctgctctgctgggaaacgagcttgagcctctgccagaaaaggttctacatcagagacccaatgccaatgctgtccactccatggagaaagtgatggacatccacagcaagtactggcgctgcctgcagcgtctgtcctccacggtggggcactctctgattgaggcgcaaaagtgtgagaaggaagaagctgagacagtcaccgccatggcctcgctgtctgtaggcgtcaaacctgctgagaagagatctgaggaggagcccatggaggaggaaccaccactgtagcccgaagctgctgttctctcctttgtttgtctgtcttgaagctcagccaagaaacttacccgtatcactcctgcgtcctgccttggtgctctcttgagtacaaagggacagcaggcgtgcagcagcaacgggaagcctttctgccgccctggaccacaggtctggagacgcacacggaacaccgggtgtggcagatcacatggaacacaggacagcgcgcaacacacgggcacacagacatgtggaagccaagcacacgctggtggctccccctccccctgggaagcctcgaaggaagaagcttgtggcaacttgggcagagttgctgaatcaagttgacatgaggaaaatgaaaatcaaagatctaataatacagaacaaacttgattaaaactggtgcttaacatttgattcttacccacaatcccacagtctccgtgtaaaccactcaactcatcttgtagcttttttttttttttaaacgaaaacaaaaccattttctatggctctggcctgccttgtgaaccttagtggggtgctgtgggggttcacagcttagtgagggacagagttggaagaaagtttaaacgaaaaaaaaaaaaaaaaaaaaaaaaactggacagaacagaaatgtgagcctgggaatcagctggagcttctcgacgccaccggaagatgcgagtttgtgccttttttattgctctgatggaagtttttgtggctgggttttctgaagtctgaggaacaatgccttaagaaaaaaacaaacaaaaacaaaacaccactgagaattggtgtgacagtgtcctgtggctggctgagcctggcattacaagagtgggcaccagccactgtccccgagggccgaagtacagccagccttgcttggtttgatcgccatttaaggaagatgaggtagttccaaaaagcagcgaacgccgccagcagttttaaagtctaacacattttaaacggatccaaagtcttctttcctcatccgtcacttagcagttgagcatctccattcggttgtgaagcatgtcgtaggcacactgcagtgttacgatcggaatgcttttcattaaaagcaggtagcatgaagtattgcttaaattttaggtataaataaatatatatatgtataatatatattccactgtattccaagctaagaaacttgattcttatgagatcttgataaaatatttataatgcatttatagacaaagtatatataaatatatataataaatccagaccgcagaggtcctggcaggtgaaagacgtgtgttagctctgaggtgctgagggctggggtctggattgaagcccaagggtttttgagctccagattggccagcttccagattgccagcatgttcacccctgggcaacttccctaccagtttgtactttaattttaattattttctaacagaacctctgccctcgccaagactccatgcacatatgtacctgatgagttt

SEQ ID NO: 517 - protein, 1052 aa, Mus musculus
MPSTVDVATALPLQVAPTAVPMDLRLDHQFSLPLEPALREQQLQQELLALKQKQQIQRQILIAEFQRQHEQLSRQHEAQLHEHIKQQQEMLAMKHQQELLEHQRKLERHRQEQELEKQHREQKLQQLKNKEKGKESAVASTEVKMKLQEFVLNKKKAHRNLNHCISSDPRYWYGKTQHSSLDQSSPPQSGVSASYNHPVLGMYDAKDDFPLRKTASEPNLKLRSRLKQKVAERRSSPLLRRKDGPVATALKKRPLDVTDSACSSAPGSGPSSPNSSSGNVSTENGIAPTVPSAPAETSLAHRLVTREGSVAPLPLYTSPSLPNITLGLPATGPAAGAAGQQDAERLALPALQQRILFPGTHLTPYLSTSPLERDGAAAHNPLLQHMVLLEQPPTQTPLVTGLGALPLHSQSLVGADRVSPSIHKLRQHRPLGRTQSAPLPQNAQALQHLVIQQQHQQFLEKHKQQFQQQQLHLSKIISKPSEPPRQPESHPEETEEELREHQALLDEPYLDRLPGQKEPSLAGVQVKQEPIESEEEEAEATRETEPGQRPATEQELLFRQQALLLEQQRIHQLRNYQASMEAAGIPVSFGSHRPLSRAQSSPASATFPMSVQEPPTKPRFTTGLVYDTLMLKHQCTCGNTNSHPEHAGRIQSIWSRLQETGLRGKCECIRGRKATLEELQTVHSEAHTLLYGTNPLNRQKLDSKKLLGSLTSVFVRLPCGGVGVDSDTIWNEVHSSGAARLAVGCVVELVFKVATGELKNGFAVVRPPGHHAEESTPMGFCYFNSVAVAAKLLQQRLNVSKILIVDWDVHHGNGTQQAFYNDPNVLYMSLHRYDDGNFFPGSGAPDEVGTGPGVGFNVNMAFTGGLEPPMGDAEYLAAFRTVVMPIANEFAPDVVLVSSGFDAVEGHPTPLGGYNLSAKCFGYLTKQLMGLAGGRLVLALEGGHDLTAICDASEACVSALLGNELEPLPEKVLHQRPNANAVHSMEKVMDIHSKYWRCLQRLSSTVGHSLIEAQKCEKEEAETVTAMASLSVGVKPAEKRSEEEPMEEEPPL

SEQ ID NO: 518 - DNA, 371669 bp, Homo sapiens
tcctctgaaatgttcctctcctacatctaggatcccactctttccccaccaaggaccctacccttgactttaacaccagaagcttgctggagtatgaactcagcctctatcactttgtaatccaagcttgggcctgattttcagcacagtttgctctccaactgcagaagctgctaaaactaagaattaaaaaattagccaagcacggtggtgtgtgcctatagtcccagctatttgggagggtgatgaagtgggaggatcacttaagcccaagagttcaaggctgcagtgagccatgattaggccattgtacttcagcctgggtgccagagtgagattatgtctcagaaaacaaacaaacaaacaaaaaaaaacaaaacccaaaaaacaaatagtctgccatcagtccaatgatcattcctcaggaggccacctgccgtttctttgtggcgcttttaggaaagctttctttgcattggcattgggcagtgttgctaccataggtccagtgtatcattatgttacttaccatcctcagggctcgcaggacttcctgagcctgaggatccccctccttccgtaatgctaagaacttctcagccattatcttgctcctcctccattctctcctcctgcaatgccctgttctagatcagatacccaagaggctgagggtgaggtgagggctgctgtacaaatgctttctcgaggattactcgcagggggtaccctgccaggaagtgaagggaggatggcagggcagggagtagggccagaggaaggacagtgcacagcaggcgtggggggaagttaggaaaggtcgtgatttaggctcaagccagccaaggctcagcctgagcccatggggagctcaggagcatgacttgctgtacagggatctgggcttcctatccctgggggtcagacactggccatctgggagcggagacaggtaacctcccaagcatttccaggtgaggtgactcccctttgaccaacgacagctctctggagcatgacacagctgtaagccattcgcaggccacacttccaggtaatggagatctgtcccaagcacccacatggccaccactctcctagtaaaaaagagacgcttccatatcttttatcctggggtctgcatttggataaattccttgggtccatttgacaagttgctaacaaggttttctaagatgctttttattttccccaccgaatttttaattttaatgactacatttctcatatccagatgttttacttggttccttgaaaaattccactcttctttttcttagtgtcttattcttcggttcatagtcaatgtaacttccttgatgcctttagcaatttctaacatttatttttaagctctcttataatcccattgccttggctggaggcatcatcctgttcttcatctgctgactcttgctcatggtgaattgtttcctttgggttttataaacttacataacattttacatatttatataaaacctttacatcctgtcattttcggtcgtgaggtcattttgcgtgaggctctattcctgggaatcccgtgtaacctaggttgagggtgttaccctcattgccactgtttgcttctgccagaagttctgagagtatcctacacctggactacttttcatgttacttttggggcctgagagttcctggattgcgcgggtagcatgtatcaaacccaagtgagggtaggccctgctacaaatttgcaagaagccttttccccacccagaaccaaggtggaaacagatgctcttcctcattgtctctgtgttccactggccagatttttttctagtctgtcctttcactaaggatctagaattcaaacgcctcagcccctgagttagaggtatcaggaagggctttttcctaaggcatcagtttaggagatttctcgtctttacggagttcccttacttgcttgtatatactcagccatgtgttcttcaaaacgcagccttttaggcagcactcctaggtcctttgtaatgagaatgtttccaggtaagcgagtcagcccccttgccaggatcctgagctttgccctctcccctaccgctgaaatcttaagctgaaaataataatgtctttccacaagtctctgggctacagctactcagcccgggcactgagctcactggaacctccaggtccttacccctgcccttttctcatccaactctgcccttttgcccttcctgtcctctgcggcctggacctcacagtgagtcatgcccaccaccatagctagtacccctagggctttgctcctttgtccttcagccctaccaccaaccttgcatctatccaacaatacaagaattttgcagctggccttctcagtgctaccagaaaagataaatgaccctggtgccattacaaaccctgcatttgactgggtgggccctcagcaccactcagcaatgcttttttttgagaccgagtctcgctctgtcgcccaggatagagtgcagtggcgcgatctcggctcagtacaagctccgcctctcgggttcacaccattcttctgcctcagtctcccaagtagctgggactacaggcacccaccaccatgcctggctaattttttgtatttttagtagagacagggtttcaccgtgttagccaggatggtcttgatctcctgacctcgtgatccgcccacctcggcctcccaaagtgctgggattacaggcgtgagccacagcacctggctagcaatgctttctaatagcctgctcagctctctcttcaataccctgccaatgccactcccacagcacctggctcatagcaagcacatcacgtgttgattattgttgtcatcaccctgtctttactcctgggtctcagctcaggaccatgtctattataaacataaggctgccatcctcagcctcctgccctcacctgtagactcatctctgcccattctcaccccctcccctttctttcagaggccccctactgtttgaggatcttcctgcttggggttttcagagcccgtctgagacctgagcacaagggtcctgacctggcctcctgttccaggacccgtgctattgaagcaggctatctggcccctccagggtatctttctctctagctgagaagtcgctgcgaccgaccatcgtgggtgttgctcggggacccatgctccaggtgacaggggcccaggattccacatccagatgacccgaagccatttccaaacaggcacgggcctattctgagatccatggcccaaaggcagactgtggcacggggctgccacactcaggtctgcagggaggccaaggggtggctgtctgggagtgtgggtagagcttgaatcaggctgggcatgggagacaggctccttgaagtgcaagacaaggccagtggcaaaaggagaaaggaacaaggcagaggctgactgcagctccctctgaggcagaatcttgaggcccctgaggattttaaattccagacagttacagcgggatgagtgtggcaggaggaggatgggcactttccttgtcacagtctattggctgaatttgcccttttatttatagtatttagacacgagatgtgtgagcctctgcctgacacttgccacgtgccacacacgctcgggacgggcctggcactcccacggcatcctccacattcctccctgggactctctcaggggcacttcccccacgcctccgccctggccacagacctaccccggtctcccgtactaagaggaaaatacagacagtcccgactcaggagggtctgacttggcctgttgcagttttgacctaatttacagtgttcaatgagtgacgtgaggtgctcaaccctttattataaaacaggcttgtgtaagatgattttgtcccactgtaggctaatgcatgtgttctgaacccactggaggcaggcgaggctgagccatgacgcttggcagtttcggtgtattcgaagcattttccacttaggatggacttatggggatgctgcctgcgggaagtggaggagccgcacatgaaactttttgccttgggtctcccccaccagctcctcagacgctcctcacttcatgtttgcttggtgaccgtggtagctacccagccgatgcctctgagccttccagggtccgtagcacctcctggaacagcaggagacctggcctctggcctcgcctcagcaccccttctagcagctggagctccctctcatctcagccacgcttccatggccagtgctccctgggccccgcagatgcgccctggtgtctcctccccttggcctgtggtgcctctcttgtctcatttcccagagattctctgatgctcagagtggggtgtttggggggctctctcagaactcctgcttgcccagcctggaagcatggggggccttacttaacccctgtggggcagcacttgaccactggtgtttggaagctgatcgaaaaatgcttcctcctccttctcagagatgaacagtctggccaactgcacatcacagcccaggactggctgtccttcctttcctgtcccatctccagcccccaggtctgtcactcctgcctcctggggcctcctcccaaacccctgctgcacctgtgtccttgtatcaggctctgcttttggacctgagctaaggtagttggcacttaaattcctcagatagcaatcacgtgcaaacttacttccctgaacagcaaaggcctcatccggaggactttttcccagtcccccagcctccagcctctcagctctcggcctcttctctcttctcttcctggactccactgctcctgccatttctagccactccctacctggcctcaccccctgtagtgacttcagctcctccttacatgctaatgaccccaatattttacctcaaaaaacataaactaaagcaaaaatctcaagccaactttggtagcttttgactgggtctgcttggtcaagttcacttccattgaatcagtcacccaaggctgaaagctgggcaaggggacccaggggagcgtccatcaccagctgttttgttggtctcttgctacttatttcaatgagctggttgtgtcatccctatctggagcaggtcttgggttaaagtgttggagggcagagggtccgctgaaagatatggaagagttgaaagtcttagggctgtaattttctgtccttgtgatagtttgctcagaatgatggtttccagcttcatccatgtccctacaaaggcatgaactcatccttttttatggttgcatagtattccatggtgtatcgatgccacgttttcataatccagtctatcattgatggacattcgggttggttccaagtctttgctattgtgaatagtgcgtaccactcatagggtggaattgagcaatgagaacacgtggacacaggctggggaacatcacacatcggggcctgtcgtggggtggggagaggagggagggacagcattacatatctaatgtaaatgacgagttaacgggtgcagcacaccaacatggcacatgtatacgtatgtaacaaacctgcacattgtgcacatgtatccttgaacttaaagtataataataataaaaaaaagaaagttttagggctgtgagaagagccctgaactaccccacccctgctccctccactgcagcccaggctgcacctcccacatctgtcctacagcccccggctcgtgcccgcttgacagagtctctcagaccttgctgtctccttagtgaacttcatgtccttcttgaatttttttaaataattatttttttacaaaagaaaaacatgttcactgaagaattaagaaaacaagtgagcaaaagaaaacaagaatctctcattttccacttagaagaggacacatttttcctcattgtttttgtgtctataaatgctttcatttgtaaaaattacatcacattgtaatgaggtcttcttgtctttcttttcccttgaaactataaagtgaatttctttccctgatataaaaccccttatttttggtgatatatgcatacatattcatcccaaccaaccattgtttctgtggaccttttagctaaatgtttatcagcatccatgtttgtctctttgaatgaggttctaaaattgcaatcactaggtgaaagaaggtgcaaattttgcaggttttatttatgagtgtggttaagtagctgtctgaaagtttctatcagttgacactcagttgctgtataatagcgtttatttccacacatttgcttttatcaaacaaagcattgcacttcttttattagagaacatcctgtcatgtttatgggcgtttcttcttttgtctttgcctctccttgtccctgcctgctttatgtatgggctgctccgctctgaaaaccctcctgcctgtgaagatcagcctctacgaatcccacgcaaacgctttccccactcacttgtcttaattttattgtgttctgaagcaccagaagtccccccttcccctccaaactggggcagccactgccttcaacaatttttttttcttctgaattaaaatcttcctgagaaaggcacagctcttaaattcaacgagttttgatcggtacgtacccctatgcgatctacaccccagacagaaagtgtattatctccattgcccgggaaggttctcgtgtccttcccagtccaccctctgtaggcccccaatctggagagaactgttctgatctctaccccatatttggctgaatttcatattaacagtcatacagtgtaaacccttttgtatctgacatcttttatgatgttcttgacgttcaaccgtctataacagttcattcttttttattgctgagtaatattcccttgtattttgcagttggggtttatccattttcccactgattatacactaaattttaattacaacatagctaaattctcaattatttccctttatgactgttgacaatattctttatattccacaaccctatagagatgtccagagtttttccttagtactttttttaaaactgaagtctttactccatttgatgagtaaagatttcaactttaatatcttctcttcaaatgattagcaggtaccctaccatattgctttctcactgatttgaaaagccactttcattatactttaaatccctacaggggtggtattaaaactagtcaatagttggtgaggcacaggcactgaccagcctgcaaagctgcccattaagaacagctggagcacactgatcatacacatatcggctgggtatcagcctggagtcagtacatttgcttggggccattcctttactttctattattttgcattgatctgggccaatatcacgttgttttcatttcggagcccagataacatgtttttattttctggaagcacagtttctccttcattactcttctttttgactgctctcaaatctttattcttccagatgaactatttaacgattttcacaattcccaggaagttctgttggaacttactgttacatttaggtacttaaaatgtttttgctaattgagaatgtttcatattttctaacacatatgtaagtgcttagcacaaagctcaccacatactgaatatgcaacaattatttaattaccgattgaatgttgtcagttatctgaaagttactgttatttgtatattttataattggccagcttgccgatcgtagccagtctaggagttctaccaatttattggatccaccaaccctagattttaaaatttgagtctttgatgctggtttctttcaactgtgagaacacggagattcctttgagtgtgattcatttgactctgtcaaatacctgtatgtgaagtcccaagcgcgaatgctcccaggcattggggttgtcaccccacctttctccttatacacagctcacaggatagcgtgtttgctttcactgcacactatcgtactgaattgctctgcactggctgtgcaccggtctccttcagacagcccctctgacacataatggcagacacagccacccaggccaagtttctcttttccagacatggcgagtgaggttcttgcaccatccacccaacgtctgcgtggtgcctcactctgctggagtgcctctcaggactcctgtgaggactaaatggcacgcagcaatggggctacccattccttctaatggaaatctactttttaaaaattacctctgcaagcattagatcccagagctcgtttcacgtgactttttgcgcaggcacttctctttgtacgtgaaaaactaactttggtagacttacaggcaggttttaatattttctcgtgattgtatgtttttgagaatcctgtcaaatgatactgaatcttatctagatgttagctagctacagaccctgtttcattctacatgaaaattagatagtgcaccgtttccatcagcagccaagtctccaaaaccccgtaattgctctccttttcttcagctgtatcttgttttaaagttctctaattcaccattcctttccttctaagtttagcctaagcatttcttgcaatgaccaaagttttctaattattaatgagatatttaaggaaatgtaaaattggcatttttattttgctaactgtatttttatccacataactagtttcccccaccaagaatcacaggtcgagaatgctgtaaaaacggatcctttctcagctcctaaaaggaatggcctacaatcgaagcgaacgcgcatctccgccaggtccgcaaccacaggcccacgccgtcgggccccacgaaccggcgcgcgctgtcaaaggcgcttcctccctggaacgcgggattccggggacagtgtgtgcactcaagttgaaaagttgtcatactcctgttggaaagaaacggaaacatcaccaccaggagggtggccactgaagaccctcgccgacacctgctggcaaccaaaggcgcttccggggatctacgggccgacctgtaactcaacacaagcctcccaagccctgcggccttaaaacaacgcccacccgggcggtgcgccgttcccgccacctccacgcctgcctggacccggactcgagaccctggcggcgggccgggctccctccgcctgagcagggacgcggcgagcgcatcccacgaccctcggcagccgttgcaggcctggcggacctacaccccacaccctcacggccgcgttcccgccgcggggcagggcgaggcccacggcgcctgcgcactcagtgaccgggccgccctgcgcctccgtgcgcacgcagcaccacgtgacccactgccagtatccaagatggacgccgcggcgaggcctggccggctccccgcgttagcctgcaccccattgtgtgccctctaagcgcgaattaggctcgcagacatgcggtgctgaccgctaggcagccatgcgggctaccgagtgcgaccggacacggccggggcccgtgtttacggccactactggcccccggtccctgcgcctcctcaaccgcgaagcacccagcggctggcgcctggagcgtcttttggtacgccccaccctctagaattggcagctccagcagccaatgaggtccaggacgcgtgcggggaggcgggcaggggtggagcctctctgccgctcatagggcatccggccccgcggttgagcagccgctgggcgaggggtgggagcagacgggctgtgcgcaggtttcagcgggccaatggaaggccggccaggcgcccggggcgggcgggcgggaggcggggccgagccgtaattgacgagctcttcattagaaaccaggcgggagggcggggcccgcaaggggaggtgacgcaaggctgccgcagccaatggttggcgagccgccggctggctgggcggggccgggccggctgacgggcgtgcggggtggcctatcgccgcctggctcgacgctggagtggggagaagcatcatggttcaacgtgggtcaattttttgtgaatgaggaggggaggttgtggggccgccgccgcggagcaccgtccccgccgccgcccgagcccgagcccgagcccgcgcacccgcccgcgccgccgccgccgccgcccgaacagcctcccagcctgggcccccggcggcgccgtggccgcgtcccggctgtcgccgcccgagcccgagcccgcgcgccggcgggtggcggcgcaggctgaggagatgcggcgcggagcgccggagcagggctagagccggccgccgccgcccgccgcggtaagcgcagccccggcccggcgcccgcgggccattgtccgccgcccgccccgcgccccgcgcagcctgcaggccttggagcccgcggcaggtggacgccgccggtccacacccgccccgcgcgcggccgtgggaggcgggggccagcgctggccgcgcgccgtgggacccgccggtccccagggccgcccggccccttctggacctttccacccgcgccgcgaggcggcttcgcccgccggggcgggggcgcgggggtgggcacggcaggcagcggcgccgtctcccggtgcggggcccgcgccccccgagcaggtgggctccgggccgccgggagtgagggcgggggcgggcgggcgccggggccggccgggcgccgtttatgtaactttgtcaaatgctgtgagtttgcagaaaaacgtccctgccgggggtccgcggccccgcgcttgtcgtcgccgctgcgagcgcccggggggtcgcgggagggcggggggctgcccgggacccgctcggctcagcccgcagggcgccagcaggccgagacggggcccggtcccgctcgggggtgggatccgcgtttgccggcgttgcgaaaacacaccacggaatcataagcaaattatctcgtatttacattgagcgttgaattatttgacactgttataggaggagaccgtgcgtatcagttggaaaggccgggggtggaacccagtgtactcatttaatgcacatcaaaaatttgtaataacttgaggcagctgatatgagtgttttctttattgcatgttgtaaattgacctgctgtgacacagttttcaaataaagcgttgcagaaattaaacttaagttattttaaaactaatgactttcttcactaaatcctaattgcatgactgtagagacctacctaattgcttgctgagagcagttctgcttgctctccgtgagggaggaaagggcctgtgcagtcactttgccgccccgtttttctctgttcaggcttttctgtttattcccacaaatcaccgaagcagttaaggcctgggagtaagcctgtaaacagtcctggcccagcgccagcccagcaggactggggggatactggcaggtttgcaccttgacctggtttcactttttcttttgtaatatgatcgtggttgcctggagttttaattgcttctgataattctgtgcattattttcgggactgtccaaagaaggctggtgtggtggtttcaggacctagccaggaaaggtggtggtggtggctggggagagggagggtggaagggagggagatcgaattaagaaaactcagctgcttgtacacaaatatacactacagcagttacaaagcaacaaaagttattgcagaattttgcagtaactatggcaacacaattactctattataattggaaatgcaaaatgccaccgagttagaagtttcatcagaatggagttttggatatcaaaaatatgtgaaatttaattttttttcaggtagctcttgtgaattctaaaatctgtgttcaattacctatttttaagactgatcgggctttcccagatattctactctctgggatctgtggcatctttccccagaagaactcacatttgtgtgggagggaagtattttcatgccttaaaaacacacaccccaacacattgtaagacttctatagctttctgtgttctgggcttttattttagagatcaaatcccatcctaaagagagcagtaatcaattagaaaagaagccggctgtactcagcaggcagatgtaacgctgccctctttagggttctttctcctgcaaggggagctggcagcaggcatgcccccgggggagccctgggctaaggggacggggtggagggaagatgactggactgcatatgggcctggaaggcctagggacgaaggacagatgtggcctcggagccctgcaccagagagaatgttctgtgttcagcagcttcctagccatgcaaaataaaaatccccaaatgccatattctcggaggccttgggggctgttgctgtagcaagatggacaggacaacctggcacgctggccacgtgcggctcaggcagcccatctggactctgtggccagagacctcgttgagaagaatgccctatggatgtttaccaggaggactctagtgctggaagtttccacacattgtggggttgctgcagtttaattttgttataactctttccttttaactactgcatatttatgcccagtaatcgacttccattctccagcttcattgtgaggtttcaatgcagcatgaatggctttgaattccaatcctttaatgttgggggtggcaccaaaggaaaggcgactttatgctgtcttaattgccggagcagaagaaacatttcatcactcctgtagaattcatccataccattctctattgaaaacggctgggctttcatagctcagaagctgccatgagtaatatattaatacctgatgtagggcgcgaaggagccgcagaggccgagagaactgccgttgctgagaggcagcggggcgacaggctgtggccgggctttcctccgaggctcagaattgatgactgtagctggggatgggggaactgaagggcgaaggggcccagtctccacctaagcttggggctgtggaaccgagactgagcccctgccctgttgttggcagcccccagtctgtcctggggtaaggagtcggaaaggatggatttggagggagtgtttgttttgatttcaggtggtcagcatatgccctgccgtgtggtgggctctgggtttttggccttgacgttagaggcgggtactgcaccttctggttcaggtcagatgaggggtgccatgtcaaaagtgatgctacctttgaacagaccttaactcattcataagcgtttctgtgggaacaagtgtcactaaggtcagtaagttctcttcatacggtcagttttcttctcttgggcttctgtgcgtgggaagagtgggacctgttttggggtggcatgagggccatggtgcctgcagcattaaatggccatgtccccttgctgcagcctcactgacaaacctcctactcacttcctagaaggagggtcagggtcctacatgtccccttgctgtggccttgctgacacacctcctactcacttcctggaaggaaggtcggggtcctgcatagattgcccccaccgtgacttcctgtatcactgtcgggggatgaggatgtatcctggagcaaggagatgatgccacgagcagctgtcacgtgctcccgtagctgacgccagatgagcacctgcttggggctcgtgctgtttcatgcactcaccatgtaggtgtcagcacagtcctgcaggtgggctctacctctggaggaactgggggtagaatgaaatggaccatgtgccaccccctgcatctccagtcccaaaggccagttcctctccgtgcctctgcttctaggctggtggtgaccttgaagctgaagttcagcttgtcgaggtgcttgggcgaacacagcctcttagagaagaggacgatttggaatacctttctagttcagtgtcgttagactttctagtgctgtgttgactgttcttggcgctgttacaggcgcgtttcataggtctgggcagtacttctggctttctcatgctgtcttatgtcacgtgtgggactgcagaactagaagacatcatgttcttctcctgcaaagtccccaggacgcctggaggcaggtgggggtgacggaagggagctaatgctccaagtccacttcagccggagcagcttttagtgtttgttgttcggtctgttgattaccttggaagattttattggaagaaagcatttgaggaccaagttaatctactctttcaataccaacccagaaaccttaaagaaaatcttgacagatttaataggataagagttttttaaaaaatctctttggcaaaagactccgtcagccgggctaagagacgagagagaaaatacataccacattatgcctgtgtaagcttaatagtcaatatataaagagcttttacagaccaataaggagagcatgagatcaccattgcaagatgagcagaacgtatgaacattgaatcattgtgccagtgatgaaaggttagcattactaatcaattcagtgtgaaggagattccctttatgcctatcatattggcgagtttgatgatacctgttgctggtcataataataatttctattttgtaaggtttttgcaaagtttaagttaatgtatggaaatttccttgaatagggcctggcatgtagtaagcatgatataaatgttggctgttatttattatcatttgctctctggagagacccatatgtattattatataaaatataatagggctgggcgaggtaccttatgcctgtaatcccagaactttgggaggccaaggtgagaggatcacttgagcccaggagttcaagaccagcctgggcaacatagtgagaccctcatctctacaaaaaaaaaaaaaaaatcaggcatgacgtcgtgtgcctgtagtccccattacttgggaggctgtggcaggagaatcacgtgagcctggaaagtcaaggttgcagtgaggtgtgattttgccactgcacttcagcctgagtgacacagcgagaccctgggctgtcccccccaaaaaagtttatatatgtaatgtataaacataaaatagtgattaccgaattgctctctagaaaagtcttaagtgtcaaaatcttaaatgccattctccttgtccccacagttctacattttgaaatctattctaaggaaagaagataagtgtgtagatatccagacgtgtgtggaggtcggggctgcattatttataaaaggagtacttgttaaacctgctggcatttctgcactgtggcatcctccatgtgtagacaggcagaagtgtgcagtgtaagagggaaaggcggggtctggagcagtccccgggccactcctggttttaagtacatgggtctctaaggtaaccatcagaggtgaggagacggggtacacttttcttttatacatggtggtattgtagagattcttttggtaagcgtgtattacttttttacagtagtaatttgaaaacatttagatatcttcattggaaagaaaagtactctttaagtccttggcaagttgataaatatgctttgcaatagaagaatttaggggcatttgtttttctaactcacatgtaagctcttcaaggtggggactgaccctcggggtctgagcgggctctgctacagcccatcctacaaacagtctcccaggtttccaccagaagcaggtttgtacctctcattcccttgcttgaaaccctggcatgactttcctgtattcttaggatcctaaggtctcagggccctggaaggcctgcctgatcctggcctctgttttaccagcctcatctgatagcacttgctgtgtttgtggagtttcagctgccacctgctttactttctagctctctctaagtcccctttgacctcggggcctttgcacacactgttccccttccttggaatggcctccctttaccttcctcttctccagcccctcagttcatgctcatcctctcatcctttgatcccctgttaaacttagcctaatagcttttttcctcctttctaacagcatcccattgtgcaatttcaggaaggagctcattgtgaccttagttgtttaatgccaccttttctactagctggggctctgtaggattgaggggccctgagggcctcatgcctgctctgtaccctgtgcttggcagtgtaggtgctcgaagaatgaaagaaaatgaatgagtgaatgaatgaatggatgagtaggtagcccagtgaatggcacaatgcgggccttgggtgggagagctggggtgaggccccacctctggcctggcccctctgcggggttcttgccagtgctctggaattgcctgtttcctgacaccccctgcccccatctgggaacttcttggtcctgattttggagattacatgctcctaaggagatgtcataaatgcaagtggagggaattctgtgatgcagaaaggaatgggagggagaagggccttcaacacagctgtcgagtggcaaatgcgactgttgtgccaaggccaaggcaggtgtgtgcagcttgttctccagccgcttcgcccagggccccggcgtgtgaggaggcgagtggtgcttttatgaagaagtttttctctgcttgttttaaattagaattaatgacattatttaatcacttcttatttagcgtcataattttaatatgatacattaatatgtttgtgtacataaacattttggagtctgctctgtttaaaaatgtgagtgttgggctttgtgagtttactgttgtttatgaagtactccgtctgtgtgagtcaagtgcttttgctggattgatgtttaagcttgaaacaataaatcagttcttaggacctgaaagtctgaaccagcattccaagtgggagtattgttcaagcggtgatggaattgcattttcccttgggaatggcccatcatctggtttatgtgttgctatttgctggagcggttcttttttaaactgaggaagagaagtttctgtggtatctccactggcctccctggtggtggggttgggggtggagggggggtggtccttgggggccatgttccctgaatatttctaattgattagttattattttgcaaatactcattttacaccccagcccaagtactaggttttacatgagatgagactcagttgaacacattctctgtgccagacgcagtggccagccccatgaccccaggcttgatcaggaaaactggcctctgcccacaagaggctttggtgttggtagggacagaggagaaaaaggagctaaacaggcaggtgcacacgggtcaccatcctgagaaccagggctgtggctggagggcttgcttggtagggagagccgtggtgcaggagccaggcccagatgaggaggaggaaggggaggctgggtgggtgggaatggggtgtggtcctttttagccagagccagagtttcggggctgcattgtgaaaagggcattgtggccagatggtggcctggtgactgaggtctctgaggccagagtgcgtgagccagtgatgagccgggccaactggcaggctgcctgggtggggtggaggtgtggtctgcacaaaggacttccttgcgttttcatgtatgtgtagtcttcttgcatttaatggagagtttgcttctgttctttctattttgtgcactggtgcctggctccagctgggtgatggacctgatctctcttgttctaactttgtggaggcaggcccattcagatgcatcccaaggaggcctccaggtggtccatggcgcggctaggccctccttggggcacatgcttggtggtgctgttgtggggacttctgcatgaaaagcaagggcagcttccaaaacaagggcaaggtgaagaaggtggctcacacgccgggggtcccagtcctgtggctctgagacgggccgcatccagaagggagggggttccttccttctagcagtgctggcgagagcttcctctgtgcctaggtccaggattctgtagagtagctgtcaggactgaagcctgccaggagtctgtgtagaaaccgtgctggaggggacccgctgggggacccgagctggcacccccagtgccaccggtttacacaccagaattccgggtctgaggctgagcccagcctggcccatctgcaggggccttgctggctggcaccgtgccatgtaagtcaagtggcagaaagtgggcccccagcaggtcagcagagcgtggccaagggcccctgagcctcagtcctccctgtggcctggggctaatcccagctggctattgaggacttacccacccccaggactcatgtccgagccccgtaagctcaggggttagagtgttctaaggaggctgacccccattccacctctgggggctgtggacaaggaggggaagatggcctgtgggtccacacaagcggggtgtatcttaattagtgatgccaactgtgcctccttgcttgcaggatgtgggtggccctctgaccttttggacctttaaagtgagccataaagaaaaccattgggaggttctggcatattaaaaccccctctactataaaatttacatcagattttgcactgaaaaaatcctcataggtggtcacagtccccattctttggagaacacttgtttgccagctcaagggctctgtgttggaatccgccccttggctctccaggtcagaaggatgcatcaaaggagatgtcactggggtgcctgtgtcttctcgcctttcgagtgcctgccctgaagcagcttgctttcctttgcccctgagtgtgcagcacagcccagcgtagctcggttgctggctggggcagcagctgacctgcagagccgttacgtgcatgcccgctgccatccgagggtagcagccgggctgggccatcccacccctgcccggcatggtggcccgggcaggatggggcctggtgtgggagcatccaactcacctcccaagctggtggggatgttgaccttttgggcttcggagttcacaaccaaccatgtgcagtgcttcccgcggtccctccctgaagaagagtgtctttccatgtcagcgtgccagcttcagcacacgcgggctgcgttctgacgaagttctgttttcagaattcttctggttaagcggaggccagagctgaggcacgtgggagctgcggagggcctcttctcttgtttcacgtatccttctcctggttcctcggtgctctcgtgggtgtggggtgaagggtctgattggtggatgtgctctctcctgctcgtcacactgccaatgtgcctgcagtggacaagagtgatttgcagtgatgtcctgtgttccatggctctggggtgttgagtgagcatcggttgagatcccagcttcactgtcatgaccccatcacctcagtgagtcctttgtcatctgctgagtgagtgtctctcccgcagagactcagctttcctcttcctcctcccccgctggctctgaggacacacagccctctctgctggcaggtcttgggaggaatgaggagtagggtatgtcccctgcccggggcctgctgctgaccgggccttggatgcacctgcaggactttctgaagctcctgcacctgctcagggtgtctctgcagcaggtcgtggtgtggtggacgtctccccgaaggaccttagtacagtttgagaacaagctctcgtctgcctttgtccttgcagggactgtgtcatagtttacagagattagactcttgaaagctcagaagcaccgtgatgcttcccacggacactgtcagcccccagggcatgctgcgcttgttagggacctgaagggccagcgtccctacccggtatgcagagcccggctcgtgatggtggctcagctgctatggcatgtccagattgcgccttggccacagtgtgattcgtatcgaggccgagccgaggcccctggccctgaggatgactcgagcggtctgatggacactgtgccacggctttgccgtctgtcatgcttcccagtgtgctgggagagggagctgccctgagactgtggctgtgcgtaaatccaggctgccccgctttccctccccttggttctttctgtcccgtcttcactgcttctgatttgcatgagcagggaccctgaaggactgtgtgcattttgcccactgccttggtcagagggctaccgggtgtggctgcagtgtctcaagggaggctgcgtggctgggtgctcaggtccaggctcggggctccaggcatgtggcggctcctggtagcaaagtgaggggtagtgccgctctggagggcagtgaaggacagggagatgggagaggtcagggctggggctgcggccgcatggtgcccctgtgggcacagctcctccacaggtggagggtgggaaaggcactctaaggggatttttgggggtggcttccaatatatatatatatcttttgagacagagtcctgctttgttgcccaggctggagtgtactggtacaatcaccactcactacagtacaatcaccactcactgcaaccttgatctcccagcttaagcagttctcttgcctcagctgcctgattagctggaaccaaagacgcatgccaccatggctggctaattttttgtatattttgtagagatgaggtttcgccatgttgtccatggctggtctcaaactcctgggctcaaacagtctgcccacctcggcttaccaaagtgctgggattacaagcgtgaggtactgtacctggctggcttcgagggaggtattgagcagggaggtatttctggtagctccccatcagataggatctcgctaggtactgtggcctcagggaattgtttggcttgttttcctagaaagtgccggaggaggaagtattcaggcactgtttgatccagctcctccacagtgtcatctggggcttgtttctttgccctacctggggagagtcagcttcatgggatacacaggccctgcccgctgctcccagggttatatacactggctggttcacacccatcaggaaggacagcatctttgtcttagcaagtcttggattcactctccttcggtctggctccagccacgtattgaactctgaaccagtcactgtgaccggggtgcagagcgcaccgagtggctcagcctgggtgctggacatgcctcttccagaagccggctggggaactggcctccctggtatggaattcactgatgtcaggaaggaagggggaaggggacagatgctgaggaggaaagccgccagtagcgtcctcagtgaatttagctcctcgtgcctcatgaatcccagcagcagttccagaatagtcttggtgtgggctcagtgtgcatgggtgccacactgaacgctctgcggacctcgcctcagaatcccttagcgggcctctaggagggcagggtgggccccatcctgtgtccggagttggttccttccagtgggttcttggtcccactgacttcaagaatgaagctgcagacctttgcggtgagtgttatagctcttaaagatggtgtgtccggagtttgttccttcagatgtgtccggggtttcttctgtccagcaggttcgtggtcttgctgacttcaagaatgaagctgcggaccttcgcggcaagtgttacaactcttaaaggtagtgcggacccaaagagtgaacagcagcaagatttattgtggagatcgaaagaacaaagcttccacagcatggaaggggacccaaatgggttgccgctgctggctggggtggccagctattattccgttatttgtccccacccgcgtcctactgattggtccattttacagagtgctgattggtgcatttacaatcctttagctagacacagagtgctgattggtgcatttttacagagtgctgattggtgcatttacaatcctctagctagacagaaaaattctccaagtccccacccgacccagaagtccagctggcttcacctctcaatcccagaggcagaatgcgggctcccagggcctgtgggagaagccctcggcagggttctctggcagtggagactaacacacagtggcctccctgtgtctctgctgcttcctgggaaaacccggggccctggaagtcagagcccaagtgtgccaaaatggccagtgggaaaggtggatagaagtaatggcagctcagcagggagatccctccacacactccctccgctgatgactggctggatgcagagaagcctggggcccttagagtggggagtgggggccaggaagggaggagcctgtgtggcagagtccctgcggctgcagcccagtgaccccaaggggcggggtgggggctccaacccacaggatggtggaggacggatcagggccatggctgccaaaggggggcccagagggtggtccttccagccgtgcggtccagctgccctctggggccaggcacccaggtcacccagaggaccaaggctctgctggtcatctgaggatgctccagagaagggttgagccatgttggctcatctgtcccatgcagaggtgggcaggtgcctgagaaggccgatgcaaacgtggcccgggcccagatagtcctggaagccgcactgaccgcatctgcctccctgcgggcaagtggtgtgttagaaggaatgtgctttgggattaggtggatgagcttcaaagtccaggcttgcggccctccagcgagcggagagccacagtggtcagtttgccacctccctcatccgggtccacccatctgcaaagcagacttcagggtttcctccttgaagaactgttgtcaggataagtaacacaggaggtcaatggcccagcctttccccaaccccaggtgctatgaggtgaatgaactcgctgcctccctcggcttcagggaggacctgcccagccgcgtcctgccatgtttctgcagtgggtgtcttctgtgtgctgggccccatgttatgacgtgtggtccgttagtccctgcacacctgtggcgtggatacccgtcctcccgtctgatacctgtggccactgcggccccaagcgagagcggtggggtgggggtgtggatctgagctggctgctgctcctgagcccacgccttccactccccttagtgcccattgcaatgcgtggtggaaccatgagccccaggcaggaggcgcggctcctccaggggcgcactcttgttggaaagtagagtgaggaggagctcggctttttaggctttttagggcccaggtgcatcttggtggagccacgttccagctgctctggtgccattgacccaaccgctctaagcctcggttttcttctccacacgatcagaattgcagtatccctgccctggctgaattgttttgggtataaagcgtattgtccctgtcagctggggcacaaggctggcacagatgctgcctgaagacaggctggagctttctctggtcacagagtgctgtgcctcgtcctgtctctaggctggagggagaggcagagaacctcaaacctgcacacctctaagaggaggtttcttccaggcgaaggtggggggttttgtaaagtaaggggtgggaggctctcctgggcattgcgttggtggcggccggccctgtggtcctggccaggcacgcagcggcgggactgaggctggaagtggcctcctggcctgggtgcaccgggggatcttctggccactctccagcccctgctgcagccattctggtgcttgtgggcccgcggctgcttcagtgggtgaccccatccaggccacttgtgagcagtcccctcttctctgtctttagctcccactgaagttctaggactgcagccctagtgagtgttcttcctcctcaacacacatgtacgtgcgtgtgcacgtgccacacacagcaagcattcccacccacacactcgtgctccccggacacgcacacaccctcatacagatagacgcacggacagacatctgcacacacgtgctcacgcactggagtcgtgtgcagtctggctcctctggcgtgattcctggtgaacccagaacagccactcacctctgatcgctgccacctaatgaggaagggtggagtttctctaaaatgggtacatctgatggtggtgagggtggcgaaatcctctctcatgcacagttctcacccagcttctcttctctccagggagaccactgtgttttcactgttagaactgggctgtctctggacaagggccagccttgttacgagcagaagttctcggtactgtgtctgggatgtggctcttgctcctctaggtcgtgactacgttgtttatgaaagtcaagctcttacacctaaagccggtgctcatgggatttccttacagtgcattacattgttaaatttcaggcccagacgtggtctggcggcttgtctggaacacacagtggtgctccaagcatgcctctgcatggacgccttacccaccaacatccgtgggctccagaggcctcgcaccctcccctggccggccaccccgggatgcccccaggacctgcaccctcagctgacgctcctcttgggaaggtggttttgaacctctgtcatgtggttcctcccgtggttgggacacactcatctgcctctggtgtgacccatctctctttggtctttcctcgtccctccagtgccacccattttcgtacagaaactgaggatgcctctaattccgtttgagcatttgagtctcagtgtctgtgaccttgactccccctgtgcggccgccccagccccagcagcacagtcaggactgggacctgacagtggctctgaacctccgagacacaggccccagcctctcttccctgtgctccgactctcagccttccttctctgccctggtcctggcatcctgtggctcatcattgtctagagtaaaacgcaggcccctctgccttgcctgccgggtcttccagggtttggcccagcctccccgacccagattccttctccctcatccttgggtctggccacattgtttagcccttgtttagggcacacctgagctttcctgtccctgggcctctgtttaccttgcctccggggcttgtttggggctcccagagcagagctgtaggagactgtcttggaccgctttccggggcccagtggcctctttttgattctgtaccggcaggaagggtcatcacagcctccgtggcttcctcggcactcaccgtggcttgcctggcctcctgtcccctttgtgagttgtagtgagtaatggacgaggctgcagtcaggctccctgtgtcctgttgtatcacatggtccttctggggctcctggggtggcgtctgtagaatcagggacaggcgtgtgcgtgttccttatcacaggccggctttgcccactggtaggctgtgctgtgcacgtgaagctgcaagggctcctggcacaggcaggcagggggcttgaggctgagacttcagagggaacaggggcccctgtggccactcatttccatgctctagctctgccttcccgctctggccaccaacagggagccgggtggaggcagagcttccccgctgctgagctgggcagagtcgtgggccaggagcctccttttcttcagtcctcggaggtgacccggaggcccccggaacctcctgacactgccagccagtgcttcctcctgctgagagcagccagcccgctgtgtgcccccatgtactgagctccaagagtgtcgcctctggctaagggaagctgagggcaaggcttcttcctgaggcttggaggagacctttcagctgaggtgctggggatgctggggagagggcctccacgcaaagcagtcaggggctatgggcctccgattgtgccagtcctgtggaggcggccgggaagcaaggtgcccttctcaggagagagagccaagatggaagggaagggatgggaagggctcttccatggaagccttgtccctgtccctgtgcacaaaatgtccgcagttctgttctcctgtatcctggctcgctggagcccttgggtgtgcacctccccatcagtttctgggcccggtggggtgcagagaggagccctgagcccctcctcaggtcctgcctgtgtctcatcttcctggtgcttggtccgagggctgatgtatttggaagttttatttaagctgttgtattgttaaagtgtcatctttgtatgtgtttgaatacaaatcggcattttagggatcagaagcaggggacagagccgtggggtatatggtgctggggccatgtccactgaaacaaagcagactcattgttgccgcctaggacccattccttcggatgcagggcagttttcccttctctttcttttcttccgtttcctttgcctttttctgagatagagccttgatctgttgtgcaggccggagtgcagtgggacaatcatggctcactgccgccttgacctcttgggctctctccatctgcctgcctcagcctcctgagtagctgggactacaggcgtgcaccaccacatctggctttttttttttttttttttgtagagacaggggtctcactatgttgtccaggctggtcttgagctcctggtctcaagggatcctcccacctaggccacctaaagttctgggattacaggtgtaagccaccatgcctagcctcagttttctttttcattaaacatttccatatgatagagagaggtactaaaatatgtcatttcgaatgtggctttagggagatcatggatcttttcagcccacgcaggtatcccagattacgaacagctgatacagaggacctgggatctgggcatcccctaatattagcctgggtgtctttcccatcgatgtggtgtgcagccaggtccccctgggttttctgcctttgcagagcacgatggagggttgcccacgagctgcttctctgtctgtgtccgggctgttcgtggcttcccattagaggcgagagtggactgcgcctcgttactcacgtcagtaggcctctcgcacggtgcccaggtgccagcgatggcagctcttccagccgccctgccctccagtggctctcacgtctgtccttgtctggccttgttggcggggctgatgctgtctgggggactctgtgggactgtgtggatgagcttcatcctgtctgcatcctgtttccactttgtatcatttttctcactttccagtctctgttgtccattcctgccccggccatcgttgagggaggggccatcagctggcccgaggcagtgctctaccctgccccccaccccacgcccttgagtgagagctgctgaggcggtgtcgttgccgcgctttctcccaccaggtacagagagggaataaatggtaatggattgatcgggcgctctttgagcgtattgggtttgcaaaactaactgcttccttgttgcttcattgtggcccagactgcgcttgccgtgggtttctctgtggcgctcagaggagccagttgaggaggcacctgttccggctgagtgcttaagaagccgacctctgccacccctgcccctgcctgcccacatgtcatcagatctgtttccaagccctgctccatctcccgagaggcagctttatccttctttcagattctgaactcacagacactgacgtttgtccagcctccaagcgaggatctgctcagtggttatgcactttacgggaaggtgcagggctcagagcagtgccagggcctcctgcttgtgaggggcatcatggtggaggattccccctgtgggctggagccagggtcaggggtggccacgggaaacaagcacatcttcctcgacaaggggagcctttgggtgagcggggtgagatccgtgaactggactgtgagaccgtgttggagaacactgggtattaagccaaccatgcctgtaacgtgggcagttacacagtgaaatgaacacttcacttgagttgttagaaagtgtaagctgttgctcacgcctgtaatcccagtactttgggaggccgaggtgggtggatcacctgaggtcaggagttcacgaccagcctggtcaacatggtgaaaccccatctctactaaaaaaaatacaaaaaagttagccagtcgtggtggctcatgcctgtaactccagctactcaggaggctgaggcaagagaattgcttgaacctggatggctgaggttgcagtgagccgggaccgcaacattgcactccagcctgggcaacaagaaccaaactgcgtctaaaaaaaaaaaaagaaaaagaaagtgtaagctgttaaagaaagctcccatcacggtgggctggcttttcctggcctggccccacccacaggacccctgggctgtttctcccctttgtggggaggagtcagggaagccctgtttgggggcccatgtagagggcagagcactgtggctccggggttcagtctctgagacgtggcccatctgggtcactctgggtggtcctacccattacatgatcagaaaggcacaaagtagaaaatgtgtatcttgtattgcctgagagttttattaaagcatttccagtatcattaatattagaggaactaaattggtagaatagatcagcaatacaaataagcagttgctgtaattgggaaaaatactaatgatttaatttgcatatgtggcagaagcgacgttttatgattgctttgataataaaagacaggctgagtatcaccaatgcacgcaaataaagaatccattaattctattcatttaaaaaaatggtattcccagcttctgcagcgacagtttaacaattagcgtgcctaattttaatctgttacgtgggtgcaggtcctgactaacttgggaaggcagctcctgctggtgtgagtctgtgctgtcgctgattgtgctgaggaatatggagatcccagcccttggggaagcagagcccttggccctagggagccgtatgtgatctgtatcactgttggctttgggggcctgagcaactgggactgtgttgccctggcttccaaagcccagtgagcagtctcagctgatggagtgtgtgtgtgtgacgtggaactggggggcggtgacttcagtcactctggcttgagtctattttaggggatctctcgcctaggaggttttgcaccctcctcccccaggggacatttgtcagtgtctggagacagttttggttgtcacatctgggggcgtggtactggcctgtagtagtttgaagccagggttgccactgaacattctacagcacatgggacaatgaattgtccgtcgcaaatgtcattggtacctagggtgagaagctctcttgtcattaagtccagaacatgagcatttatttagcattagaagtaaatggcaccgcatttgcccagtatggattttgttccactgtacagtcatagaacttaaatagtaattttgaaaactcttgggacaagttacatacatcatttaccagcttgggggtgaggaaatgaaaccagctttcatttacatttttttgcatgtgaataaaatgtacctttctcctctccttttcgtttcttttcatttctccatctctttcagatttgaaaaatgggtttcgattccccagaacttacattttcccagccagagcgtgttttgcatgcagatgtagttcgagataacaaagaggcatgtttgtgttgtagtgactacataaaaagaaaggatattgctgaattgtaaattgcatttttagaatatgctaaaacgaagcactgagagtcatttgtcttcactgcagctcagctcactgcgtgttttcattgtagtgattgaggaaggcggtcgcgggaggcagctccgtgactcttggttcctagacggtttccttcctcagagcatcgcgtgtacgtcacgtgttcaggtgacagctcagtcaccataaatatactttaaacatcctgatgtgtgtgttgtgtgtgggatgctgttgtttcagtcactgccagtcattttctcagctatcaggacgtgaacccgtgtttgctccttgcatccgggaggcgctgctgaggggtgacctcgatccacaggaagtgtgcgctgtgtacgggaacgtttaaaccgggcatccctcgttttctgagatgggacgtgaaggccgagtggagatcggtaggcagcagcaatgcctctgaagttggggacaaagcgggaaagaatccatgtgaacaagcagtttgggcaatttatttgattgtgtgtgtgtttccggcttttaaatataaaaaaaattttcaattgtggtaagaaacacctaacaaaattaaccattgtaaccatttgttagtgtacagttcagcagtgttaattatattcacgtggttgtgcacccaatttctagaattttttcatcttgcaaaactgaagctattaacatacacccattaaatagctattcaattagagtttttaaaggcaggtggttcttctgaaacacaaggttactgtcaggcccgtggtgaactcaaatgtttgctaactatagagagaaagatgggaaaaaacaaatgtttatacatacaataactatagctacacatagataaaatatgtctatattatcaatatagaatacatagtaaatgtgtatttataacatatgtataatttaatgtaaatgtacattaaatacatgaattatataagaagttaaatgtgtgcacggacgtgtgtgtgcatatgcccatcctcgatttacccaaagacgcgggccattgcagagctcgcgcattccgcagtgggatttcttcttattcctctggtccagatctccagaactgattgtgctgttttctttctctgaatgaatcgagcctcatgagggccctcttggctctggcacccatgggcccacgccgcgcccccgaccccaggtctcatcccctttttcgtgcacgccctcccagcccagtggagtcttggcgcccccggctggatggcaggctggccacactccaccacgggccagatggagcctgcagtctgcatccgcttccccccgagtcaccccgcagccaggtccggagcattccactgtctccctatcccactgtcagtgtctgcgtgcaggtgctgagcctggcttggtgttcttctgtcctttgtttcctgtgaccctgtggtgagtgtgaccccgtggtggggcaggggctgctctctggccttcccagtggagaggatgagcaaggggccccggcagccgatggggggcttggagaaagggcgcttaccccaccctggggctccttggggctgccaggggaatggtgcccaggctggctctgaagatagggtaagatgactgggccaccaaggtgggggctgtggggagcgctagggaggccctgccaggagccggtgccctgagagcagggcgggcactgggccagctcaggccgaggggacctgccagacccctcctgggagcttggacctccttgggtaagaaggagcagaccttgatggggctgggctggggctgtgcttgagggactggagggtgacaggcagaagagggcagtggctccacaacgggtagacggggtgagtcttggtgtctgtcagtgactgccagcatgcccagcatcatcacacgctctgctttctcctggcaccggcctggtgcgtctccccggggctcgcccacctgcgcgggagccagcacttgcagggacccaccttcctgggttggtcacctggcttccttcctctccacccccagcgcccactccccctggctggactctccctctgtcctccgaggaacagcttttcttggcggcctccacccccagctcctgccttcctggagtgacttgcccctgggctccctgtcacttctgaattacttagcctgaggagcgtttcttccctttgtgtctccttccctagggcacttcctctttaccttcccgtcccacccctgcggctgacactgaagattctgctgtgtgccagtgagtgagcgggcccagcatgggacacttttccttggaaatgaggggaaagagggctgcttcctggggaactagacagagcttggcagtcttcgaggaggcctggtgtgtcctctttgttcgaaagactgttttgcctcaggccaaattgtccgactctgccaaggcaggaaggagagtaggagatgcatggatccctcaagtgaacaagagaagagcccaggacatgccggggtcattggttgctggggtcattggttcctggggttattggttcccggggttattggttcccgggttcattggttcccggggtcattggttcccggggtcattggttcccggggttcttggttcccggggttcttggttcccggggccgtttcaggccacctctggctcctgagagcgaggggagcccatggaggcctgcagaggagagtgggaggtgaggacagggacctctggatatggccctcaacagtacgatggtccttgtgatgctgccatctgggtggtgcacgttcagtgtgggtgccagccctggcgcagtgtcagaacagccgtggtcacgttgagcatgtgactcagctcttcgttccccggggccaacgccttccctcttccaggccatcatcgtgtggaccccagctgccaactccgtctccatcctggactctgctttagtgccctccccaccctggtcaccgctggactttatgtgcctgggtgctcgtctcccccaggaaggaaggaagtccccaagctgtcacggatgcccactgggctgctcttcgacagacgcctcagggtccaagaggtgtctcccgggccagatctatgtgcacagggcatgtccccaggctgagaggggcacccacctgccgctggcattccccggatgttggctgagtggaggggcaccgcgtttgctggacagaggggatgcctcaggacgcgacgtctcccctggaggacaatggccataattctttttgaaaaccaggcattttgatgtccatagaactcctatttcagggaaaattagaggtccttgaggtgggtgtaaaaccaagcaggtggggcgctccccctgtggcatatggagacagtcccagcagaaggtggcggcagctgagctcagcgcggtgatcagtcttgggcctgggcttgtctgcctggccgtgcccagttgtgtctgagatgtccgtcttgcatcctggcaggtgctctagggtcctgggggtcttttcaccacgttgggtctctgcacataatactggtcccagccagatgagctgtcagccctgccccttgtgagaagccagtggtgagactgtggccctggggcctcctgcccgcacctcggctgctccaggttggtggtctgggcgaagtgaggcaggatacatcataggtccctttggggaaggagaatctcgtgctccctccattgtggtgatgcaccgagaggtgtggagatctgcatagaagacagggcctccaggagggtccagagaggcccattggtggcagagaggatgcaggcgtcggggcagccctcgtgacaggtgctgtgttgcagcctggagcaggcctctcatgctggcaacacagagagtcacggagtcagaggccctggacattttggggcctccagaggcacacgtggcctgtgagccagcacctgtgtggacagcgccctggcagtggcttcggttagtggacggcctcgtaacctgtggtggcgacgcctcctgagctggggcagctgacgcctggggaactgcttttggtttcaagttcagagtcagagtgagcagaggtagcctttgggctgccatagaggagcgcagcccaccccggctttgggaggacagcatctgggcaccgaaggcagaggccccgcaggctggggatgtctctgaagcacgctcacgggtaaggtgttggttccaagtgaccgtgtctggcagggcagtggtgtgagtaaggaagtggtctatgtccaggagggacgggcgtggaatagctccccttccaataaggacctgcactcagagccacttattattgaaacttgctatcatcgtgcaaccccagtttgtgctgtagttgtcatcagtgtgtcagaaacattttgtgctgtgcttactcagggagtctggttccaccgagaccctgcctcccagccgtatgcctgcattatgaggatttgtgtcatagcagtggcgtgttctgttgagcactgtggctttttaatcgttactcaagtgtggccactcaggctgtattcaggaacacacggtctgaactaacaaaaaactaggcgtcccgggcaatctgtggctggatggcgttcatcacctccccctggggcgggtgttgtgctcccggcaggtggtgtgtgtggtgtggccaggaggccatgttactgatggtagtagacacgtgccttcgggccagggcggtcgacagagtctgtgtcccacctctgatggcgcggtggtgacatctggggcaccatcaggagggttgtgagcacacagcaccttcctcacatctgggcaccatcaggagggttgtgagcacacagcaccttcctcacatctgggcaccatcaggagggttgtgagcacacagcaccttccttggtgtttggatggtggagggttgtgagcacacagcaccttccttggtgtttggatggtggagggttgtgagcacacagcacctgccttggtgtttggatggtggagggttgtgagcacacagcacctgccttgtttggatggtggagggttgtgagcacacagcacctgccttggtgtttggatggtggagggttgtgagcacacagcacctgccttggtgtttggatggtggagggttgtgagcacacagcacctgccttgctgtttggatggtggaacatcattgcccagaacctgccagccctgctttagggaccatcaaaggacacattgaagcagagtcagacgaggctggccccagggcgtccagcaggctgtggacaggacatgacgtggtccaggtgacactcgcagtcgggtggggtgactgccaggcacccccctcttctccagcaccctcccccataagggccggcaagaggcctgggctgggcaagattgcctgcagtcgggggcactcactggttgagggagcccagactccccaggccccctggggggccatggaggaaacgcccgtccagagcacctggcagtgggtgctccatggcaagcagcgtccccatgcgatcttccaccccagactgcccttctgctgcgccactggagcctgtgcgtgactgagttggcaggaccctctcctgcagtcatactggaaggctgtgatggcctgtagcgtccgtggtgtccgtgtgccaggtaggcgtgagtgccatcctgtggacgctgtgaggcgtcaccactcgctgaggtcagtggtgttgccctggtggggctgaatctgcatggaggacgctcaggcctgaggcaggggcttcgcttcacacatcctcacggtggggttgggctggccgtgggccaccaggcatcctcgctggcccggtgaggacaagtgagtggacggtccgtggcctggcaggtgttcagggaacatttagggacatgcgtggatgggagggtgggtgggcggagtccgcaggcctgcaggacagcagagagaccaagcaggctctggcacctcccggggcaccctctgctcctctgattcccaggcccctggctctgctgacttcttcctacgtggctgccctgccccaggcacatctgggcgttcctgctgcctggttcccaatgtcagtgttcttcacagctctgtggaccctgcctggctctgcgtgttctcccagctgacccatcagacccctgcggctgcccttcctgcccgcagcaggcaactcctgagtctgtctagctcacacccacccgtccaggtgccctggcagcgtcacccctcacctgggtcttcaggccgtgagccttagggaccgtccctctctttagatcgggtctctgacttacacagggtgcccgatttgcacgctgcccttcacgtaccgccagggtgggcctgtgcagctgacaggacctgtggccagcttggctctcgtccaggtttaggtgtcttattttcattttatctgaaatttgagatcttctgattatctttgatattctgaaatttaaaatttatcccatttagcacacatgagttaacttaatttttaaagccttgttggccgggcgcggtggctcacgcctgtaatcccagcactttgggaggccgaggcgggcggatcacgaggtcaggagatcgagaccatcctggctaaaacggtgaaaccccgtctctactaaaaatacaaaaaattagccgggcgtagtggcgggcgcctgtagtcccagctacttgggaggctgaggcaggagaatggcgtgaacccgggaggcggagcttgcagtgagccgagatcccgccactgcactccagcctgggcgacagagcgagactccgtctcaaaaaaaaaaaaaaaaaaaaaaaaaaaaaaaaaaaaagccttgttttctattcatctggggtggtttcctcctctcctggtcaccctcgtcatcattgtcggcatcattgtcatttccctgcagcgcctctgacctgtgttttcctttggtgggattcctgtgaatgccattttggctactggtttatttctctgatatttactcaatgtgatctcccaggtcctctgtgcagttttgttctgctgttcaccggctgaagttccaggccctgctgcctgatcgcctctgctttgcatccgttggtgcctgttctgcggacgccatagcatcactgttctcagtgtccctccttagaggggcttgaattacctctgtgtcttccgggctcagtttttctgtgtaccttggtcattctttttcttgcttcaactttttcagtggctggtcaattgttcatatctaagtatgaggggaagatacatttcagatggattcaaggcttaactgtaaaaagtaaagcaagagaaatctccaaagacaattggggcatcagggacccgtcctcattgaccccggatctctagaagcggacaaagatgcaattgacagaataaaaatgacaacttttgagtggataaagatattagcaacaaagtcaatgaagaaatgagagttttggaaaaatatgtgtaacatttgacaaagctgaggcaggcggatcacctgaggtcgggagttcaagatcagcctgacctgcatggtgaaaccccatctctaccaaaaatacaaaaattagctgggcgtggtggtgcacgcctgtaatcccagctacttgggaggctgaggtgagagaatcgcttgaacctgggaggtggaggttgagccgagatcacaccaccgcactccagcctgggcgacagagtgagactctgtctcaaaacaaacaaacaacaacaacaacaaaaagtttactatggagaggtctcttccaaactggagagaaagaccaacattagaaaatgaacgctcagtgtgaccaggcagcccagggaagaggggtcgttgcagacatgcccaaactccccagcccccagggagatgcccagaaaagtcagcagagatcgtgctttttacctagcttggcagaatatggcaagagagatggtgtccattacaagggaggatgtagaggccgcagcagtgtcgggcatggctggaggaggtacgcgcggctgcagcctctttagaggtcgttctgctcacatgtcctgatgtgagaaataagcagatacttcactcagcccccactcccagggctgtgctccacagggccacagaccccaggacgtgaggctctttgcacccggcagtctcttgcagtgttgtggtaagagtcaaacgcttggaggaaagtctgtgcccatgagtgggagaatgcttggctaaatgttggcacagccacgtgacggactcccccgagacatggtattgaatgagaaacggaagatgctgagaagtctgtaggatacaatttcatttttggaggcagtgaccacctggtgtgtgcatgtgtacatatgtgcacatgtgtgcattgtgagcatgtgtgtgcgtgtgtgtgtatgtgtatggaatggagggaagtgtggacagcaaccacgcaaaggtttcctgttgggtgtttgatggtggagagagcaggaaagagagaaagaagctattgctctgaacatgaagcagtgtgtctgttctgtcgctgtgtataaactgcttgcttgtgcgtgttgccgcgtacactctgtagagagaggggaccagagctcctggtgtaccgggaggccgggatgtaggagtgggagctgcagagcagcgtgtggagtgcgagtctttgggcactcacagaagcgaagcctgtctgtgtgtgtgcgcgcgtgtgtgcgcgggagcccagcccaaggaaggaccctggtggccttgcaagggagccagggacagagatcacctgtgtgtgtctttgtgtggtggtgttactcttgtggtaacaacgacttttgtaaatgggagtgcatggctgaggtgttgcttcttaaaggcaggagtaaggaggagggcccggggatggggagcggtcggatgagtagctgggcccttccagtgccggcttgagggccttttctctggatcacaaactccccacctgctgcctcgggcagtgggttctgttctggttctgcagaggagagtcctggggcccactgtccaggagttcctgagacagagaccctcagggaggctccccatcaggttcctatgggttcctgcttcaccctactgccctcgttggagagacccccagcagtctggggccttgaggatgcctctggccgagcagccacccacgcgccctgccctggtctgctttgcagctctgcgggtgcagctgctcccgtccgccagctgctggatgtttgtggggcattgttgaaatctctgatggatgctgccccctgcccctccacgggctcttcactgttttgggtccatgcctgtgctatcacttgattccgatttaacaatacaggtgaatgaggcagggccggatgcgcaggcccagatcctcatctttgtgcaaaagctttgagggaccacaggtaaaggcccgggccacgccgacagaggctccagtctccatcctgcttgtgcggccatgcctgagccaggtcccctgtgctgttgccacacacgtgtgtgtgtgagtgagtccgtgcgtatgtgtgtttgaggttatatgagtgtatttgtgagtgtgaatgtgtgagcatgagtgtttgtgaatgtctgtgggtgtgttacactgtgagcatgagtgcatgtttgcatgaatgtgatcgggtgtgtttaaggttatgtgtgtgagcatgcatgtttgtgtgtttgtgttagtgtgtgtgagtgcctgggtgtgagtgtgcaagtgtgattgaatgtgtgagtttgaggttgtgtaagtgcatgcttgtgtttgtattagtgtataagtgttagtatatgagcgcatgggtttgagtgtgcgtgtttgagtgtgttcatgattgtgagtttgtggttatgtgagagtgtgtgtgagtgtataaggatgtgtgtatgtgattgagtgtgtgagtttgaggtcatgtgtgagtgacacacgtgtttatatgttggactccttgttggagcctggcctgagtggacggggccgtggtgcaggccagaacaggtgtctgcacagacaaggtggcctgaggcgcagggttcctgcctggacaaaggtggactctgtcctgggtgattccctgtcccagctggggcctgccctgtggctgccaggagctgaggagtgactgactctgggggcgacaggctgtgggaagccctgtggtgtggacagcagctgcacatcagtggctccaaagggcagagggttagagcaattgccctagatggcagctgtcatcgactatccaactaggagatgaggggcatgttggtccttcacctttatgactcatttagctgtctgtaattcatcccaggaacgttcttaaagtaatcatcatcattttgaaaagacccagcatgatgcggggatgagctgtgaagacaggttttcaagcccaagtccagtgggtgctcaaccagctcctctgctcggctcctccaggcgccgcagggctgcaggtgcaccagcctttccaccaggtgcctggccagcacaagagtcctgctctcccggaggccgctgtgcaggatcagctctgcactatctgttgccgttaaccatacagtgcatgacctcctgaaaaacaccagacatgcttcacaggccccagggctggcaaggcagggagcagggaggcctggattcaggggggcgctgcagggagtccagagtgcccgtgctgactgggtttggtctgtctctgggcaaatccagttttacaagtctgctaagtagcagtctttaaaactgcatcttgattggtgtggcacctgtctcctgcctgcgagaaccatacctgcttttactctaccctttaacaggagagccccgagccatgtctttcagtgggatcgagggagttggaacatttcagagctgtggggtgcctccctcagcgcagcattttggacctctagcaccactctctgacggttgttggtggcccatggctaagggttgcatggttgtctttgcatttttaaactctgttttgaccccgcagagccccttgggaaaagtcgggatgctaccctcactgacctgccagtcccggggacacagggcagacggcctgccgtcctgtacagggccccgtgcatctgggcgtgcttttctctgcctcatgaagtgtgtcgccagccacgctgcaatcatctgttctttaagagaaagaaaagtggagatgacaggatgtggcggtcctatgattctctccgcccaccagggaggaatgggaagttcccatcagggcatgacgccactttcagtacaagccttcaggcatctgtgccacttcctttcatgcaccctgcactgtcctcagctcctttaagctcttcatttccgttgttttctatgaaaggtggctacgattctgtgtgttctgcttgagagaaggtggcccaggcctgctgagacgtcatgggccgtgtcatccagcaacctggcttccgaggcgctgtgttgaacacttcttgacttcatgagtttataagtacttcatgcccagctacaccgtgtacgcggaaatgagagcagggcttgacccgtctcttgattatctgcagcagttttaatttattttaaaatagaaatagctttgctttttacattaaaataaaaatgctttttgtaaacaattgcaacaataaataaacttagaaagtaggagtttaacgaacctctgagtttcgctcacatgcttgggaaaccaaccgggttagcgggactgtagcttggagacattgcagcccaagcggctgtctctggggagccctgtggctcccgggctgcccaccccccgccgggcagtcggcttgctgccaccagcaggtgtgagctccaaccgtagacatgctcttggtccagacgtccatttattgggacccaaaactcagaactgtgggcagttcagacctggaaagatgaaaggggaccgtcggggaatgggccgtgctgctgtcttccttcccgcttgttggcatctgtccaagccttccctcctttcttggagactgtcaccagagagggcctgtctgtgtcttgtcaaacagagaggattcctccctgccggcgagcctgtccactgcctgtgtgtgcaggtcctttgtcaccttcctgcagcttccctggggtcaccaggggagtggtgtgtcacccgtggggttggcattcacctccccccaggtgagggctctctgacggctgtgaataatcacagcagcaggtaccaggattgtctgcgggttcccatctgcagggcagcctcagctgtcgatgccgacatcgatagttttgagtagagttggggaggaacttgggctatcacctggaatcaaagcacctttatttactgctttggtccgaaagaacgcaacacttaggagggtccactccagcagtgataagcacctcacctgcagaacagggagggctgcctgcccaggtctcccacctcacctgggcaggagaggcacctgcagcttgagacaggcatggagaggacggtcctgaccactgaggagtgtctgtgtctggaggaaacagcctgtgcccctctcctcaggacggaggcccttcacttgtacccccctgttatcccccaatggagaaggaagtgggtgggcggctgggacacgtcagtttccagtttttcttgcttggcaccctgtcaatcttgagtttgtttcaagaagctgttctgctgccttgatgagaccccctccacgtgaagaaaggtgaaatgcagcagcgccagccacgcaagatggtactgtgctttggacggtgcatttcagggtcttctcatcgccccctttgctagtccctgaattcctcacagccaagttcctgtgtctctgcgggccccacatccctcacatctgacattcagggccctcctgtgtctccgaaggaagagggttggaacacacctgcagagccacggttctcaaactccggagcccttcacactcctgcaaattagcatggactccaaagagctttagcttcaatgattgagatgcacaggctgactgtcgttctgacgtgcttgggaccagaagtgttcaggctctcagagtttttggattttgaagtatttgcgtatacataatgagatatcttggggatgggacctgagtctaaacatgaaatttatttatttatttatttatttattttgagacggagtcttactctgtcgcccaggctggagtgcagtggtgtggtctcggctcactgccacctccgcctcccaggtttaagcgattctactgcctcagcctccctcccgagtagctggaattacagacatacaccactatgactggctagtttttgtatttttagtagagatggggtttcaccatgttggccaggcttacctcaggtgatccaccggcctcagcctcccaaagtgctgagattagtgtgagccaccacacccagcctaaacatgaaatttatttttcatgttcaccttatacatataatgtgaaggtaatttcatatagtatttttaataattttgttcgccaaacagttttgactgtgacccatcacatgaggtcaggtatggaattttccacttgggttttcatgttggtgctcagaaaatttcagattttggagcattttggtttgtggattcttagattagggatgctcaacctgtattggtatttattgtattagaaactaacacacatctaaaaaacgtgcttactcatttgaaactgaataaacccattacatgttaaatagataggtaacatttttaacaaaaaataaccgttcggtaaaacacaaagcgtcgtgagaagagaggcatcattttaccctttgccagtctatggaaggtgtggcttaatggcgacagtatttctgcttctcacaccggctctcgttcagtccatgtccactgtacccctgtgagagaagggcacatgacatttttctattatgaacaaaaatttgacttcacacacctcttgtaaaggtctcggggaccctctgggaccccagatcgcattatgaggaccgctgttttagaaacgggtttctgtgtggctgggggcctgggggctgatcacttatttggccgatagggtcttttgtcaaagggttgttttccatccgcaagtgcctgtcagtgacggaggctttcaggcatgttgttggtgaagctcaattcaggcccgttgttggtgaagctacgcgtgcttgggtgcatggtggttatggtggaagagatctttccttacttagtctggtactgacataaggttctggggctgtttgtcacctgccctgggggtgccctgcgtagggcagggataagtcagggataagtcatgttttccttcgtggggttgcagccatctgcctgggaccccactggccttttgctctctcggggtgttcatggcagttgatgttaaatgatccattgagcccagcgtttcacaccgtaagtcaaatccttgggccttctgtgtgtctgtctgaatctttttctctgaaattcttttatttcacagcaaacggaaacaagtcttgttttatctggatgccttctccatttggactcttcctctccagagtttattttaccaataagtttgtacatgctagagatcataggccagaatgtggatctttatccactcttatgcttacgcagactggcaataaacacacctaggcatctgcaaaagggcctcagtgctgacatctcttttcctccatggagaaagttcagtgctgacgtctgttttcctccatggagaaagctgatgctctgttgctgctaacggacagttattcttgtgcgttcatctgtgtgtctgtgtccgccagtgccacacgcgtgaccctgacgaccctgctctgtgcatgcatgtttgtgtgtgtccgccagtgccacacgcgtgaccctgacaaccctgctgtgtgcatgcatgtctgtatgtgtcacatagtgccacacgcatgaccctgacgaccctgctctgtgcatgcgtgtttgtgtccgccagtgccacacgcgtgaccctgacgaccctgctctgtgcatgcgtgtttgtgtgtgtccgccagtgccacacgcgtgaccctgacgaccctgctctgtgcatgcgtgtttgtgtgtgtccaccagtgccacatgcatgaccctgacaaccctgctgtgtgcatgcatgtctgtgtatgtcacatagtgccacacgcgtgaccctgacgaccctggtctgtgcctgcatgtctctgtgtgtcccccagtgccacgcgtgtgaccctgatgaccctgatctgtgcatgcgtgtctgcgtgtgtcccccagtgccacacgtgtgaccctgacgaccctggtctgtgcatgcgtgtctgtgtgtgtcccccagtgccacgtgcgtgaccctgacgaccctggtctgtgcatgcatgtctgtgtgtgtcccctggtgccacacgcatgaccctgacaaccctggcttgtgtgtgcatgtctgtccatgtccctcggtgccacatgcatgaccctgatgaccctggcctgtgcaagtgtgtgtgtgtgtcccctggtgcctcatgcatggctctgaagacctagccttgctggctcccatggcccttcctctttatcctcttggtatctgatcttccgaacgttccagaatcagagggtgggggaatcagagcctcagatggaatggtggcctcagctcagcagagcctgttttggccttgttcagcataagcctgtggattgtgtgaaatccttcctattttattcccgttacagcacagtgaaatggaattttattactttcaagtgtagagtccattatgaaactaaagtataaatctgtcccaacaaattatggaggaaaaatatctgaagtcttgcgccatgtggccacgtatcataaaatgacactcttataaaacacaatagccagaccttacactccacatttcactaaggaaaacagtgcttattaaactcactgtatagacaggagtcagaaatgtcatatagcaacagtttgctttctaaagcttaaaatttatttcaattttaattaccctaaattcaaattaaattaatcatttaattacacaaattaaaaatgatttcatatatattttgtctgacaaacctgacttagtacctctttgggaattccctgttttttctccatttaaaatctgcaccctgtgtttgcaccctcgtgggttctgaaagaattcttttccgtttctgcgaggtttcttttaagaggagtagtatggtgactatttctcctacatgtactggttgtaagaaatggtggcaagaattataaaatacttcctcactgtctggaaagtccaggtaagatcgtgcaagctgcatggaccagtcagatcagtattatttggatctttcttggtgcaagatggctttgagtcattggtctgcaccagttttttattgaattataaaatacatgagaaaagtacacaagccaggagggatatgcgggtgctgactttctgcaagtgaaggctctgccttctcttccacagatcaaggagcaggtgttccccccgccaccgctcccttgttcttccttcagtggccgtcccccacccctcccaggggaacctgtctggatgtctcccacctcggattagtgttgcctgttttcacattttatgcacacggagccctacagtaggcgctgctgtgtgtgtctgctttttctcagcatgatgtttctgtgatttatctgtgtcactgcatataggtgtagtttgtttatttttactgctgtatggtgttctgtggtatgatgacatcacaaggtatttattcgtgcagcttttggcacgtttgggaggtttctggtttttgactgttacagataatgctgccgtgtcttcgtagatgtctttctgttgggtagatgcctcgggctggcattgctggggcatggcacttgtgtggctgtagtacctgccaccgaggggtttcccacagggtgtgtgccgttgactgttttgtaacctcgtgtgtgagtgccggccaaccacatccttaccaacacatggtatcctttcgtttatagattttagccattttggtgggtatggagtgttccgttgtggctttatcgcgtttccctgcagtcacacatgcgcaggaccttgtgtgtgttgattgaccacttggaatcctgtcttgtaaagtacctgttgatgtgttttgcttatttttcattcaggttgtctgcctttttcttagtgatttgtaagaattatttatacattttgaatatccgtcccttgctgggtgtatgtgtggcagggtctcttctattttgtggcttgccttttccctcttctgcatcttttgataaatgagtgttcttaattgagtgcagcacaatttatcattttctttccttcatggtcagtacctttttaacatctgtctatctttgcccacctgaagatattttttgttgttgtcttttagaccaggcctcattgcttacctttaacatttaggtctgtgatccagctcatactaatttccatcatggcgggctgtatgggctgtggttcatttagcatcaaagagcagctgacgcaagcactgcatattgaaaagaccctgttttccctatggatttggggtggaatcctcacaataatcagatgactctgtgttggtctcattctagcatattctccttggtttactttaattacacaagtttagaagaagtcttgatatttggtagtgtgagtcccccaagcttgtttctcttccagattgctatttcaggttctttgtgcttccatttaaaatgtaaaattgtcagttttcaaaaaaattctgctgggattttgattgcgattgcattgactgccgattactttgcaaaacattgacatcggaatctcattggggtttccggtccatgcacatggtatattcctccttgtattgagatctctaatttcacttacgttttatagttttctatgtagaattcttctacgtctcttgatagatttagtactggatatttgctaatattgtatgctattataaatgttatcttgttttcaaagcttattttgtatttgtttattgccactgtatagaaatacaatagcttttgattttggtacattattgaccttttactcagcaatcctgtaaaattcacttagttattttaatagttattggtagattgttttgagttttctgtgtatacactatatcatctgtgaatagtgacattttcctttgtaatctttttgctttcttttcttttcttgccttactgccctggctaggatctctgccagggtgttgaatggaaatgatgagagtgggcatcctggcctcactccctgtttggtgaaggctctctgttgcccaggagatgatgtgtatttggcgttctggactgggttctgcaggctgctctcctttgtgtgactctgggttctccttttggttcactagcactggccgttccgtcaccagcatggcaggctgaggccatggtgggcactttgagctatagtcactgcccgtgaaatggggtggggagggtgtgtggtaagggacaaaactggccctccccacactgtcacatttctttgtggtagcttggtaagatgttttagaagaatgttctctgatggatttatagcttctaagacttttgctctttggaaggtttatggcttattccatgaaattaagtcaaccaaaatttcaaaatttccaagctgcgggaggaggaaccataggtaaccttagattccaagtgtttggtgaaggaaatacacccacacgtaagcgttagtgatgcatttgctttcattgattctgtgtggagcagaaatgaaaagagagagatgtctttatgtaaacagatgcccagtgtcagaaactgcccacttggcagagtgaccatggctgtcttgctaaaggtgcttgtaaattaaaatcacaggctctgtggctcagtgtggacttctagtgcatctggtaagttaggggaaaatacatcctaaaaggcattgtgtttgaaagttgtaatatgtccacattcgtctattatttattagaatgtattttagttagggatgtacagatacacatttcaaacgtccttcagaaacaaatggatccttgagatcttagtagcatgtgctttccatgtgttttcttagaaaagtgatcatcgtagttctctaatctggttagtgaagtatcattagacacatacatcaagataaaaagaactagatcatgcttaagtcttattaaaccatttaatttctagtaggtttttatgttgtgagtgttgcgttgggttgttcaaagacacaccacctaaggagaaggtgacggaatgggcagaaagaagagaggtgtatcaggcagacagctgactgatgggttttcatcccatatccaatagaaaagactgctttcctcgtgggctccagatagcgctgctttctttatgaggggttccatttagttttcagctgtagaatcgtttgttcttaactccataatttttctcttctctgcctgtgatcttcatgagggaatgtgaagtttttcttttaacccagatattctgagggccaacagcagttccctgcattgtatgtgactctggctttctcatggcagccctctgcaggctctctgaggcattgggagtcctgaggcttaaagtaccacaaacttgtgaatttctggaatctttgatatcagatccttaaaacttaactctagcccccaaaaggcagaaaacggtttcttttgcaatttgctttcaacttcagccccctgtgaggtagtttctgaggggaatccaggaagaccttaaaaacgttcattcagttcacagttttgttgtgtgcctactgtgtgccttgggccaggggtgcagcaggaggtcacattccagccaggggcaggcagaggggccgacagataatgagaaaacaaacaactacttaatgtcaacatagaatgaaatatcagaaaaaggaaagaacttggaagggcaagaaagtagggtgacaggaatgagcgtctggggtggggcgatcaggagcagtttctgggaggtgggacgtgggtgtggaggtggagagagaggtgcctttcctgtccttacctgcagcctctaagccgtctggagaacttacatttcccagacagcgttggccccagagcctttttcctacagcacaccagggatgccgatgaactccaacccagtacttctatggggagaaaagaatcaggctcaggggtgataaggaactggtccagggtgagagaacacactgggctagtgctggggccaggtggagctcgggtgtccccgctccctgtctagtactctttcccaagggaccaggtagagctcgggcgtccccgctccctgtctagtactctttcctaagggaccaggtggagctcgggtgcccccgcttcctatctagtacttttttccaagccagagtccgggggtgtgaagagatacatgttcccgtttgctctcagtggaacttgcagccaggcacggggcaggtgctcatcagataagcgagcacatgagtcacaacagacccagccagagccagaacagcttggggtcctgctgcaggaaggcagggtgcctgggcagaccctgaaggtcctgtctgtggctgttggagctacttttttagcccaactgagcatcatggctgctgactcagtctccccagctgtgacacgggggctggggtctccgggtccccttgcggctgtctgtggcgtctgtctgccttgtcctatttccccctctggtaatgattcttcagttttccttcgaggaatgaccctcattcccattggtcccacattggcggcgctgcctgtcagggtgtcctggcttccctggtcaagggctgtggctcagcgcaggccatcaggtgtggttggacagtgttctggagggactctccgttaattcctgcctctgggtccctccacctgctttgccagctaccccgttcactcgctggagcttcctctgtttgcctagattatccaaagtcaattttctattgcttgcaaccatgaactcctaacaggtgtaccttgggtctagcatgcctgctctgtaaaacctgaattctcacttcctttggctcaagtactctgtgttctcgccggtttccagaaagaagggttcatagactgtgggcattgatattctgtccagcaggttctggagctggcttcttagcctcctcatgtcagatccactcgtctacagattcccgagtcttctgcttcctctctaaatcgcagctcccactggcttcctcccaggaggctgtgggtggttcctggtgacctggctctcagtgagccttcaccagaggcaccagggaatgaccatttctggctgaaaaggtgacccgaaggctgagtatgtgaccgagtggaggggcatgttctccatgcactccccagtagctggagcccccaccccccagctctgggaaggggtccccacccaagctgcttctgtcatctcggcctatcctagacccgaccccaggtcctctgtcctgctcagaagccttcagtggcttctgcttccctcagcgcagaggacacaagattctgagaagccctcttgttcatgacacagccggattctggccacatcatgtgaaacatgtttcccattagcttggctgtgcgtgtaaaagtgaggaggaactcacatggtaatagagttacatgggtatatgcattttcaaaatagtgccgttaactttcggacgtttcagtgtaggtggaaggaggtaccgacgcagcgtgaatgccagggtgttggctggcgttgaagctagatgccgtgggctgtcacacagttctctttactctgtatatgtttgaagttttcataatataaaagctttgtttttaaagagaaattcatgttaaaacctgtgaaatcttaaattgcaaatatcaatatgaaaacactttttttttacttaaaatatttgtactttttacatatccaaaaaataaacaaatgactaaaaccaaccagtatgtggggaactcaacatgaaatacatatgctaaccaaggaatttaactctcttacaaatgcactcacctgataactttggaaaccagtgtcttacctggatacggtaaggctgagaacaaggagaatcgtgtataaatggtggtcttgtgaatgtgtttctcatgtgtagaggttagcgattctgaaatgactttgtgtgtgtaccggaattaaacaaatgagaaaagatactgtagataataggaaccaggtttcccactgttagaaagatatttaataaaaacaaggaaagaggaagactaaaatacaccttgtgatgttgggatctgaggtctcagtatagactcatgattattcaagtgtaaactcatacagagatactgaggtgtgagtgagtccctacgcgcgctgcctgctgagagggccctgcgtgctctgtcgcccagcagcagttagcacacctagcactagattgggtccgaacacagttctcccaaacatggatccagggttccctggagaagccattgattccgggactgtgacagggacatcttgtaaaatcagaaagtaagcaaatgctcaaaaacaaacaaacaaaagactggattggaggcttgccagaaaaacctaggagctggtttgcaggagctcccgacggccggcgctttagcaccaacaccaatggtggcagtatgggactaataacacagcggataacgtaactatctgtgagtccacacgaacggaagcagattactgagtcactgggaagatggagcagtgaaagctcatccttgccttggaattctaagtaataagtgcagcaaaaaggaggtgatttggatgtcaccactaggcaaacatcatgacagtgagtgtcacagcccggctgctctgatggattcaggcccacgaagacgtgtgttgatatgtgtctctctccagtgagcttcggtagcttgggcttttcaaggcacttgtttatttcatctaagttgtcaaatttattggcataaagtttttcataatattccccattgtccttttaatatttgtgcaatctgtagttaattcccactctctttttttttttttttttttttttttttttggaacagaggcttgctctgtcacccaggctggggtacagtggcgtgattttggctcactgcagccttgacctcccgggttcaagtgatcctcccacctcagcctcccgagtagctgggactacaggcatgcaccaccatgcccagcttatttttttttattattttttgtcgagacagggtttcacaatgttgcccaggctgctctcgaactcctgagctcaagcaatccccccacctcggcctcccaaagtgctacaattacaggtgtgagccaccacacctggccccctctctcattctcgatattgttaatctttgtcttttctctttatcagctctgctagaagtttatcaattttatagtctcaaagaatcagcttttagtttcattgatttttctctgttctgttgtcttctgttactgttttttttttcttattttgagtttaatttgttctttttctaattttttaaggtgaaacctaaggtcattgaattgaggccttcttttctaatacaggcatttggtacttatgtttcctcctaagcactgcagatttttatgttgtattttcattcgtttcaaaatgttttctaacttcttttaaattttttctttgattcatgatgtgtttgcaaatacttaggattttcaaatatctttgttattgacttctaatttaatttcagttttgtcagtgaacatactttgtatgacttgacttgtccttttgaattcgagactggttttatggcccagaaggtgttctatcttggtaaatgttctgtgtgtgtttttaaaaaagaacgtgaataacgtgtattcagccgttgtttatggagtgttccatgaatgtcattttggtcaagttgggtggtagtggtcaggtcttctctgttcttattttctgtctacttgttctaacagctactaagagcagggtgtgaaaattcccagttataattgtagatttgtccatttcttcttatgcttttattattttatattattattttattttataccttgtgatgttgggatctgaggtctcggtatagactcatgattgttgaaatgtaaactcatatggaaatatcgtggtgtgagtgaatacctatgcacactgcttgcatcaagtatgaagccctgccaacaggtgcataaatgtttaggactgtgtgcccacttgatgaaccaacccctttatcattatgaagtggtcttctgtattgctggtagtattctttctttaaattttactttgatatacatataaccattacagctttcttttgattagttatgtgatatacatttgtccatcttttaatctatttctatattttaaatataacaagatagatttcttgtaggcagcacatagctgggtgtatagtgcttggggaagattgactgtacgttataaaacacagagcctcctctctccaaaagctttttagtccctcctcacacgattcctctttatactctgggaaagtagggtctcgcttttttatccagtctgacaacccctgccctttaaatggggtgttgagacagtttgatatgctcactgatatagttgggcttggctgtctccagttctgcaacttagatgctttaattcttccttttactgttccgtcaaactgttttcacctttttaaaaggtaaatttctatgtttactggacttttcattgatcaggactattatatatatatttttaaaactatgtgatgtttttcttaatgtaatgttctctgtgtaatgtttttgtaatgccttggtgatgaaatagcatagttttgaatagtctactgcaacttttcttttttctaagataagcccttgtgtttttagtatacagttttgcaagagcgtgaggttcttccagaacatttctattatagtgaaaatgcctgtgctctattgaatctgcagttgggagaagaatccgtttctagctgtcagcactatgttaggtgaaaccttgctagacactggacatttggctaggaaccgtgcatgtcagcttgccagaattatagctttgagaagcataattgaccagtattaaagtgaacacagaacagggtaggagtgagcacacatagcctcttggcagtcctcaggtctggactagagcttattcctatttgaagataaataaacagaaacaaacctcacctttggacctgtcaaaaaaagggtatcccagaatgtatggaagagggaaataccctgaagtgcagaagaatatgcctctgaaaatgaaattaaatcaggaaaaaatattttcaaaaggctttggctagaagaatacctggctcaacaaagagaagcagaaggtgatgtatgaggagggactaggccgagtgagaagatgatgagatgagtttaaagggaagtggttgagaacaaagagttcatggcttagttaaaatctgtatttgaagccataaggaataaaatggatattgtggaaaatagcagcagtgaagtgaagaacatacttgagaggctgcctgggaatgcagaataaacaacagatgtgtcaccggtgaaagaggccagatctgatggggagacttcagccaaatagcataggaactctgaagaagccagaacaagtttaacaaaaataataatcagtgacataattgaagaacattttcctgagcagaaagaagacctatatttgttgaaagagtcatgttttgaacaaaataaaagactcttacttatgtatcttctgacaacgtttttgaattttaagattcaagaaaaaaatgccagtagattccaggcagaagaaaatggtaacaaccacaacatcaagactcggcccccaaagttttacctggaaagaagctgtaattgagctggacttaaacttccctacaatgttgaggggggaatgacatccaaaaattttgaggggggcatatttgtgatctaagatttttatacccagctgagatgtgtttttttgtgtgaaggatactgtcatctgagatttgtgagggtttgaaaaatatgccatctacattcccttcaagaaaatgtctctttctgaccaagagatgaataaacattctgaccctgaagacaaataagtcattgtcattcctaaggagataaccagatacagaacaacagtcatgaagatattaatcagagttgtagatacaatgaacataaagttggaaagcatctagatagccagccttgggggcgggggtgattctttacatgatgaactggttagagttctttggttataagcaattggcaaaaaaaaaaaaaaaaaaaaaaaaaaaatttctagactaattaaatcaagaaaaggaattggtcacacttttaaagaaagatgaacacagaagcctctgaaagcacttgagctgggatcagccagggactctcagtggtaggagtgctgagacttgtctcttttgggttcatctagtgactgatctattgaagaggcaggccttggaaagagaacttgatgagctcagctggtgccacatgccactctttggcccgacacttccctgggagcagcaggctcatccgaagctcctgaagtggggcggggcagctgtctatccacacatggaataggaaacagcccttcaaaacgaagcttaccaggtattgttaatgccattggaaaatgcctggctgtaatatcagcacagagaacgtgatagacagctgtatcactagaggttcgtatgggcaaaaggcaaagaaaaacaacggcaaggaagcatgtcagaatgttaccaagggcttgtctgtgtgtgatggcatcatggatgactttttaaatacttaacctgtgatgcgcatgtattgcttttataagcagaaaatgaaaacctgagaaaatggtcattatgaagacagaaacatgagggaactattttaggttatcatgttacgtgaggaatgcggactttagaattaaattctgtgattacacagacattgtgactacgaatgtctatggatccaggctgatgcaagcgtgcagtaatgacattttgtggtgggaatgtgctgaaagtgatttttcttttaaaacattttatttcatatttatttcataagctaatatgacagaataaatttatattagttggaagatactctgcttcctttcaaaagcctaatgttggagaaacttctggaaggggtaaggaaggtgtctctagatcagatattttgaaccaggggatgatattatcccccagaggacctttggcactccctggagacattcttggttgtcatgacctggaagatgctgctggcatctggtgtgtggaggcccaggatcctgctaaatatcttataatgtgtatggcagccctacaccccaacacctaaatacgcaaaccaaaatcccagtggtactgaggctgagaaaccctgctctctggagacatttttacatgtctgtgatttactaacaaaaatcccactgctcgtatttgtagaaatgattccgtcgaactgttctatcagtccttggtcagaacaaggataaagaaggaagttggtggggcgtggtggctcaagcctgtaatcccagcactttgggaggctgaggtgggtggatcacttgaggtcaggagtttgagaccagcctgggccaacatggcaaaaccccgtttctactaaaaatacaaaaattagctgtgcctggtggcatgcacctgtgttcccagctactcgggaggctgaggcaggagaattgctcgaacccagggttgcaggggtggtggaggttgcagtgagcccagatcgtgccaccacactccagcctgggcgatagagcaagattctgtctccaaaaaaaaagaggaagtcatcatttccctagttggatgttgttttccagatcggaacttccatgttgtaactccagtctcttttctccttctgaccttgcaggttcatctgcagaagccagcggacgcctctgttcaacttgtgggttacctggctcatgagaccttgccggcgaggctcggcgcttgaacgtctgtgacccagccctcaccgtcccggtacttgtatgtgttggtgggagtttggagctcgttggagctatcgtttccgtggaaattttgagccatttcgaatcacttaaaggagtggacattgctagcaatgagctcccaaagccatccaggtaaggccgggtcatttcttctctgggcacacagcggggctttctttgcccaaagtagaagttcttgtgactgcagcttgctttctggatttgagacttttgtttttcttgatagtggtcactgttggtttttgacagcacaaagtgcaaaatggatggtttattcttcctcttggtgaaagaagaatgataaaacctgggaggatgtggagtcaagtctgcgaccccggtttgcaggctgacttgagaggcacacaggtttcctcgatgctttttgacaagggtgatgttgaaaggtcaggttgtgatgtggagagctggtttcttgcccagtgtctttgttgtttcatgaggggttgtgtgaggggtgggagtgctcctccaactgggcgtctgggctgtctgggaagaagctcatgttcccactgaggtcgtggccacagttgctcctggtgtttgagggcctctgtgaggggctgcactaagcattttacaagcatttagtacagccccagatcatctcaggcctggagggaagaagtaatttgcctgaggtcacagagctggtaggtgggggacccacatgattgggaagcaagcttgtcctgctctgagcttcagaagcatgtcatgggcccatccatttacgacttcacactttctgtccttggaaagtcaccgagagcgtgcaccataatgaaacctcgaggcctgccgccgacctgcctgagtgtggggctcctgcagagccagtcctgtgctgcccagcttcctgccacttccagcgcaccgtggccttcaagggcacttagccatcgacttctgtcttgcgtccacatgagagagaagacggtggccactggacagacgcttggacaggcacctgaggctctgttagccttggctctgggtcctgctccttagagcagaggcagagaggctcagggtctgtctgggtcactctctttgagattgccggaacgcttacacacatctttccctgggtggaatcgtctttgtctgaaaattccagagggcaagattccaggtttttttagatatgaaagttttattgagttaaattgtttatgtattgactgatgtaaagaaatggtttatgatcattccaagacaaaattaagcgctatggctcaaagtgtctaaatagacattgaatggagctggctctctccctcctacactgggctgctgttgggtgagagtgtatcttttttctgtgtctaaacatagtgtgatgtgtgtgagcattttcatagagtataattctataggcagggccctgtgttttacattctgtccattttaatgtgttataagcatcttttggtatcagtatgtgtgcaaatataacttgctcttttgataccttgcgaatggatatttatgtggttgtagcagtgtttataccaattccaaattggcatcaaacaattattatacatatattttgtaaacttctaagtatcactactagacaaattccaggaagtggaagctgggtcagtgagcccgtgcacttaaaacatcattaggttgactgtcaaattgctccagaagcctcgttccaactgatcttcctaattccagtgtaagaggatgcatatttttcatttgtgctgtaccagcactgggtaggttcagtctctctcatttttgtcagtgtgctatgggaaaattattgtttgagtacacttgattattttaatgggggtgcatatttttgtatgacttggtgtacacataatcataatttgtacatgctctgcaggcatttgaagagaaagtatgctcttaggattttgtttcagtctaaagacgtctgtatgtatgtatcaatattgtatttaaagttctcggccgggcgcagaggcccacagctgtaatcccagcacttcggaaggtcagggtgggcagatcacaaggtcaagagattgagaccattctgaccaacatagtgaaaccccatctctactaaaaatacaaaaattagctgggcgtggtggcgtgtgcctgtagtcccagctacccaggaggctcaggcaggataatcgcttgaacctgggaggcagaggttgcagtgagctgagattgcgccactgtacttcagcctggcgacagagcaagactccgtctcaaaaaaaaaagttctctcatttatatatattttatttatatataggaggatatgtatcctttctttatatgttgttttaattatatattaactcagttgagttatttaaatcagtatagctttacttatttttttctgtctgctcgatttcttggaaaagtgtatttttctactgtgattatagtcttataatattctttttacattaataaccattttttgctttatatagttcagtgtttttttttaaagcttaaaaattaatgactgttcttttggtagatcaggtctcttatcaaaatataatatatttctctttgtttaatgtttctttgaccgagagcttatagtgtttcatgaggtatttctacccttggtttcttttggctaacaaatatttctccatccgcttgtctctaaccttttcaggccgggttctttgaggctcagctctggaaaccgcggggtgctgggtttgtttggccttttctgtgggaatttcagccgctgcggttcagtttgatcaccggcctgcccgggcctgtcctgcccatgtgagttgggttgtgtgcgccttattgccacccacgacctctccattctctctctcagtgggttggaggctgaagacaggccgcactggtgagggcagggctgccccttggcccagcccattctctgctctccatctgtgcagggggtacagctgaggtggtttgcctggggcctgaagtctgctggctgcctcctctgccctgtccgctgtcatctttccctgccgtgtctgcccttccgcccggaggtcccttgggaggcaggaccccttgtgcccaacacgtgcataccaccacctgcacacactggctggtggcccagcggcctctgcccacgtctcaggcgggggatggggcttgcccagaaccgtgccctccctcctgggcgaggcccactcgcttgtgtgccttcccaagcagctccatccccagagatctctagtttcgggaagttcctctgtgtttcttgtcagctgatgcacctgtccgtccgctcccaggcattgctggaagtgctttccaatcctgcttttcatcattttagtgggttttgggaggaagagaaatcattaatactaaaggattcagtttgctctcttgagcgggaaatttctaggtgtgtcagagcacagccacggaaccgctgtcccttttccttgagccgaggagccgagtcctggcaacgtggtgttcggggcctacctggctgcacctcccctccctccgtgtgtctctcgtgccgtcctctgctagctggccctgtccttcgccctgcccacccggctcactcttgcctgcctggctcacccttgcctgcccatctggcatgggggccctgctcctgtgtggcctggtgtgggtgcccgtgccgccctcactccctgggcaggccgggctgggggagtccagccgcccatgggccccctctcacatttgtcatgtgacttggctttgccctgctgatgaagtgcccttctagtgcagtgtgtgtggctttcctctcctgtgttctgtgaaagtcctctgctgctgggtgagttttgtgttacggttttattgctgttcccgctgaactttgccagagccaggccctggttctctgacgtcaaagctgcttaactgttgggattttattgctctaaagaacgatttctaatgatgtgagcggcctgagggaagaacctggattgacttagcctggaagggctctcctttgaaaggaggccctggagccttacgccccttgcccggccagccctccacaccctccctgaggggatgcgctgtggcagggcaggatgcgtttgtcaggacacagagcctctgccttgaagccagagtccctggcatgaaaccgggagtgtggacggaaagcccacgggggcctgctggcaggacaagctacgcctccttttttttctcccattcccttgttttcctccaaggacagttctccaagtaactgtccttgtctttccttgtggttaagggcttaggatactggtgacttgactggccagcaggaaaggcagacgttgttacttggccacccacttaacactaccccgtccctccagtgtcatttactttcccttccggaatgttcgtgcctagagaaagtcttgcccagaaaagttctcagtgtcaaggagccccgcagtggatttgctgggacgtggatttgctgggacgtgtctgtggtcagcgggatggtgctctcgataggaagcagtgcatttgctgggacgtggatttgctgggacgtgtctgtggtcagcgggatggtgctctcgataggaagcagtgcatttgctgggacgtggatttgctgggacgtgtctgtggtcaccgggatgatgctctcgataggaagcagtggatttgctgggacgtgtctgtggtcaccgggatgatgctctcgataggaagcagtggatttgctgggacgtgtctgtggtcaccgggatgatgctctcgataggaagcagtgcatttgctgggacgtggatttgctgggacgtgtctatggtcaccgggatgatgctctcgataggaagctggttgagcaggcagtggtcggtaacttgagcatcctctcgctcctggaatcttggtgcgaggtacggataatgtttagttcaaaacaaaataagtggccgggtgcggtggctcaaacctgtaatcctcgtgctttgagaggccgaggtgggcagatcatttgaggtcaggagttcgcgatcagcctggtcagcatggtcaaaccccgtctctactaaaaacacaaaaattagccaggcgtggtggcacgcgcctgtagtcccagctactcgggaggctgaggcaggagaatcgcttgaatccgggaggtgaggttgcagtgagccgagatggtgccactgcactgtagcctggccgacagagcaagactgttgtctcaaaacaaaaaaaaaggattttgtgggaaacgtgtgtaacttaagatcagtgtgttcatttgggccattctatgatttcttaatattctgttcagtctgagctacccccatccacataaaagcagctaaaaagtctctgtccacaatgacttggtgatgagtgagttcatggtaatacagttgcttcagaccactgttgagtgttaaccctgtgagtccagggagaaggctctcctctgggattgcttccagtcctcatgttctgctctaactttatttgatcttgaatctgtttattttaactattgtggccgccaagattattatattttaatatagaaatgatccataaagatgcatttttatggcatttaaataatgctctgcagtggttgaatgtctcaggaataccacaaagtgtctgtgtgtatgtgtgtgttagagtgtgtgttagggtgtgtgttttagacaggttgtatgtgtgtgaatcagggtgtatgtgtgttagggtgtgtgcgtgtgatggggtgtgtgttttagacagggtgtgtgtgttagggtgcgtgtgtgtgttttagacacaatgtgtatgtgttagggtgtgtgtgtgttttagacagggtgtgtgtgtgagagacagggtgtgtgtgttagggtgtgtgtgttttagatagggtgtgtgtgagacagggtgtgtgtgttaggtggtgtgtgtgtgttttagacagggtgtgtgtgtgtgagacggtgtatgtgttagggtgtgtgtttagacagggtgtgtgtgtcagggtgtgttttagagcgtgtgtgttagggtatgtgtgtgttagggtgtgtgttttagacagtgtgtgtgttttagactgtattaagatatgggtgtgtgttttagacagagtgtgtgtgtgttaaggtgtgtatgtgtgttttagacaggtgtgtgtgttatggtctgtgtgtgtgtgtgtgtgtgtgaaggtgtgtttgtgtgttttagggtgtggtatgtgttagggtgtgtgtgtcttagactgtgtgttaaagtatgggtgtgtgttttggacaggatgtgtgttaaggtatgtatgtgtgttttaaacagggtgtgtgtgtcctagactatgtgttaaaagtatgggtgtgtgttctagacaggatgtgtgttaagatgtgtgtatgtgtgttttagacgggtgtgtatggtctgtatgcgtgtgtgttagggtgtgtttgtgttttagggtgtggtatgtgtgttagggtgtgggtgtctgtgtattaaagtatgggtgtgtgttttagacaggatatgtgtgtgttaaggtatgtatgtgtgttttagacagggtgtgtgtgttttagacagtgtgtgttgggtgagtgcatgtgtgagatgggggtgtgtgtgtttcagacggtgtgtatgtgtgttagggtgtgtgtgtgttgggtgagtgcatgtgtgagatgggggtgtgtgtgtttcagacggtgtgtatgtgtgttaggatgtgtgtgtgagagtgagtgcaagtgtgtgagacggtggtatatgtgtttcagacggtgtgtatgtgtgttaggatgtgtgtgtttgttagagtgagtgcacgtgtgtgagatgggggtgtgtgtgtgttttagacggtgtgtatgtgtgttagggtgtgtgtgtttgagtgcatgtgtgtgagacgggggtgtgtattttagacgatgtgtatgtgtgttagggtgtgtatgtgtgtttgagtgcatgtgtgtgagacgggggtgtgtgtgttttagacggtgtgtatgtgtgttagggtgtgtgtgttagggtgagtgcatgtgtgtgagatgggtgtgtgtgttttagggagtgtgtgttttttagacagggttgagagtgttgttttacacagggtgtgtgttagggtgtgtgtatgtgtgtgttagggtgtccgtgtgtgtgtgttgggtgtgtgtgtgtgtgttagacagggtcttgctgtcgcccaggctggagtgtggtggtatgcacctcagcctcagcttcctgggcttcagcgatcctcccacctcaggctcccgagtagctgggaccacctctggcatgcacctctgcatgccaccacgcccagctaatttttaaaattttttgtggagaccgaatctcaccatgttgtccaggctggtctccaactcctggactcaagcaatcctgccccctcggcctcccaaagtcctggattacaggtatgagccattgtatccggccaggagtactacaaagttttaaggggcagaaaaggaattttgaagacctgcaattaacccaagaccttgattctgagcttctggtgacaggtgggttgcagattctgagcatggcccttgctcagaaacaaggtggcgggaggtaatgagaaagcctgggagctgagagtggctttgcaggaggcccaagagggctcccaggaggagggggtgtgtaggcagcaggtgcagccagctggcaggagtccaggggagcttggacaaggtggcagggcctgagagcatgcttggtgccagctggagaagagcttgttcatggcccctgcggtgggcagccctgggggttctggataggagggagtgagattgaaccccgagaacgtgggagagtagaccagccctacatcaactggaggttttagagaaggacaacagaaatgcctggatagttccggctgatgttggggtgggagatgcttttgatccccatgtactgcttgcttccgctttctaaaggcaaggtttcaaaaatacttgtgtacgttttctgacgcacagcaccgcctgtctgaatgtgcatcctcccagccacccggcacggggcgtctgcagctctcagattgtcactagcctggattctccatgccatcattatctgggatcttaatcagtcaaggtttgttctggaaatcatgtagacataaggacttatttttcaacctacttttttttttgatcctcaaattgtgttttgtcttttaaaaatcacgagtactcagtcattatgaagagctcagaaaattcgctgtcaatggagcattgatggtttgttttggcaattctctgaaaattcttacacagtttgtggaacatttgcatttgtgtccctttttcaaagccactattgtagaaatgcaaatttctgagttctgagatgctgaatgttggatgattaatgatattgaaatttaagaatgaactcccggtatgtatttgacatagaaaacgcggtgtgagaatcattagaaaccattgagcacagcttggcggggaacagaaaggctgtgattgaggcacccggcagtgggggcaggtcgcacgtggacaggtgtgcaggtgcgtggctgcctccgggtgccaggctgtgtgaggcgggagctactgccatcaaaggtctggctctacttgaccataggtgttcaaaactcatcataataatacatcagccttgatgacttgcttgctcagtcaaccccactgcgcgtttaagagaacgaaatgaacagcaggtttgttctgagttttgcttgctgctactccatttgtgcttgcatatagcctgtgacgtgagctggacacgttatttctgttttgtagatgaggaaaccagtgttactgctatcgagtgcttaggtaggctgaggctgggcagcgcatcagaggccaatctggcaccgctagaatcggtcaccttccctcaaggagtgtgcgcctctctgcggcagaacactgggcacctgggacctgagaggcattgagcctgtctgcttgtgtgagctccctggccagggcaggcagggcaggcagggcagcaggcactctggtccagtgtggttcatgccacgagagggatgggctgggcatggaagccccctgagggatgtggaggccaagggaggctgtcccctagaaaggacctgaggctgaaacagccttgtgaggagggttggtgggcctcccgcaggtcctgccccgccggctggggccctgtcctgcaacgtaggcttttttgtgtcccagttggtttcaacgagcatgggttttgccatcagggaacttcatctgtccttcctctgtctttttgtgaactttctctgagctctctttgccggtccttagaatgttgggactgaaggagtgactgggtgattggcataaccaagcgaactctgagatttgggctgaaactttcacgttgtggccacttagcatccttctctttgtttatttcatgagaacatggcaaaaaatgggcactttggggaaaattataatgaaaattacagttaattttaagaaattaaaattaagacaaaaatcaactgaggcatatacctaaacttttttgaattatatctggccctgagcttttaaactggtttgctttcagccacctaatcagtaagacactgggagtgctggcccttcaggagtgatacgcattggtggggatggaggccttggggcgttattttcatgtttgcttctctctccttccccctttttaggaaaacaaatacaaatagaaaagataaattctgcctctcagggagctaggcacagctgatttggagaccgaagcccatagccaggcctttgggagcccccttgacagtgtaggcggctgtttccctccaagacgacgctgggcctgcgggctcttggttgtctgtgaggatcctgagcccggctggcttatggtggctttgttctcactggaccccaggctccctcatctccctcagccctcactgtactctcctccatctctgcccagtgtccccttgctgcctttccttcagtgctacaacacggactcaggacccagtgtggttccatgctgacgggcagctgtagagctgttgggatattaccttgaaacacagtgttcaggatgactgtcatttcctagctttcaccaagactctgtactttcaaaaggagtagtaaaacttattgtaacgtatttgtttttttcaaaatacagaaatgacctaaatgtacttatttttgttccatttgaaatagcatttataaagaattaggacaagttggtctgtgtgtcttagtgttcattatttagtgatggtcattaactgggggagttttttcttttctgtatacaactacattctcaaaggttcaaattagctctttgagtttgtattcacttgagatgtcagaatttgttattatgaagccactgtcttcagagcctttccctaaaagaagttttgtgattggagccagttttttttttttaattttaaattttaaaatgcttagaccattttcttagaagattgcttccataatgtggttgtttaggtgatgcctttgttcgttcagcctgctatcataaaataccttagggtggatgatatgtaaataatagaaatttcttgctcacagttctgggggctgggaagtccaagatcaaggtgccagcggacttggtgtctggtgagggctgctctctgcttcacagatggtgccttcttgctgtgtcctcacctgttggaaggggtgaggggtctcacttgaacctctataataagggcactaatcctgttcctgagagtccataacttaatcactccccagaggccccacttcttaatactgtcacattgggtattagattttaacacgtgaattttgggggggacgccaacattcagaccacagcagctgctaaagccaagagaatacctttcattataagagctaatggttttctttcaattagtttgcattcatagccaaaggtattcctttttaaatacctatgagttttcctaggaaatatgtagaaattggatgcttattaacactgtgtttctcagtgacttgttgattcagtagggtttgtgaaatgctgttggagtttcaggcaaggatgtggagtctgttctgagcacactcagggtttccatgtgttgtcctgaaagcctttctcacctcttcacatctagggtaaggccgtattgaggggaagttcctccctccctgttaggtagtgtgatgcagaattcttgacactctttgttttcacatggactgaatccaaatcaggtggggctgattcttccagccctgtctcctcatcccggtctgacactgcacaacacaaaccttcctgctgcaggctcaccgaggtgctgcctggccctgtctttgcctgaacacctgcagtctcaatgtggctgtgcgggagcaaaggcggccttcgccccacgtctctctcatgtgcttccatagcactgccttgtttttgtgaaaggatcggggagggaggaaggcaaggttaattttttctttctgatgtactagtggataaaaagagttctagaacatttgaggaggccctaggggaaactggagacatggaaagcagaggttttcgttggtaaaccagagagatgaggagttttagtttttgtagtgcccgatgcattgtacgtgttgaaagccgagtccttgatggtaatggtggctctgatgatggtggagatgggaggttaggatccccttagagatgtttagtgggtgctgcagtgagcccagttttctgagtgacagggactagggtgtgactgctgaagagggggccagatcttcagtgccctttatctctggtgggcttctcatccttggtcttgcagcatcaggatggggccagggtgcctggcctggaggggtggacttgggccgaggactgcagggcacagatgtcctctcagtgtggccctcagcacggggagccctgtggctttgaagcagatgcttcattcaaggcaggtggttcttttctgaacacaaacatacacgtgagcatccccaaaggctgtttttgagagatggtgtgtgtctccatgtccaggctgttgtaacagaatgataaggtgcagaggccatctgacagctggaagggtacagaggcatctctaagcagcagcaccgatggagtacccagcctggaagtgctgacaccccaccatggtcctcctctgtcccatgcagcccagcctttaggagatgcaccaacaggcatttgggtggcagactggagctcagtggggctgcccccactggggcccctctgtagcttctgagaacagttgaattgtctatctgccttcacatctatctgtgatttggttcccttttgttcttcgccagtcctcagtaggatttggtaagacgtaatttctcgatggttcaggaagacgggtggggctgtgtccatgcttgcacagcctactgtgaacagctgagctcactgccctgtgactggcttggtgcagctgaggctcagggaagagctggggtgtcctggggtgagggagcagcagcaccagcaggaccccatgccccaactgctgcagggaccatcctggcctgaatgtgttagaaactaggagggtatctggggtggggacacatcccactcttcttgctttgtgttcaggcccccagcctctttctgtcatgatgtcttgatgtctccctactcagctgctagcacttctgctgagggaagcagtcacaaaggccggtggccctggcctgagcatggatgtggctttcttggttcttggctgcggtttccttgaactctctgtggtctgcaggacctgatgcatgagaatcacatgtggggagggtgtttcttgtgtttatcagtgtttccatttctttggaagttacctggatgctgttatgagtggatttggtggactgatttgcatgggtgtggcctcaaggactgcattttctaaggagatggtgtttttaatgccttagccaggagattgcagggggccgcgggccacatgtgtggttctctgggaagattctgctctggagctctgctgagggatgttatttcaaacttcagtactatcttcatgaacaaaagaacaacgtaggtctccgttgagttgctcacatcacccgagagagcatggctttggtgctcctcacccatgtccagatcagagcatttaggcttcacctggggaatggacaggggcaggagctgggagatcactgcccaggggtggctctgtgtccggggtgacctggactgggcccattgcctcctggggctgaggttgcttcctttcatcgggccctgtttctttagaaagatactgggctttgacttttgccttctgtcggcacctggccctgcagctgatggaaactggcagagcaaaggacttcactgggacagtgagcagtggggcagccctgtgtttacaggcaaccccagaccctcttatgacagaaggggagggcagggcagccggccttcacctggataggaacagcaggtggctgatgtatctgagttggtatattcattcagagacattggttaaaattacttgtcaatataacatctttaccattgttttcttcaaagccagattctgtattttctgattttatgtaaactaaatacatagttttcttaaatacagatgacctctgccttcacagtttctttggatacctttcaagtcagtttaacacacatgctctccggaaacaaaactcagccactggggaaccgaacctacgcttttggtagaatctcagccttggggggagcctggaggccctgagccctggatgacacctgctctggaatcctccaccagtggcttttgcaatgtggttggtggctgaatctcacttctgccttggatgcttatggaatcttctggatggactgagctcagaatctcattgaatactgtggtcctctcagtctgaactttgtacctaaaaatccacgggaatctcatagcagctgctgaggatttggagaactcccttagaaaaataaaaggaatttattttttcctattttatgtagtggctatttaaattttgaacatcaaatggtagttttggattttaaaagctcagtgtgaataaactttgagctcagatgcagccgttcttttagtgtgtcaattttaataggtgtcatttgatgtttgcactagggggttggacgaaggtcggtgtgagaatctcagggataactgggctgctgcaggggtcagacaaggcctcctgtaatagggattttggggcactgatggaatgaagggaagcgggaggagagggtaacgagtagaggctgccgctgccccagttgtattagagggtggtgagggacgtggtggataggaagctgcatgggcctccaggaactcactgcactggctttgagtcgcgagagaggtgccacgggaggtctagaaaccgtgcattttgggactgagataaaacacgtccagctggtggcacagaccaagccagctgggagcggagttgtctctctgtgcttgtctggagtacctgcctgtgctctctgagcagcctctgcacctggctggtgggcggggctgagcctcaccttcaaggctgcagattccctggctttcggtgtgctgggggatgccttctgcatggcctggctttcctgggatttctagaccagatccacctctttctcccctttttctttgtctttctgcccccgaagagatagcagtgtacaaaaacaagccagcatttcttgttctcttgctatttgtaattgtcccgagcctggactgggtccagtccgctcatttattctgccagggcccagtctgcagatctcagccgaagccggttgtcctgcctggctcgctctgttcctggaaagctttgtcacgcacagccaggggccactttgggtgcatcctgtctcccccgtcgccgtatgtttgggagcagaagttggctctggtcagatatgtggatgttaatttatcctcattcttggaagcaagttgggagctcagaggaaaggaagagccacaaaatgtcaaacccagcagcggccatctgactcggttgctcatcgctataatatgtgattaagatggaagtgtttgatttcctcgcttgccggatttaggcctcattttgcttactcccgtgagtcctgatttcttcctgttagagagaggaagtttgcagcgataaccgacttgcagtggggttttctgtgaatggagcttgtattggtgcgatgtgtggcgtgggagtccccaccggttagtggcttatgcagggtgtgagtttctctcaaagtggacgttttctgccttcccggagccaaaacgtttatttcgccggtgagtacagctgagtctcacgtgcatctgacagcagtgtctccgagccttgccatttcctccactccctcccttggagccgtttgtgtgacaacctgctgttcagtaaaaccagtttagtggagtgggtgtgtgttaattctagtccatgtgtttaaaaatcaattcatatgatgagaatggcactttcccccgtggtcttcctctcagtaacccatagccccagtccaaccatgggaaaaacatcagacaaattccagtagacacccttcctacagtctactcttgccaggcccactcgatatgccaaggtcatcagaaacaagcatcctttgagaaactgtcaccaccaggagggatctcaggacatgcgacacctaagtgtgatgtggaattcctggatgggatcctggatggatcttggaatacagtaaaagacattagtgggaaacttcaggaaatcctaaactctagaattttagttaatgacagtaatgtcagtattggttcccaattgtgactaacataccgtagtaaggtaggatgctaataatcgcggggaatgtgcaggtggtattggtagggtatatggcagctctctctactgtctactcaagttttaataaaatatgtcaagaattttgagttcacaaaatgaagtacatttatagatactctcttttgcttaatgtttgttcatgaatggctgtatactgtagttactttagcacctagcttttacagtttttcctttggggactcttttttttatggttgtgcatggatgtggtagagtaacttaacaagtcattgttggtggacagggagtttgttttcagcctttccattgttgttattataaacatgtagccttgaagaccgccaatgtctaagtgaactttttaactgaagtatcacaggcatccaggaaagtgcaagaatcatgactgcttagcttgatgaactctcccaaaaggaagatgcctgtaactgctacccagattgtgaaatgggacatcccaacacccagaagccccgtatatgtcctctctcagttactgtaccctcactctcacaccctctagataccacttctctagcttctaacatgagtttctcctggttttgaacgtcatataaatcacgtaatacttattcttattgtctggattatttcacttgacaatatgttagatttattgatattgtggcttatagtagtagtttcttcatttaatgggtatataatatttcattgtatgaacatatcacaaattatttattggttcaattgctgatgacattttggtggtttccagtttggaattatgtataatgctactgtaacattcttgtatatttcaattggttcatataagtatgcaattcttttgataaggtgtatgtgtgccaaacagttcttcaaattgattgtaccaatttacactctgacctatagaatgttgctctgtccttgccaatacatggtactgtaattctttttcattttaactattgtagtttcatttgtatttcccagattactaaaaatgttgaataccttttcatacgtttattgaccaactagatgtcatctttggtggagaagtttctattcatttaagaaattggtttgtctttatttttcttactgagttgtaggagctatttctgtacactggctatgaatgagctttttgttgtttgttgctattttctatgtgtgtgctgcgttttccctttcttaatggtgttttttttttttttttttttttgctgaacagatgctcttaattttaatagtccaatttaatagttttatctatgcctatttgaagatattctatattatttttgataaacttcattgttctatcactcatttagatctgtgatccactgggaatttttttttttttatgtgtgaggtagggattgagagttacttttccgtttggaaattcagttggcctaacagtatttatttaaaagagtcatcctttcttctctgctatccaatgcaactttgtcataagtgaaataaattatataaatggatctgtttttgcactttattctagttcattggtctgtttgcatatctgtgtaccagtgcaacactgtcttaactaatagatttgcagttaaccatagtatctaataatgtaggtcttccaactttttaaaacttttcaaagcttgttttggttctttttagccctttgcatttccatatggatttttttttttttttttttttgagatggagtcttgctctgtcttccaggctggagtgcagtggcacgatcttggctcactgcaagctccgcctcccaggttcacgccattctcctgccttagcctccccagcagctgggactacaggtgcacgccaccatgcccagctaatttttttgtattttttagtagaggggggtgtttcaccgtgttagccaggatggtcttgatctcctgaccttgtgatccacctgcctcggcctcccaaagtgctgggattacaggcatgagccaccacgcccggcctccatatgaattttaaaatcagcttttcaatttcaacagaatacctgctgtggtctcaattgggatccactgatttgcatatgaaatcagtttattaggagtcttctaatctacgaatatgctacgtctctctatttttttcgagcatctgtaatttctttcgatcatattttgtaattttcagtatagaggtcttagtttttttttatttgtttgtttgttttgagatggagtcttgctctgctgcccaggctggagcgcagtggcacaatctcaactcactgcaacctccgcctcccaggctcaagcagttctcgtgccttagcctcctgagtacctgggattacaggcacatgccaccatgcctggctaattttttctattttttgtagagacggggcgtcaccatgttgatcaggctggtctcgaactcctgacctcaagcaatccgtcctcctcggcctcccaaagtgctgggattacaagcatgagccaccgtgcctggcctagaggtcttttatttcttttgttagatttacttctaggttatgctgttttgttgggggaattttatttttgtaatgtttagaagcacaattcatttttgtatatttgtcgtgtctccagatacctcgcacagtgtttattattatactcattatctatatattcttttgggtttttaatgcatattgtctatggacggtgaatgtttcatttcttctttgctaatttttaaaacttttatgtctttcttgctttgctgcactgcctaggaccttcagtcaaatggtaatagtaggcatctatatcagtcattggtagtagtaggcatctatgtcttattctaatatcaagagaaaaatttttagtatttcatcattatagataaaatttgctataagttctgtgtagtccatgagatgaatgcagtttacttttgttcttagtttgctgagtttttctgataagcagctgttaaaatattagatggagtcatgtgaaattgcagatatttgatctttttccatctacaaaaaatggtattttcatttggttcaacttaatgtattagactttttctgcatctgttaatagtcttatgctttttttctttattttattgtgttgaattttctgattgacttgaatgttaagtcaaccttacacttctgtaataattattataatgtgttattctttttatatactgttgaatttacattgcttatagtcagtttaatttttatcatctaaagatatgagattgacgtgttattttttcttgaaatgctttgtcacattttaatattaaagttatactaatctcttaaaatatgaagttgctttcttcttctattcctaggattgccaaaatttttctgtagagagtcagtaaagacttcatgctttgtggaccacatatggtctctattgcacgtttttttcccttttttcttttctttcttcttttttttaccaaccacttaatgtaaaatcccatcttatttttcaggttatataaaatcaagccacagattgtacttggcccatgggccatagtttgctgacacctgtttgattttcttgaagagtttatgtaggaaagatgctatttctttcttaagttgggatggatttgcttatgaacttatcttggagttttctttgtgggaagatttgtaaattacaccctcaactgatataggactgtttagatttttaagattttcttgtgtcagtttttgtgtgtttagtttttcttggaattttttacattccatctgcatcttcaaatgtattgaaataaagttgtttaaataccttctcattatctttgtaatgactgtaggatttgtagtgtcatccccttttaaattcctgatattgtttgttctctcatttttccttcattggactttgctaggagcttatttattatattaatattttttaagaactgtgtttggttttcttgattttttaaaattgaatttaaaaaaataaatttctgttcttattgctattatttttgtttttgggatttaatttgctggggttgttgtttttactgattaaggtaaatatttagatcactgatttttttttttcagactttcttctgtaatccacgtgcttaaaactataaatttccacctatgtatggctttcgctagattatgtgagctttttaatgtcattttaattataatttggtttagaatattatctagtttctttttttgacttgtgttaattagaaatatatttctaaatttcagtgctttatgaatttgctagtattttgctttcattttgttattgatttctagtttaatttcactgtggtcactcattttatgtaatttcagtttttagaaattctttgaattttgctttattgattatatggtcagttttgtcaacattttatgtatacttgaagagaagaagtcagccgtggagatttgccagttctacatgtccatttaatcaaattaatcattgtgctcagatctcctgttatctttactattttattgtctgcttttctgtcagatagtgggaatggaatattaaaatccccctgatgtaactgtggattggcattgtttctctttttagctctgtcaggtttagcctttgtttattttgaagctattttaagcctaggcagatttagaattttatgcataaaattattccataaaattggaataactgcctttttgttactgtgaaatgtccacctttccctcttgtatcccttcttacgctcaagctgcggattctgtgaggactggtcaggtccgtgttgccctcactcctggcacggggctctcctcacccccacgctcagtctggcgttcgtttcccagggtccgagccgtccggtgctgctccgctcctcagcctctggaggacacgcgggccgagtgtgccctctttccacctcccttctctcccaggcctgggctcctcgtgcatcgccgtgttttagattgcatcctgtcctctgtgttcctggctggagggttagtatggcccgctgtagcccagagtggaagctgaggtttacctggcagtccccgcacggtgggtccagtgcagccctggcgacgtgtcattgcagttcgctcacctggcccgtgtgtgcttcctgaaggcttcccccgtagaactcactatctgggcggcttagttcacgagtcccagcttgctttccaggcttgcattcatctttatgttgcagtaaaataactgttgggcatattttaaagtggactgaaatatatctgcagccttgagcagctcttatagcacttttattcagatattttatgaggtgatttatgtcgcaccttataaatgctctaaaatctccctgaccagaaatgcagtgggcagggccaccccaccccttcctgcttgtcttccctcccccatcctgcctccttctcgtggcttttaccgttttcccctcgaatatgaaggaagaattcattccagatttagctttaggaatcatgtgcaggacgttgagtttcgtgccatcaatgtcacgacagtgctggccgcgctttgctccgatggcccatcagccccgcttcctcctgggcaggctgagagcttcacttggccgctctctcagtatgtcctctgggctgtattcaggcatatctgccttcctccccactccgaatttcgggcagccaaggtcaggcaggttgggaatgcgcacgcacagggcagcaggtctgtgtcagcagcgtggcatgtggggctggggtggcagcacagcctgtcctcttcagtggcctttttgggatggagaaggctgagggtgagatctcttttgccacattaaaccaaagtggttgggttacaaataccacgtttagtatactacgtttaaaagtatattttattcagtataattgctcacttaaaacatttaaagataaatatacttgtattgacacattgaattacagatagtctagtaaggaagccagcgatttttctccctgtagaaggccaggcctcatgaccaggggatgttagcattatggggaagcagccattttgtttgtcagaatcagcatcctcctctgagataagaaaacagagtgtgaaggttggctgacctgtgccacttctgccacgtggctgccttcaaccactgtgcgcggtcactggcagcctgttcagtgttggtggagaagagcttcttggagcggaagtccaggccagtgttcggtggggccagagttcaggtgtccttggtgagccacactccttcctgtcgccctcttgcagtcctgattgccaggttgctggctgcaggccccagtggccctcgctcaggcctttggaaccaggcagggttagcagctgccactccctcgcggggtctcctgtgaggcatctcttcctttggcacagggtccccctggggcctggttggacctccccttcccgatgctcctatggaaagctggcagttgggccacttggcaccactcccagtgtccctctggctctcctgtggctctcccatggctctccaggcagctgtacctggcctgcatacggcctccggccatcggctctgtggccgctgatccaggcccctacaagtttgattctgccccgtcatctcagtgagacaggcacagcctctgcagcagcagcttgggcttggagggcaggggccacgtcgggccagcagctcctctccagctttctgcacacccctcctcccaccaggacacccctcctccttgctcccccattcctgctccggctgggggagggaagctggcatcacacagacacccgtggccgcctcccactaggcttctgctcccttctctgagacatggggctcctaagagacttcaccttatagggttgtcgtgaagatccagtgaggcaggcacggagcccagcgcctgttcctgcccagggatgtcagctgctgtcctcctgttgggatccagaaccctttgtagcccagcccaggccctgagtgtctggcaaggtttagtttagtcagccttgtcagactcatgccctttttgataaatataaataacctgtgtccttcagtgtttgaaatttcagaataacttggacatcagatcacaaaacaaatggagcacgggtgtctgtgtgatgccagcttccctcccccagccggagcaggaatgggggagcaaggaggaggggtgtcccggtgggaggaggggtgtgcagaaagctggagaggagctgctggcccgacgtggcccctgccctcccagcccaagctgctgctgcagaggctgtgcctgtctcactgagatgacggggcagaatcaaacttgtatgttttacctttttttctcttttggtgatgagtgatggtaaaccataaaactcaactcctgagaaaggaattttactagcagataatggagggttcctgtcattccaataggaggacccgcctttggggtctgcacagctggtggggtccccgtggaccccttctgagtccttctgggagtgggctagcccaggatcggctggtggggaggtagctgcactgggggggatgtggggggttggcattgcaggaccttccatgccgcctgcctccatctggggccaggagttggccctgggctctgcctgtgggtcctgggtgtgctgctgctgcctggtggcctgggcctggaggaaggagctcagcttacactcccagcctttcaggcaggttcgcagcagccaagtggtttcttaaaaagaattcctcctcccttgattaatttctggcatgctgcttcggggagctcttgcgtcagtaaatcgtcataaacccccagttgtctggatcagacataaacaccaagcccagctccaccgctcctgactcttggccagggctggcctgccctctgagctccgggctgggctgctggagataaagagggccagcgggcgcccgagaggtcaggcgtatggctgcacccgacaaagtccttttctcagaggtgccgagcctggcagttcggatgtgtgctgtgctcgctgggggaggatgccgggcacagatgtgatttatttcctgaaatgtttggtgtttctttttcctcccccaccagctccccactctcatggataggatgttttcctcgttgggagtatttgcctccttccagtgggcattctgtaggggttaagaaagatccctgtgtgtgaggcttgcacagtgttacattcaggtctgggaaactcaggggctggacagcaagtacctcactgtccagatctcaaggacagaatgccttacagaatgcttcctgttgctcacagcaaacctcatcttaaggccttttcagcagcgtttgagatcgtcaggaggtcccggactacattcatcctgcccttgtttttgtagaacatttttcatctggggtacccgtgaagaggccagaagcctgggagctgggttccccacagtcctgggttaccggggagcacacttgggccagcgccagggctcctccagggtggctagaagaaagaacttgggcctccagtcatttcagggctgattcaggcatttggcaagtattgattgagcccctgctataggtggatggtgggaatgtgtggctttcagcgtgtcatccagcttacattgctcagggcggggaccagtcactggcagatgtggagggatgtgcagtgaggggccttgtggacagggccaggcatgggcctgtacagacattcagaagaaatggcagccaccccaggcccctggatggtgtgtatgcggggagagcatgggaaggaagactgtccagagactgtccaggggcctctgctggatgttagcttgcagggagcagtgtgggccaggaaccaggcagggcttggccatgcccatgaatttggccagggtgtctctaggcttgctctgggtttccgagggcctgcagggcacaggcacgctttggggaggctgtcaggccctggttctgagtcccatcctgtgagccaggcagtctctctgggaaagccctgtaggcagaagggcagtcccgggccaagtctgggctggctggctgggggctagcgtctgatttcaagattgcagtttcgacttgttttctgcctatgcacataaactgtggtatgaaccaaatttaagggagtttcatgaatgaaaaaaagtccaggctgtctacgataattaactttgtgtgtaaaattgagaaaagacttccgtattgtagctgaggggcagaacagctgagtttcactcgctggacacctgggctctgcagagcaggttctgagggcaggggacctgggccccagtttctgagctgcatgggggtgcctcccaacccctggggaaggggaggaacgttcatcgggccccggcttgccttattcatgccattggctcagccgagccctgggccaccccgtgggaaaggcacaccctccctcccaggtgggtacggctaggctcccagggcaaagccaggtgccccaggaaacccagctgccagcagagccaggcgaggctgccgccttctgaccccaggctcttgtggcttccttggggctctgcttctcagattctgaaacatttgttcagcgaaggcagttggtgaatcatcctagtcagggtttttttccagaaacaggtgcaccgccagtgagtgatgtggtctcgttcagactgtgcctctcatgcctgcactcatggcctgggaaggtcgtacccctgggcctgttgtgcacttctctttagcagtatgacaggggtgacctctgtgtgcttgggggtggcatgtgaactgccccacaggctcccatcagcattcagagaggcctcaggtgcggtggatgtgggggtctcggaccagagaagcagccagctgctggctcgctgggatgcccatggccccagaagtatctagcaaatcatagagagtttaaaacatactgccatctgttgttttcttccaactccttgctttgccatttattctgtcttgaagattatttcatatcagttaataaagcaatccctgattcttttaataaataacatatttctttttaattcttgaaataacacttgggtgttgtttctgtctaccaacatgtatattaatttctttgttcatcatgcttttttattgtggtaaaatatacataacataaatttataattctaagcattttgaagcgcacagttcagtggcagtaaatattttcccattgttgggcaaccatcaccaccatccattcccagaacgttttcatcttcccgaacagaaactccatacctagtaaacaatcctgtttccctccctctggctgcggcacccaccattcaccattctgctttctcagcgaatctgactcctctagggcccttctgtgaatggacttgtatttgtccttttgtgcgtggcttctttcacttggcataatgtgtcagggttcactcgtattgtggcatggtcagaatttggttcctaaaacttttaaggatgagcagtccattgtgtgcatacatcacatcttatttattccatctcttggtggacctttgggccgtcttaactttttggccattgtgactaatgctgctgtgaacatatgtgtacacacgtctctgagtccctgctttcacatcttttgggtatataccttggagcagaattgttgaatcctatgataattttgtgcttaatttattattatttttttttcatcccactctgttgcccagcctggagtacagtggtacaatctcggcttcctgcagcctctgtcccccggggttcaagtgactctcgtgcttcagcctcccgagtagctgggactacagacacccgccaccacgcccggttaatttttgtatttttagtagagatggggttttgccatgttgaccaggctggtctcgaactcctgaccacaggtgatccacccgtctcggcctcccaaagtgctgggattacaggcgtgagccaccacgcccagccctgtgtttaagtttttagaaaccaccaaagtgttttccacaacactgcaccattttatgttcctgcccaccacgtatgagggttccaatttcttcacatccgcaccaatattttttattttccaattttgaaataatagtcatcctagtgagtgtgaatggtatcttattgtggttgtgatttgtatttgcctaataattagtgatgttgaacatcttttcatgtacctattggccgttggcatattttctttggataaatgtctcttcacgtcttttgcccatatttgaattgggttgtttgtttttttgttgttgtgttgtaggggtacttcatatgttatagatatataatctgcaaatatctccttctattctgtaggttgtcatttcactctctggatggtgtcctgtggtgcacagaagtttttcattttgatgaagtgcagttaatctgttttttgttgcttggcctttgatgtcatatctaagaagccactgccaaatccaaggtcatgaagactaaccccctgtgttttcttctatgagttttatggttttagttcttatatttagatcattggtgtattctgccttaagttttgcatatggtatgaggtaggggttcaacttcattcctttgcctgtggcaatttgatggtccagcaccatttgttgaagaggatgttgcttgcctttagctgctgtaagagagcatgtgtcttagaggaaagatcttgctcatttctgaagttgtgctttggaagtgtctgagctgcagttgttcttccttcccaggtcggtgtagactctgctcttcctaagccagggcgctgcagccatattcagtctcttgttctttggctcccgtccctgtcgctgcgtccctacagcagcacctcgcccacgcccccttctgttatggcctctccaagggatggcgagtttaacaacaactgaccagggtttccacaggagacagagaacaggctttctgcagcgtgggttcccagttgtgctgtgagctgtggtgcctcgtgagtggggctcttccgaccatcctgtcaccacttgcgtcagagtcctgcgtgctatctgcctgggggtcctgagtgtgctggctgctgcactgaagcgggtgggctgctgagcaggaagccacagcatgccacgcaggcactttggctttgcttggcccctggagagcaaacacataatggcaataggctttacagggagtaggatttatttactttatctgaaggagtttaaaaattgctattgttctcttggcttttaattttcactctcaccagcctttctgttcaggatactgtgcggtgaggacctctttctccatgttaagttcgcactggtgagttgtggcaggattggttttcttgtaggatggctcagggctgtgtttctttcagctaattgtggctacatttttgcctttgcgtgtccaatttgggtttcaaattcaggattgtccaagtactctatgtttgaaaatattttccagagaccccagatttcttatttatgtgcgttagttactttttaattttttcagctgccttctagtttcacaccttcaattgtgctaatccttcgcattttaaaagttacaccagcctttgtcagtgtttcatcagtgcataccgtagcgcatgtggtcccgttcagatgcactttctgtggcctggattctaggggaagcaatagaggatatatttcattctgaaatttgcactgtttcttttttaagttaaatatttcaacagcaatggatgttcttgtctttttttagaaaaaataaaaatgaatgtttttgtggcgcttctgcctgcttgagtggcagcgttttttccctgtgcaggcccccaggtgtgtgtgattggctgccccggggccccgtgacaggggatgctttttgagctctcaccggcatcttcctccttaaatccagattgggcggagacatgaattcagcattacctctcccatgtccacacgtgaagaagcactttccaggcgcacacacctaagtcgttggccgcgggttcttggagggcgtggcctgagctcccagacgcctcctctctcacctagcactgcacagtgccttccacacacaggctctccgaggatctgccccatttattgctttgattttgttggatgaaagcagtttattaaataaatgggaaaatactccccttccccagtttcaaaagttaagatgtagtcttttctttacttaacatccaacaatgctgaaagatgaaagaaaggaaaatgctctctttaccctgccagaccacatttagctgggaggcacacagttcagagaaagtcacaggtgacattttgtagattctcaagcaggagctctctctctttttctctctttccctctttgtctccccatgtccatacctgtacctattacatacacgatagaacagcaatgggatttttttgtagctccgtaatatttcagtatttaaaaatcctctgttaatgggacttaaattttttgtatagtaaataacacctcagcgagcattgttgcacatgtgtctttatgtttggggctggttgttcttatcatgattgttttgttaggataaagtccaagaaacagaactgtggggacaaggggatgcgtgagtcaccctcatcatcaagagtgagccgtttgtggcacgtgcaccccacccactatggcaagatgcctccacacaccccgcagcagcgctgggtttgtctcagtcactgcagttctttctgggcttcccgagaaggaagggccacaagagtctgtccaggtgctggggcagacattggtgacgtcgcttatcgaagccaggagtggggccccgggtgtggggccgagtgacagacccaggctacccacacccgggcaggatgaagagtctcaagagtgctttccttaggctggttcccgtccacacaccagcactcagccagtcaagacacctcttgtgagcatctgctacatgccaggctgctgtaagcactggggtctactggtgaaccacacaggaaaagcccccacccattgccacacccagtgccagtgggaaagtcaaacagtagatgggtaaataaacaactacataatggtaaatatggctggcagtgatggagtctgccctgcacaggcactttgctaagtgttttctacatatttacagctgtgatccccacaacagcctacggatgggtcctactaaccttacatcatctgtattttacagatgagaaaacagaggcattgagaaaggaagtcactggcccaaggggctgtgccaagcaactgactcttaaccagtgagcttgcgctctgaagtgtaaggctttactcccctaaacttgtcattgcaaggcagtagaataggatctggagacagggggccttcacttcagcatccgattggttgcaggctgagctttcacttcagcccctgattggttgcaggccaagtcttcattcgcatagggtgtaacttcactttggcctctgattggtcatgagccaagtcttcatttacatagggtgtaaccagtaggaaacctctaaagggtacttaacccccagaagattttgcaagtgggagtcttgagcagcttgctctggagcttgctcctgctctgtggagtgtacttccgcttaaacaaatctgtgctttcgttgcttcattctttcattgctttgtttgtgtgttttgtccaattctttgttcaacatgtcaagaacctggacgactcgcagtgaagaccctcccccttaacaaccggatgtgccatcagggatagatgctgccctgagaatgatgaagccagtgtctaggggaagtcctggtgtgggcgggagctgtgatgttctgtgctctatggcagggctttggagggctttgactgggccagagcaagtaactataaaatgtcagaccttagaagaaaagcatcctgtactctgacaggaagcagcatgagttggttgtcactaaaaggaagaacttctgagaaccccacaaaggacccagttaggtaattgttgaaagctgctactccttcagggataatgtaatatttttccaacatttacacacgttcaccttatttaagattggctcaaaacacagaaaaatgtaagctaacctttttttttttttttttttttttttttgagacggagtcttgctctttcacccaggctggagtgcagtggcgctatctcggctcgctgcaagctccgtctcccgggttcacaccattgtcctgcctcagcctcctgagtagctgggactacaggcgcccgccaccacgcccggctaattttttgtatttttagtagagacggggtttcaccgtgtgagccaggatggtctcgatctcctgacctcgtgatccgcccaccttcaccttccaaagtgccgggattacaggcgtgagccactgcgcctggctgcaagctaatcttatgaagcttagagtatcttgattttagaacctgcaagagacaataataaagcaaacgttataagcacattttgtttgtaaacataggtttaaaaccctgaatagaatattggggaaaagaaaataacagtacattatgtagttattcgttatcaaaggttttattacaggacagttgttatacaaggaaagcggtataaatcatgtaaatatgagagaatgttttgaaaaataaaaaagattagataaaataattatttcagttttcataattgattttaaaatacccaagttggagagaatatgtagttcttacaagttggggatcatttgaaagcaaaaatgaatctttttcatggttggaaaactctagaggccttgtcttaacaagagctgtgttctgaggttgaccttacggtagcacatgtgttcagtatggcttgagatgtcagcagtttcattaagatgggaagaaccaaaataaattcacataaaaagactcaaaaagattcagaaaattttatagattatcagaaacccactagaatcatggattttgtatttgccaataattaatagctagaaaagttcaacagcaaaatagttttgattaaaatacatatttttacataacagaagagtcctaccaatttccttatttccatatttggcaaatttagatttacctatgtcatttgtcactggtggagatcagcattccattctctataattccttctaaatttttttgtttgtttgatttatcactttttttttttttttttttttgagatgaagtctcactcttgttccccaggctggagtgcaatggtgcgatctcgactcactgcaccctccgcctcccaggttcaagcaattctcctgcctcaccctcccgagtagctgggattacaggcgcctcccaccacgccagctaacttttgtattttaagtagagacggggtttcaccatgttggccaggctggtcttgaacttctgacctcaggtgatccgcctgcttcggcctcccaaagtgctgggattacaggtgatttatcactttctcagcccgcttagtcattctgtttttatcccctccacacgcatttattttaaattttaattataaatctctaattaaagaattaaacaattcatagacattatctgcatcatttaaagcaatacaatagcagtgaccgtgtgctctgtgagacagagaccactacaaggacatttacatgtttgcttttcattctgctgtttccaaaaaaaagttttatcatacatgcacatgttcctaaacaatatgattttagttttatgtttttgaacttcatgtaaatagaattatactatacgttttctatttcgtgggttctttttcaggcaggactgtttttgagaaccaggtttctgcctgtagctgtcggtgactggtgttcattagtgtcttgcattcaattttgtgaattttcacaactttgattcatgttcagatgtggctgctctcaaacatgatgttgtggacattcttttgtgtgttttctgacacacgcaaacttgggtctttgccaggttcctgcctgggaatgggagtgccgggtcacgggtaagctacttttaactctgcgtgacctccagcacggccacaccgtcttagacctagtgccagtgtcttcaggctgaccagggcgccttgctcggtcccgggaggtggccctcgcctggcctgtgcctgaccgccagcctgctgtggctgtcagtgtcttctgacatgggtcacccatttttatgtttgttgttggtttcgttttcttaatcatttgcagaattgaaatatctgggtgtgtgtggcttccttccagcagctaacgggaggctgcggccgtgtgctgccttcattgtcacagcttcctatggccactgctccttaaagtttcctatatgtggatattacttgcttgctgtttcttgttgaatatcagatattctggttttttgctcttacttttcttctggaagtaatatcctttggaagtaatatcctttagaaattcctgcagaagttccgttttttgttcgtctgagagttgcctccttttccttcattgttgaatgatccctcacagaagacagtgctggggaggcagctgctcttccccagggctctgaggatgtgattggttcactcagttccactggggctgttccgttccttggcaggaatccgttgtgtctctctaggtgttttgtagtcttagtgttctacatttttgtaagcgttttcacttacccctgttgatatttttttggacttcctgaatctgaagattagtgtcttccaataataatggggaattttattccttaacttttttctttttaacttttaattttgctgtaatttcaaacttacagaaaatcagcaaaaaatagtccaaagaattactgtttattgatatgcatcctttttttttttttcagaatcgtttgaaagttagtgttagatgtgatgccttcccccaactaataatccaggccatgttgcctcagataagcgtggtcactcttcaactacggtcagtgagtagagttggaaaataacagcgagcaggcattgttctctcatctgtaggccttgtttatgtttcgctgatagtctagtgatgtctcgttatcaacagcagatgacaggccctgcagggccttcaattctcacgtcctccccagtcccctttgctccgggacagtctcctcgtcatttttatgtttcgtgacattcacattttggaagcgtaggggcagctattttgtaaaatgtttttcagcttgggatttcggcatgtttcctcgtgattggattccagtgatgccgctgggcttggcggccaccgcagtatttcgttgctgctgatgctgcccggaagctctcagtgaaggtgatgctggcgggtgtttccactgtgaagttacattgtttcctgcataattagcaggtatctggtagggagataatctgggactgtgcagacagcctgctactccccgagcactgacccacaagtctcagcatcattgatggttctttgtcggagtctgttgttgtcgtggtggtggctactggtcatctagtgtcaccgttcttgctacattcaggacgggaagccctcattaacctcaggaggttcttggaaactgacttttaagtgaaatggtcatctagtgtcaccgttcttgctacattcaggacgggaagccctcattaacctcaggaggttcttggaaactgacttttaagtgaaataatacagaataaaaccaaggttatttttctcaccagtgcaccagtgttatagtcaaacgactggcattgcttgaggaccctctgtcgttggcttaaagttgcggtttccaagaacctgtggacaacgtgaaatgtggactcctgtagttaactttctcctgtaaagagctttcctttcctccttatttatgtgtttccttattgtttacttatattagtttgaactcatagattcctaatttattaactgggttataaccttttattatcaatatctattctgctgcccaaattgttccagtttggccaatgagagccccttcatgctggcgtttctggcaggtccctcccgttttgggacccttctttactctcttggatacacaaaatgtcctaatctcgcctgtacttaccctgtcctggcctggaatcagctttttctcaaggcggcctggttcctttctcggggaatgctatttagaaaccagctctcggccgccagagctgtgaatagatgtgtgtagatcggcccctgcacccacacacgccggccccacccacacacatggcagttcacttccagcccagcctcacaaaggccaccggctggccttctcctttcacatttgttactccctctgctgacaaggagacgtggagctctcagaatccatcatgtacttacttatttgttcagtctcaatcccagaatactcagagattattaacctatgcctctgtgaaaaagaaacccccaactagagtccagcagtcgctgaaggcgtatggtccagataccgggtctaaaagccactttggcaagctcttacgcacaccccaccctgccccagcgtggttgttactcatctgaaatggggtttggttatttgtttctgtttgtatttcagtttagaatttttccccctgtgtactttttgattgtattaattttcactttttgatgatgtgaaacccaattgcagcttcaaaagccagaactgtgtagcagccagactcagagaagcgggtcccctacccctgctgtcccctgtcctttccaccctgtccccatgagctaccctttctttcctgggtggccttgtgtgctttcatttgcccactttcttgcacggaaagaatgtcctacagggaactcctcttccctagcagtatgtcctggaaaccacgccacgtctgtccacaggctcctgctcattcctgtggacagccatacactctgcaattcatccagccgctctcttacctagggcccattggtatactgtacagggtagtggtagaatcacagctcactacagcctccacctcgtgggctcaagcagttctcctgcctcagcctcccaagtagctgggactacaggcccgtgctaccatgcctaggtaatttttttatctttaatttttttgtagagatggggtcttgctgtgttgctcaggctggtctcaaactcctgggctcaagtgatcttcccaccttggccccccagagtgctgggatttacaggtgagagtcaccgggcctgccatctgagttttatcttcagagttggtttatggagtgatttctatcaaaagataagtagattatatcattttattagatttttctcaagatttcctataggaaacttatatcagtttgcatttccgccagtagtgtctgagcgagcctattcccacggggctttggagtggagtgtattacttacttgctgatttggtagatgaaggatatttcagtttgtaagggccgtttttctgtctttgcttttggcttttctgttaggcttttggtctctgttcacacagtttgtaagagttctactgatggaagagattttggcctttgtctttcatgtgtattgcaagtaactgctcacagtttgtccactgtattttgacattctttctcatgctgctttcaccctgtaaaaggtttttcctccatgtatcaaacttactgttttttttaaattgcatctggattttcagtcctggttagaaagccttccttgacttccagaagatgttttctttgagtgcttgtacggtttcgttttttacatttgcatccccaattcgtttggagtttacccttgtgtatggtgttaggtttggatttaatgttatcttttcccagacagcaacccaattgtctccagtactgtttattaaaacatccctgtttgtcccagtggttgagatgggcacctttatcctgccctggagttccgtctgtacttctgtttctggactttctcactgtcacctggtctgccgggttgatggtgtctgtcgtgctctctgaagcgtaggggctttgaggcgtgttttagcatgtggttgggcatgctgggtttcattttgaatgtttctctagcgctcgtgcatcggcattgcccgttgctctcccatcatctctcttctttctttctgggattctgattacaggtgtgtaaaccaaaagtatctgagacaggtctcactcaatttaaaaagtttgtttagccaagcttaaggacgtgcctgtgacacagcctcaagaggtgctgacaacatgtgcccaaggtggtcggggaacagcttggtttcatacatttttagggagacatgaggcgtctgtcagtatgtggaagatgaacattggtccagtccagaaacgcgggacaactcgaagtgtgaggctttcagattataggtagattttaaaatgttctgattggcagttggttgaaagagttattatcaacacaaaggaatgtctggattatgataagggtttgtggagaccaaggatttaccatgccgacgaagcctccgggtagcaggcttcagagagaatagactgaaatgtttctcatcagacttaaagagtctgttctatcagcaattccaaaagggaggagggtatcatgaggcacatctggatgcccgtccccatcacgacctgaactagcttttcaggttaatgttggaatgcccttggcttgagaggaggggtccattcagatggttgggagcttagaattttatttttggtttacagatgtgtgttagcatatcttcctctgtccttccagtcctctaacgtctccagctttctatctctttacctttatgtgttgcatcctggtttatttcttccgtgctattttactgttcactaattctctcttcagctctgtctattaatacttgattagttaactcactcatttagttttaaattttaatgatgacagttttgtttctacaagttccatttggatcattcagatccatgtgacacttctgatagttattaataataacagctgagacatctgtctcctttcttccttagccttgctccagggagagtgtgggctcttctaatccccctttttggcaaatgggaagctaaggcacagggaggttgaggaagccaccaggtttgtacagtcactaagtgacaggatctggaggcctctagctccagcctgaccctggatgacctctcttgttttgtcgagtgtccttcgtatgtgttttgggtcagtgcctgattttcctacaactgaggtctttccgggacttactcccgctacccatggttcttgattgtgactttatgtccgtccttcttggatgtttttttgaggttcatagcgtgttcctctagagaaggtttctgcctggtgctgggaggtgccacctgggacatgcctgtgtttgcaggtgctagggatgctcatcaggcctcatgggttgtctgaattctccccaaaccattgcgaggggtctgggattatgagttctgaggggagtcctctctcgatttgaccccttctagccagcaccaagcccaggcccggatgtgtcccttgcaggcctgtcttctggcttcccctgccaagggaactacagcccctccccacgcacactcacagggacggtgcagtggtaagaggcagtgcaggtggctgccccaggacaggccctgggctccaggctggctttcatgttctatttgccctgccttgaattcctgtctttggagtatattcctcactcttcagccaactcagccctgagtataattagacgtctctaaaagtgcgtgtgccatattgccaggcgtgaaggcttttctgaatcttcctttctgtcaccagtgctgtacgttggctttcttttgaggcgcttattttcataagaaactttctctgtgtccttaacttccagcagagagtctgggagatcggggggtcaggaggtgctaagggcctgaccagctgtgtttgcgaagtgccatggaaaactgggatgattccggtcatcacctctcgtgaggttaggaagagtccagcctgcggtatcagtgctcggtgggatggccagcccccaattggaggagcgggctcctgggcagcctggggatacttggttctaatccagatcctcacactctttggggaggaggccgtttccagcaagtgagtgtcccttgggtttctcctcaaagccccttctaaaattagtccctggctgctgcagggacatttacatcagcgcattttgttaagtacttttgttgctttccattaagagcatatttaaaaatatgaaatgaattcaggcagaagccaggctctgccgctgagaacatctgtgtgctggtgagagggagagactgggcggtggataacgggctgcagcttcctcctccgccacctcggaacgcccccggggaggcacgggacagagcccaagcctgagtgaagctccctggctgggggaacaccctgccccaggctggccaccttgactccttgctctgcaggctgcccccggcacctcgtctgcctcccgtcggcagccagtgagaggagcgtggggcctgagagcattgcctgcctgctggccggccgcccccacagtgcagagctggagcggtcttcagaggctcccggtctccctctgcagatgaagacactgggggaacgtggcctacccacagtcagcaggctcccctctccgtgtaccaggctagtctgccggcgccacggcagctgggccaccaccacattctgccctcagtgctgtggtgcagtcgaggggtgtgccttggaggacccataggaagaccaacttcatgtccatgggacacgctggaagaaacgccacagaccttgttccagatgcagttttccgtttttataaagacaagtgtggatgttttcgtttcattggacgcatagaggaaaggtgacttggcttctgctgaagcccagcagcccattcttagcgtttgctttagaatggaggacagtcggggacattttcctcgtgaatttcaccatcatctggctttggccttctttccaacaattgaggaagaaagggcctaatgtggaactacgtgcgtgcgtgccctgcgtgtgggctcctgggccagcatggatggtggtgctggcagcaccaccaccgtgcagttgggggtgggcagcaggcctcttggcggcagccaatgtccttctcatcttccctgtcaggtgctaggagccctggcaccaaggctgtggtgatggtaccagggttctcttagttgggaggggctgcatttcctctgtagcgtgggtggctggctggcctggtgtcctgccctgcccaggggtgcccctgcccgcccctccttccaggttgcagtgtggtaggtggcaccttggtggccagtgttttgtgatggtgacagtgatgtcagcgccgaggttcctcaagtctaaactgagatgatctggtgtgatttttcttggctttcaatttttgggtaaggcttttagtgggcattcttctctgtttccccttcctcatgttagtctagggccccagggaaccacagaacccctgctctggaaggaacctttagaggaacccgttctgagctcttcctttcacaggagattgctcagagctgccccgtgggctgcccaaggcctcttaggtcaaggaccctgctggctccggtccagacttctccctgccatgtcaccgtgaggaagcaccgccccatcactgttccatgatcattgtaacacctgccattaaaaagcacgggagcttcgtgtcagaatgtagtttaaaatgtgttgtaatgtttgcgtagaacagaaacttgaagttttgtgagaaacggagtcccctgtgtgtggttttggaggggctgagctgtcctttcctgtcatgggtcacagtgtccctctccccctcacccatgaaataatgacagcggcctccattcctacaaagtcctcagtcgcgggtgccgttttatatcgtaaatctgtcatcttcaactggatggtgtaacacttggattctacatttcccggatgcttggaaaggagtgccaggagttatgtgttctgcggatcagaacagctgacgccggctgaggacacttcatccactgtttgctcggcgcttgacaaatgctacccagtctaacggtgagcgtcgggtgtctccgggcttggtgcctgcttgtgccacacatctcagtgccatgcaagaccagcatgccagtgacacagcaggggacacgtggagttcaggctgctgagagctcggaaggggccaggccgtccccctggccctaaggctgcaaggctctgccctggagctgcagagctaacacctcactctgcggggttgtaaagtggagctgatgctgcttgaccccacaaaagctcacaggccttttaggtgcctgttaatgctggaatgaaaccacaggtagccaagaaggcctgcctgtcagaccgcgaccgcgcagatctcagcagaatgtttaaaaggcgctctctgcagttttggaattgtggcgctgctcttgcttagtattagggctcaagcaggttaacgtcagggttcgttttcttaaatggccggtggccgtggtggtgttggacgtggctaacctggcacagggcagcagagatccaggtgtcaggccagtggaagggttgaagcctctcaccagcatgtctgttttggagggaagtgttggacattgagtgaggcccctctgcactcagcgaccctgccctgtgctcccagacccagttttgggtctgcttggttggcatcagggtcctggccctttctgtgttttgggacctctgtttgcttatcatatttgcatcattgcctttactccctggggggcagaggggggagctcctgaagccatttagccctgccagcctgggtctgcccttgtgcctgtgctgtgttctttctgcctggcagtcctgccctacgcagtctcatggaggcagggctcatgggaggggccttcccttggccccagccatccccccgggaacatcacactctctcacagacacactgtggccattttctgttgaagctactctgtgaaacattctctatacttggttcgggggggagcaaaatccagaatctgctaaacaccaatgctgtcactcagagtttgtgtatctgctgtctgtggagctctggaccaggcttgagggacgcctggggtttccacccacatctggggcaaaccagacccccaagtcactgacatgtcggtttttctactaatcacgttggctttggcaattctgtatataataagaagtattgtgttctcacttgcacttgggcagaacggttcactccaaggctgaatgactgccacggaccattcccccagcagggggtcctggggtttagtggtttgattctgagcacctctacgcacagagccccttagtgggttccctaactggacggctaaccctgctgtggaatctgactttttctggaccgaagaggacaggctgctctggagaaactccttgggccttgtgcctgatgctggctcgggccaccctggccaccctcccttcatgccccatgggaccaggcagcagcatgggagggggcagcttccagaacacccttctgctaggggctgctggcctccctgctggcacggccacatccatggtctgagtgtgtggttggaatgttttatcaacaccagtcctcacagcttccccagatgagcgaaggggaaggggatggtgtgtggggggattgcctcccttgaggccccccagctcccaggatacttgctggcggagctctgcctgcggtggaggccctatgacttgacctccatcttctccctgggcccctcgctggccctcactggcaggggctcctgcacgcctgcaaggccagagcctcccgccaggtgcaggagaagtaaatgcaggccagagataaatcgtatttccctctaactcggatgtggagtgagaggaaggaagcaggagtggagctgagtgttagtgagaggtggctgagaaggcggggtcccgcttcttgcttccttgggcatttgctgtaggtgctgggtttcagcctggaagggtgcagcctctgcactaagtctggtttggtgaacgttcatggcccccaatataaacagtgttctgggcgttctttgtgactctcgagccgaaacactgtggtgatctctcgtatcatctgcttgttatgtaatgtgacaacatggatatgaaatagaaaccagatgtcagggtggagcggctgaattcttccccagcgaggccgccgggagagcaggacttgggtttctcctgagttacggcgccgaacgccctgagaaaaacgcctttggagcagtttccgggattaagcgaaagtctgggctgaaggtaaagcaccaagtcagtacgattaactcttttttaagaaacttgtaagggattttctgtgctgttatgtaactgctcagtgtcttccagcgagccggcggcttgttatcaagaatccgtttagaatgtttgaactcagcctctgggggagctgggagcactgtggcacctccaggggcctgcagcgtgcttccgagggcttgggtgtagaggaaggggaacccgtctttcgcctgtgacagccttgcccttgggtctgggagcaatgaggactcggaacgtgagcctcctgctacaggtacaggccctgggggagtgagggcgctggcggacagcagtcttggcacttcacgttagcagattcggagtttctgcagcggctgaacccctgcactgggctggaagggggggacacccggaggcctgttaaccacactctgcctggactacaccatgaacatagatctttgtgcttttgaaatacaaaaaacgagctcacctggatacgaagtgtggttccggaagcagtatctggctgtggatggaggttatgtattccaccaacgatatcttcattattgttattttcctttggtagctgatctttcagagagatctgcagattcctcactttgctaagaagactctctgaaaacaggaagctaaggaactcctcactcccaagttgattacagcctcatggaagtgtggaattcttattaggaaagcctgttgctgagtaccaagcaggttatcctcttgtcccgtgtcaccagggggccagcttgatgaggaagaaagtgaccctggctccctcgtgtccccaaggcagtggactcccccccgggtctctagctctcttgtccctaagctgatagctcatcgtcaaggagggcttcctgcacgctgaccacccccatctcacagatgaggaagctggggcccagggagggtgagtgatggggtgtaggaagggtgagtgacaaggcccagagagggcttgtgatgggcccggctctcaccgttgggggtgggatgggccatccttggctcctcgcagctcgttgctgtgtggccactcattgctgtgtggccgctcactttgggggggatggggacactttgctggctgttgctgccgggccttgtgttccgttttcaggtggagatcaggaattctgagatagtggcaaaacgtgatgtggctcggggtgcgtggagacgtgtgtgacagtccccaaatccacagtggctgtggggtggcgtttcaggctgggaaaccctctggaaagaaagcacgaaacactccgacatcctcattccattttgcttgttctaaaagagaacttgaagaaaatcatcccagcagcatttgcttagaccaagtgcggtcatgagaacgtcatctgagtgaggagggcttctcttgcatgcgttttcttgagcaggagttgtcgtttggctatttggaaaaccaagtttagggtccctggtgagtctgcgaggtccaggaagcagacactcactttatctaggtgagaggacggagctgcagagatgggccttagtgaccactgggccctcgtatctctggcaggtccctgattagtggtgggaggggggttcccttttgtagccacttggtcttttgacagcttggggtacccatccttcaagcccctctctcctggggcccagtggccgcctctgggcatcacggagagccgctcttgtgttggggcctccggctcctcggctctctgcttctaaacagaacaccctcttgtttctgaaagtagcccatggtcccctgagggtcctgagcacagcccccactcatctgaggatgaccattggggcacggagcctgccccaggccctgggctttgtgcccagggctctcttctccctccctgtcagggtttccagacccctcgtgggcacccaggatggacggcaggcacagagctggagggtgtggcctgagatgggccatccggacgactcgggcctctgggctcaccagagtgctgaatgaaggccggagggcgagagtgggaaggatggcatcacccaccctgccggtggcccctatggtcctgcggctcctgctgcttctgggttaccctgggcccagggtgcaggcgcccttggggaggtgcacacgggaggctcaggccctccttggacattcctgaacgcccccatgcatccctgcagctccttccagaaggttctctcgatcctgtctggctcctcgggggtgtgtgggaaaccaggccagggtctcccggttgttggctggggtggggtcctgccttcgccccttagcattcaccccctaccccttttcaccatgtaaaaccctgtgggccctgggccctggatgctctgcgcccgaggacctgggttctgccatcacctgggcagtgtggggggcatatagggggaacatggggtgcctgatgtagtgcctgtgtttgaccttgtttaggtgaagagcaccctttccagcttatgttttgtatcatgaccgggaaaggtacgaaacaagtgtgtcggggcccagatgatttgatggctctacgggccgagtatgggacacaggatagcttggccctgggtcaggtattagtcagtccttgctggcacctgggcagggacacatccgtggatggggcctggccaggtggcctctgaggtcctcgtgtccactggaaggctgtgtcctctgttgtagtcactgacttgctggacctgggtgggagctcacccacctgtggatgggccagggagctcctggaatcactagaaagatgaactttttttgccttctaaatgtatgaaaagatgggaaatgataggaaaataagtggaagtcagatctattcaggaaaatgacttcccagggaagagctggggtgcctccaaacccagaatcctcggtttctagaagcaaggctgaccgaggtgggcagcattctttgggaccttgagtgatgaagtagttacttaagcagagtgtttctcatgtgaagccaggcagtctaggacactaggaatcatttcagcgtgggggagacgcagacactgtgcttgcccagggtgctgcattcatctgaaatgccggtggctaccagctctttgtcacggttcctccgtggtctccttgaatgctgtcagattcagggcccgtgtgggcagcggcagcctcgttcccagtcgtgtttagggaatggggtcagagaagtacttgctaaagcttcctgtgtgcacgtgtaattgtgtgtgcatgtgtgttaaataaatgtatttcaactcgaaatacacgtttcgtggccatcagtctagggatggctagaatttagtcactaaatgaaactaagccgcaccgtcaccaataatgtgaacatgattaaaaaccacactcagttcttattcatttacctacaagtccagaaacttttagaacttatttcaccattaaaataaatagttttttaaaaaatatacaacaataaggaaaaatttgaaagcctcttgcccctccatcccaggcctgacagagtggcttccacaaagaaagaggcagaagccagggctgtctgtgcctgcagggcgctgttgggctcacagatgacccagactcccccgtaatggagccgcggacccacagcgagccacttgcaccaggcttagccaagctgacaggccagcggagtaaggaatgttccctaccattgtccagaaaatgtaacgagggtgaaggtgtgccaagcagactccccgtgtcagccctgaggcgactgccatcgctttcagaaacctgactaccaacctggatgaaaaccgactgcttggtcatggccatgcagttagaaaacacagcagcaatcctcagatgagtgtggccgtatttgtgttactcaagctgctttgtcatctgcatttgaagaaacgtggtgagcctcctgtgtgtgcccatgtggcagtgggcacctctgccccctgcaaaggctgtctaagaacacagagcctgcagtacaggccctgcctcctgacatgccccaggccggctggaagaaagcgcgggactgtcctattgacgtggggaggggacggctggactctgtgatgctcactgtgttctctgctgggccatgtggctccccacagagaccctgggtgcccagtcattcgcgttctcctatgtgtgtgtatatatattatatatacatgtatttactaactttagaaagcccccaagggggccttgtttctgcttggacagtcagcgtccatagcgtgtcattcctaagctccattaaggagattcagaagcaagcagttacccctggagtctgcacgctgggcacaagggtcacaccttcgttgagagctcctgaccccaggagccgagggcaggacacggtagtgtttacaggacctggcaaaggggcactgccttgtgtgtgaggttttttcaccagtcagtcccttttaaaaacagcatatcttttgaagaacaagaagtttacgcaggcataagcaactcactttgcacgtggagctttcaggacgtttcatgtctgttacgttatagcctctatcctcatgggggctctgagttcagcagggcctgagctgttaatctgctttttcaaattattaataatgaaagtaacaccatgccaccacctggtatcatttcatgctttctatgtgcctggtgtttacacggcttatctcatttaatcttcccagcatgtaataaaaatattgcaacaggtactgctcctgtgtggactccttcccccgagctcacactgcttgaggccttcccagctctgggctttgtgtcctgtgtggacttcttccccgagctcacactgcttgaggcattctagctctgggctttgtgaatatcctgcttttatcctcatttataggtaagaaagctgactcagagaggttaagcagctggtctgaggtcaactgcttacgggtcggggagctgggcctgcacacaggggtctgatgcagagctggtcctatctgctttataagctgtggctcacagggcactccaggggctcgagaggacctggcgggctgagatgaagactggtgaggcctgggaggcaggtgcttgactgaggtgggaagtgggaccttggtgccaagcattcccagggccacggggcaggcctgtagggtctggtgggtatctggggtcccggagaagcccttggcacggggcttcatgagagcataggcgagtgccgcgccctgcagttgagcacgggggatgcagctgtcgcagtcgcttttgaagagtgaggggtgaggcctgcagttgctgcccgacgttgtttacaagtgagcaagttttacaaaaaacatggacagcatcagggctgacttgaattttttacttgaggcagcagctcaacctgttggtttcctcaattgtgaattaaaaaaaaaaaagaaagaaagaaaacagagaaagctgacaacgtaacattgatgagaggattcttaagggagaacaagccacaggctgtcccgagaaaggagcggggagatcgaggaagcacgctgccgtgtcttgttcgtggggtgcttgtgacgctctcgcaggatgccctgtgggccacaccacgagtgctcggtggcgactgcagaagggtgagggacgtttcccttcacaccagacggcgggtcttgatggcagaggaaccaggcatcagaggaggacaagtcaatccgggagcgtagataaaaaggaagcgaaacttatttcacattgtcaagctgtcggggattccagggaccttgtcctccaggcctgtccctgtgccctcctgtccccaggcctgagcagccgggtgtgggatgggaacaggccagggccaggtgcctcacgccctgaggctggagtcaggctctgttgccactttgaatccaggggcccaccctgaaccctgagctgggcttctgttcagtacgcggaggtgatgacctctcccacccggggggggtttgaggactcccgaggtggcaggggtgacgcccagcccagcatgcagagtgcccaggcagtgcccacacctttcctctccctgccaaggtgctccgggcctgagcctgtgtggccccctgcttggggctgtcaccacaatgccattccccgcacgcccagcaagtccctcctatgggtgagagcctaacttgagagactcttttggggaggagtaagatgacctgcccttctcaagagtgagcagttcttagatgactgccttgagcagcgatggttcttcctgcaggggtgcgcccacgaaacgctctgcgtgaagcacattggtgccatgctcaggcccagggagagtggagggtgctgtgctcttggactgggtcctggctcgagggttgaggggctgggccatgtccacaaaaagtcactggatggctgggctgctcccactgtgtcgctggaagaggggcagcgcccgctgcagtgtttggagtgcttggtcatggccccacgtggattctccttcctgggggaagctgttccgtccccaggttttcagctaacttatctgagttttgatgaagagagcaaggggttttgctaatctggattcctgtggaagggcctcctctctctgctcgtgttttatagcttggcaactctagtgctagttctgcaatattcgaatttgagtagccagaagaatttgctgccagggtggccttgcccttgactttgaaatgaactcacccgagacttcagcttgatgcctcctttggctaatgctgggttctgggctttggccgccgcctgcctgtccatcacaaggggccatgttctccaatcaggacagagttctaagcatttcacagtaaagcctgcaggagttaggttttctgttcttgacagactgagaatgatactgagaatgttttctgattgatttggtgagctgtctgtttatagcatcattagagattattttccatggctaggaattattcttgacctcacagtaaaggactctgaatcccccaccccctgcctgttttttttgttgttgttgtgtttttttgtttgtttgttttaaagaaaagacttgtaccatcagtcttaggcgtaatctccttggcagtagtgaggagcaaggcatctgatggagaaacaaagcatggtaaggtttttaccattcaggaatcacaccgcagtagcattgtagtatttgatcacaatttactcttactttttttcataaagaaagaaataggcctacagtggctctcacttgtaatcccagcactttgggaggctgaggcaggaggattgcttgaggccagaagtttgagaccaatctggacaacataggaacacctcctctctacagaaaagattaaaaacattagctgggcatggtggtatgcgtctgtagtcccagctgttcaggaagctgaggtgggaggatccttcgagctaggaggtcgaggctgcagtgagccatgtcataccgctgcactccagcctgggtgacagaggggagaccctgtttcaagagagaaaaataaaaaaaaaaaaaaagaaagaaagcaccagcagaatttagaaatgtgggccagtgtgggagcctcgcctggcatcactggcctcgcctggcatcactggctgtgggctgctgctctcgccctggagctgttactttgagagcagatcgaggactcagcaggcaggaggaatgttcacggcagggtcagttcccacgctgcatacgccccaccatcgcccctcgtcgtggctgggatgggagaccgactttagaaccagaggctgggaagagggagatacccccttccagaaggggccttctgccgctgagtaagggggtggtgcccggctggctccatgaggggcatgaggggtgctggctatgcttggcctgaggggttgctgcaggaaggccttgctccccgccggggctgagggacccggctgagcagcagcagcaggaggaatgagcagtgctcttggagcccggaggagggggcagggcttgtccttctggacgggcagccccaggaaaagagaagcccagagctaagggcccttgccctagggaggggtcccacatggaccccgaagacgttcctctctgcagcccttcctggcactgcgtggacacgatgtacggaatgaggaaaacgagcttctttcccttctctttcacttctccctcccatcacgcagcgtgcaattatggaagaggataaagaaggaaagagcagtcggaaaaattctgtaagaaccggagaggggagttcgggtgtttttacagctcctggggttctccgggaaacaaaggtgtgctatttccacttctgtgtcttcattcctgttctgcagggaagctcagcctggcttcatccacatgggtggagcagagtcaagttcagttgggaattttttttttttcctgctcatttggaaaaagaggaaaagacactgggatacaaagagggctttataaagaagaggcctccttggtcctccactccaggactttctgcgatggcggaaatggtccatagcagcaatgcccatcggggcagccactggtcatgcctgactgttgagcttgtcagcagccacatcaacacatggatggtgtggccgaggaactggatttcaaattaaattaaattaaatttcaatttaagtaaccacatgtggccagtagctacctacagcgcactctcaggaaggctctagactgagagtttgaggatcatcctttatcagtgatttgaatggatgaggcttcatctgtttgaatttcccagttggggtaaaaagaggggatgcttgtactggaatgggagtaggttcacagcgcacagcctgggccagcatcagtgtgttgctgaatttatgctccttcccaaggttgttgaggagactggaagagaagttctgtgttagagagagggacgccctagaggagttcacttagtcacaaggagcagaaatgccctcagtggcatggattgaaaggcacttacggatggaattcgggagaaattcatggagcactgcagggagtcctctgatgggacccctcttccttctctgtctcccctgtctcccgagccccaggactgccggtctcccatctgcttagtccccagctgcgtccctgcaggctctccgctctgttgctggtttggttcgtctggtgtgtgcctcccctgtgacatgccgggagcagagcggaacagctgtgccagtccctgggccccagctggactgtgctgggtccagggtctatgagagctgctgggaggccaccagtgcaggtgggcaggaccttgctccgtgattctacccatgacgcttctcactcaaggaattggcttttgtttcagtgcatcctattgaaaatcacttagccagtaagcaaatgttggcccttagtctgttaaacattaatacaaataagcacgtgtcgctgccctcccgttgtacagttgtacagctgtaataaacaccactcgccctgcctcgtgtgcatgtctcttctggtttcggcaccccagtgccgtggttgtgcgaggggatcagaatatctgcttgagattagcccatgtcagcattttattgggattgttaggcacctccgtcctgatcattgcaccacgctctgtccctgtacttaaatatctctacttggcatttgaaacaaaacaaataaacctattgtacaggatggaccaatcatgaggcattttcactctgatgttggcagtggatgtgttgacattgagaggatattcatggtggcaggctgcccccagttccaggttttggatatttggaataaggtaggctatgacaggccgggtgcaatagcttatgcctgtaatcccagcactttgggaggccaaggcaggcggatcacgaggtcaggagatcgagaccatcctggctaacatgaaaccccgtctctactaaaaatacaaaaaattagctgggcgtggtggcgggcacctgtagtcccagctactcgggaggctgaggcaggagaatggcatgaacccgggaggcggagcttgcagtgagccgagatggcgccaccgcactccagcctgggcgacagagtgactgcatctcaaaaaaaaaaaaaaaaaaaaaaaaataggctatggccatgaagggttgcttccggattcagtacatttaggaggaaataatgttgttcatcatatgacacagttaagtctccgagagataattaaatgaaaatcattctaaaatgtttgattaaatgcctttctagcctagcccctgtaggtggagtgtcatgatttccacgttgttgggtgctggataaatgatttagccacagtctcacggctctgtaaagagtggcaggctgttcctatcactgctgatcctgtgtgtgctgtgcaccggatgtgggtggaatgaggctgcaggggcacctgcatccccagtggctatgatgactaaatgaggaggcccctgtagagtgcacagcgttcacccagtgacagtgtgattgtaatagctggggttgctgggaccctagagtatccacggtgtgcatgcacttgaacttcaggataccctgtttccctctgaggtgcaagagctctggcgattccggatccctactgtgtgtcaggttctggaagcatcttctctcatctccacgtgatgcccaggggctcccccagcttctggaagccaccgcttgtccagggcaccagcccagtctgtcgtcaagcctggatttgatcttaggtctggctgcttccggaataccgagacgggcctctgctgttccctgagcttgctgtcagcaaatgtttggtgaggagaattatttggtttggaatttcttgtttatgttttagtccattaattttttttatcctgtgaaatattttagcaaccctaaagacccatgacacacaggtatctcttcaatattgtgctaattcctgcctttttttggtgtcttctcatctcagcatcagtagtggtggccatgtagggacagaggcacttagcagccgcggcaccgggaataatgatttgacttgggggccctgtggaagaggcacatgttgccgcttgaattctaagaacactatttacctttctgttttgaaagttcactttcactttcaaggtctcaattttctcaaaagttctaaagtgataaacatagtctttctaagattttctttttgcatttgtggccttcgttgtggcacagccctgtgtcaggtggggctgagcccagagggtgctgaggggatggggctcatggtgacagcgtggtgcaatcccgaggcaagtccttggcactgtgatgggcgctaccattggggcctggcatccccaggcctcattagccagcagtgaccacaggtgatgcacaggcgttctcatgtcctgctttggattccctccgttaaggaaaccgcagcacagcaccgctccacagtagctcatagccgggcagccagggagccgcagagtctggacttgacctctgcaaccccgtctcaaccctatgctgtcacaccagtgtctgagttaaatggcaatgcaaagctctgggtcccatcttctagcggggacctttgtggcttgcccacaggttggtggcacggatcgctgctctctgggacagcatgggaccctttctggagcgaagtccacttcagagaccctgggttgctgtctgacagagctgtgggcctgcctcatcctgcggccaaggtttgggtgagcgctggctgctcgtgggaaggttgggggctcaggcacctttgtgattgccttgtcttcagtctccacttctgtcagagcttacaaagagcagcacatggggtccagaggcttctggggagccacccgtgcccctgacccaaggatgcataggccagcccttgtaggaagcagcataagacttaattcctttttttttttttttttttttacatgaaaacaaacagaaatgggagttttatttgttccctgcagccccacgaacatcttttggagccatctggagagctgatcacttctttggcggggacaatcaaatattgaatgttgagggaaattagggcaaatggctccaggactgtccacttttgacagacctggtgagtgagtttaatcattaatcattaatccacgctttctaaatatatctgccccgaagaatctcccgggcggaggtgaaagtcctggttcccatgctcccttgacctgactgaagcacagctccggggcccgacagtggacaggcaccccatttcatccctgtctggggacacatttaagcagtgctgcctcggtttgttatttagtgacttattttcaaggaaaaagatccagaaatgattagataaatgcgaagtcctaaaaaagaaaacagcgcagtttctcttaaatgccggccagcattgtgaccctgatctgctgaggccttggaaggtagttgaggctgcaggaaatgtcacggggtgacctttagaattagagtgtcagcactcagctggctgcctgcatctgaaaaaggagccattgtagccagtgaaatggggaaaaaccagaaaaccagctgggccagggcgctgcaggactggccatgaccgccctgtgccactgtctgcagagaccctggtccaggcgggtattggcctccttctgggcagagtgctggtgtccacgcccagggcacacatacagctaagcacatcctctgtgtgcgtgcatgtgtgcatacctgcatatgtgcgtgtgtgtgtgtgctttgagagtggtggctttctgattgaacaagcagagtgctcaaggacacggctccaggtcagcctgtgcaggctccagtttggtgctccccttttcttgctggattaactttggaccatccctgagcctctttgtgcctcagtgtcctcatgtaaaatgggcgtgatagcatcctcagctctctgctgcttctgtgaagatgaagagtccctctgtagatgcgcccattgcctggtagctctaattactggctcttccttcagcaccctgtaagaagctgttgcaaatgaagtgtgagttggtgacagagcagtgaagaggctgagaaagacaatgaagggctctgggggcacttgtgatgtggtttggagagacagctgccctagaactcacacaggtggcccacttctttggtctgtttgtgcaaaagtcattggtagtgattttgttggtggtggtggttttggtgaggatgtccatttaagaaataaaatgaaactgaacgggaatggtaaacgagacacaaaacagaatgaaaagcctcccagaggctgagcttgaaaggaaacagcaaattacaaagtgagaatgccaagagctttctcctttaacaaaccagggtgcattgttctcctttctaatgataagggaggacctgtttgctctgggaagttttagaaaggacaaaggcgtatgaaggagagagtctctgactcctagtcctgtcaccctgggttcagctgtgaacattttcatgtgtttccttccggctcccatcttgtctcattctcgttggtttttatgtaaccagcttttggatgaataaaaatctgctcttttgcttttcacccttgccagtttactataatcatctttttttttttttttttttttttttttgagacggagtcttgctctgtcacccaggctggagtgcaggggcgcgatctcggctcactgcaagctccgcctcccgggttcacgccattctcctgcctcagcctcccaagtagctgggactacaggcgcccgccactacgcctggctaattttttgtatttttagtagagacggggtttcaccgttatagccgggatggtctcgatctcctgacctcgtgatccgcccgcctcggcctcccaaagtgctgggattacaggcgtgagccaccgcgcccggcctataatcatcttttcacattattaaaaaacccttagcagctgttccctagcactaaaagtcttatcagacgggcgttgtcccgaagccgttggacagtctctcccgggcctcccacacacccacccccttagtcagagcagaggcctagcttctgtggccctctgtcctgtcctgagagcgcacagtcctgacctggatggtgctcacatgaccctgagggaggagtggcatcgccccattttacagatgaggaagctgagacgctgagctcctggcctgggtgggctgtgctgcctccgaggcctccgaggcaggcccacctgctccccttccttccaactccctgttctggagccagctctgcttgctatcctgagcctcagccatgaggaattctggggtgcccacaaatacatctgtgtgtgccccagctgttcccactactgttgtcccttcccagaaagagagagccccacctactcagaagcctaggtctaacagagctcttccctcctttccaccttcaacggggacttagtttctgaaacacagtggcgcgacctccttgcagtctctttctcttttttttcatctctgccctgggagccaggtaggctccagactccctatcagcctatccacagctttcagaacctttccaaagtgcagatctgatcagtcaggcctctgccaaggcccatcaggagctcccagtgtccacgtcctcacggcgaacagcttccctgagtgttctgtgcccaggttcagaaggggctgcccctgcctggtgattgcggtccttgtctgagtcactgggagttgatagaggtggatcatggggcacttctgttttagcgtaaatgtgacgcctcagcgaccctgcactgcacggagcatccatgagctttctgcccaacctgtgagaatgagctgctcttcctcccataggcagcagagggtgggctgggagacgatgggcgggtatttgtgtggcccagttctctctagaaatgtctctgttaaattaacaaatggcaagttagtaaattgcaagtggatgatttaaagtcctcctgttacttttagagttctagggccctaacaggtgcttagcaaatacttgttaaatgttttcccactagaaaggttttgtaaggaggaaggaggctggcgttctcgccgtcaggtttttatgccatccgctgagtgcaggtattttgggagcacgtaaactgtatgtccaggtgatacaggttagcctcccagtatagggtgcagtggacccaaaacaggaaaaccacgtggccaggcacagcagctagaagcgcatcagctggagagagcccagagatgccctgtgcgtagccactgcaggaagcctggaggtgccctgtgcgttggtctggggatccctgtgtccataagcaggtgggcctcgggctcctgctctcagcttctgcctggctcttgaccccttaactacctcatggtagcaagaatgtgacctttctcccacgctcctttgctgctctccgcccttgttaatgttccgcccctgctggggtagattgtatccccctttgattgtggagggtagggcccttctcaaatagggttttctgggaccctgcggttttgcaaggtgtttgcagttattcaccataaaaaccgagggcaggggacaggccctggtcaaacccctttgggggaagctcagagaaattcagaaggcaactgctacattcaagctctgggaagctcccgagtagagaagccagctgggatctgtcgagaagagacttgtccagtttattatttcagggaatttgtatcccatggacacaaattcctcacgggatgccctttgggaaacgccttgtgaggactgacccagctggagcaggtacctgggaaggaaagtcatttccaagggattctgggctacctgggagctggccgctggcctcacacctgaacctgaaggccaggtgggtggtctcatttcatgtctatagggacattcagctgttatttttttaagtaaaactgtatctaatggagcttgctatttattgagtgataacttcaaatcggaaatgttctttttcccactgaaaggcctgagcaaggttttgctcttagtgctgttgcatacctgtttccacccagcttttagtctcttgtaatttctgtttgggtattaaaaggacggtctaggtccacgtgagagacctggtgaaagagagcctccttggcttctggtaatgaacttccatcaccccccttccaaacaaagaaacaaaaaagaaacagtatcctctcgacccagcctcccgccttagtctgctagttcatgacactggatcatgccttatttgacctgacccattacttggctcgagttcccagataggatatattgacttgcttttctggaagtaaagagatgcattttagatgtgggttggtgggtctgtattttctgggccctgccaagtatgcccacaggggtactggtttctcgctggagtggtggggtcactgccagcccttcagatttgtttggctctgtgctccagatggacagcggggctcagcctccactgcccatctcagtgcagaagctctccagggtctttctgtcacacatctaacaaacagccagtgctagaaaggggtttatcctcgaacgcagagagcagtgagcgagggcatcttgtcttctgccgtaccaggtgaaggtgacctcagggtcccctgggactgcttctgcaggtgctctgggagccagcgcattgcagcacctgcccggctgggagtccccagccacactgacaaaacaccggaacacttggggccccacctaccatcctggccgtccccttgcctgccttgccacgatgggcaagcacagcccctggcgtggccgtcctgagctgggctgtgcgcgcagcccctggtgtggccgccctgagctgggctgagctgggccgagctgggccgtgcgcgcagcccctggcgtggctgtcctgagctgggctgtgtgcacacaccagcatcctgccccatcagttgctgtgctgcagacaaaggagggatccactggagcgggaactcttgcaaacaaaggttctattttcatgcaaatgtaatcggcggctcccggggagaaggcccagctagctgggactcttgagcttaggccccttttctagaaggcgatggtggacactggaaatcttctttatgatatctgtgtggacttagaagaaccaaataagaagctcttacatagatattgcccttcccccgacctgccagctagggctgtaagtagaaattaacctaaattaggaagataattgtccctgtgttaattgtaggttgtcttttaaagctgttttcattctccaggcctgagcagcaggctggcttcgggccctaccgtgggttgctgcgcattgacacccatgaaaaccaaagttccagaggggcgacctagcggccttcctgctttccagagctccagggtctctagatgatgacgtttctttgaaaatcccactgcagctcttcctgtgtgccctcaggccccccgccacccaggggacccctctttgagggcgatcaggctctcagcccaggccatgtaaacaaacaccggctattttcagcaagcctgtggtgtcgcagctggcctggcaaggcccatccccgtgtgcacttggccctggccagcccgggccagccctggcaggcgagccatgccttggaacgttcttacccgccatgcttttcagttttgtcataacaccccctggcactcgacggcagcgtcccagtcaaaagggggctgaacaaggaccccagggactattgtatttggggttttctttgttgggaacttggatttctgtttgaaagtgcttggtaaaacctgccgtcctccctgtcccgggcacgcaccagcaggtggaggcaggcgctgccttctgaacggctctttccttttgtcctcggttttcttgaggcctggctcacttattccattagtcatgattggataaagcttttaaagaaaaatccccaccccttgccttactgtgccacgaaaaattcctgagtgaatgagcgaagccacccacttgataggagccctggaggctgcctttcacatggactttcaggtgggccaggccctgtatagaaccccggccctccccatagtgccctagaaacacactaaacacgggagcgtgtgtggtgtgtgtgtgagtgcgtgcgcgtgtgtgcgtacgtgagtgcgtatgtgagtgtgtgcgtgcgtgtgtgtgcatgcgcgtgcgaactgaatgcatgcgtgcgcgcatgtgtggttgtgtgtgcgtacatgtgtgtacgtgactgcttgtgcgcacgtgcctgtgtgtgtgtgtgtgtgtgcctactcccatttcaggagcttgccctgcctgtttgatttttctaaagattgacactctaaatcccctttctctccaaaactctcttggggtgatatggaagactcctagggtctccagttttaccatattctccctagtccacacagaaggtgtccttcagccacataaaatgggccactcattggtgctggacatcctcacgccattggtgctggtgtccccatgtcgctggtgcttcatgtcacgtgccgttggttctgggtgtccccacagcctggccttagggtgctctgtttctttatagttaaggaattagctcagctgacagggaactaggtaagagtaaagtctgataacatggaaaatgttagtgcacatttgaaaaaaaataaatttagtaaaaatgttgatatattttaagtttgaatgacaagacttgagtgaatttttcctggttaatgttgtgtcttttgattaagccatttcaatggagtgtacatttatattaactcttgatgccttttttatttgccgtaattggattagaaaataagatcttttctgtagttgatagaactttgttaattttattctctcatttgttttccttaactcaaaaatggtgagtaaagatcacgatgctgttttaaaatttaggaagtggtgaaccatcaagaggataaggttaggtgtaatttgaaggatgattatgaagtgagggtttatgcagatttgtgcaccagtgtgtacagtagggaaacggagggttataaccaggggcattctcagagtttgggcaggatcaggcagcgggcagagctctggtgccccatcaggcggggactttggggggtgctctctgctctccgtgggctcccacatcagatgagccaggtggctgggaggggccctgcgtgcccaacacagtggctgaggggctgctgctcctgccctgtgatgtgtgctctctccccagcctggatttccagaagaaaagacctctgctcctcctgtctttttattctttattggcctggtgctgggcacttagttggagttcagtaaaggtttagtgagtgaagaaggaaaaaatgttacttagaagtgttttactcgacttccttgatctggaaacacacacacatattgtaacataagaaaagttatatgcaaaaacagttcttaaatgacacctcgactaagacaaaacacagaccttttcttttgtggttagtgctttttcgtatttcatttaaaaacaaaacaaccaccaaaaaaccttccctacctcaaggccataaagataaccttgtatattttctcttaaggcctttgacgttttgtctttcatacttaagcctttggtttttgtgtggggtgcagggtggggatcagtttcattttcttttctcattttgagaaccataatgtttgacactttacaccctttctctgggatagctgtgcggccagctcatcctccaagttcaatctgttttggaccctccctgtgctcagctgctccagagcctgtcctggggccagcagggcactgtctccttgacaggcgctgcagccgcactcccctgtctcagccccctccctgcaattgtcccagctcctcctaagctgtgacttgtctagagacaagttcctttaaaaagcctagcctgaaacttgattggaattgcattgactctatggatgaatttgaaggcagggttggcatcctgacagtatatttgtgtgtgtggcttctctttccctccatcaggtcttctttactgtcttttttcaatagatttttataattttctctataaaggtcttgtacgtgtcaagttagatttattctttattctttggtagattgtagttgttttgtttttctgttgcagacaatacgttttttttttaattaagttttcccttgctagtttttggaattgcagttgatttttatattttatttttatatccaatcatcttattaaaatcttataatttctaaaaatttttttctgtaaattcttcagggtttctaagacaaagactgttaaagtaacgatgctagtttagtgtcttcctctccaattcctgtgtttattttccttgtcttactgtgctagctgggaattccagttcagttttgagtaagagcagaaatactggacttccttctgtcgtccttgacattaaagagaagatttttaacatttttcccaatttaagtatgatgtttgacataggttattttagattccctttttcaagttaagttcatggatagctgtgttccattagccaaatgcttttactccgtctgttgtgatgatcgtatagttttctgttctaattttctgttaaacttcccttatctcttccagtggattcagcttgtttgtgataaatcttgtcattttcatactttgctagcgcttcaggattcttcatctctgttcttgaattggagtggacggtaattttccttttttaaggtcttttttttttttaacttacagggatagtttatttaagattagaattaattattccttgaaagtttgtaaaaattaacctcagactatttggggttcatatttccttggtggtttgatgttttaactactgatttaacatctttaatggttactgataacctgaacttttaattcctgtcatatggatttaaaagaaagtttttaggagtcctacttaatctacgttttcaattttattgtcatagatttgcttctggtgtttacatctttgctggatttgtctctgtgtacccgttttcatttacaacatgacttagtcttcttcttgattaatctgtattaatcgttttgagtcactctggctttgtggattcccttagttgtaagtcagctttctgtgttttaaatgcctgctcttatcttcctggtactttctgtggctggctgcacccagtgttctctctctcccgaggttggatgtgcagctcccattagttcttagccttccttctgttataagctacacagttcccttgaagtaggcattgggtgcatacaacaagttttgacacttagcattttcatttccatcccaagtttttaaaaggtcgtgtcaacagtacacctttgagatgatgtaaggaggtgccacttggtctctgtgaccttcctcccaaaaacatacaaccccatctggtcatgacatcaaacaaattctgattaagggacattctagcaaacacccaatcaagtactttaaactgtcaaggtcattaaaaacaaggcaagtctgagaaaccgtcgcagccgaaggagcctcaggagtcaggaggataaaggaaggacagtggggtcctgggtggggtctcagaacaggaggaccacagggaaaacaggaaatccaggcacggctgcagttcatgctgatggatcactgtgggctcacgaagtgtgacgcatgccccatcctggtatagacgtgatcaaatgcctcgtattgtccgagaggtccccaggacattccctgcccaggccagtgtccaactccctgtgcacttgtccttcctgcttgcatcagacactctcctgctggggtcactttctcttttctttatgaacacataccccttaggagtagctttagtagacctgttggtgatacagtccttgcgtgtgtatgtgtgtctgatctgaaaatgtctctatttcaccaacatgcctgagtgactgttaggcaaaacttggaggtgagttttctttttctcctttcatcacgtttggtgtattcttctcatccttggccggcctacctcagcatagcagccgctccttccttgtctgtctgtgtctcactggctgctcgtcacatcttcttttgtccttgatgctcccagttttgtcagggtgtgtttgggtgtggagcaccctgttgtcttggcatatgtttgcctttgtgtctgtgagtttgtgtgttttatcagtcctggaaatccgcagctagtgcccctttaaatattgctccatagtcttccttccttcccttccttcccttccttcccagtcctgcagagtcagctgtcacacctcctcaggtggctcttatgggttttcaactctccttggacttttactttcagaatacaaaatacaggatttgggctctccttcatttttgtattttgattccctctgctcagctgatttcttcgtcaggatcttctcactcaccgaatctcctttttatttttgcatggcatttattgcttaaatcattcattgagggttttcttttttttaaaatgcatcaattacacttattatttttgaaagtctactttgttcttttcctaaaatgattaattttgacaattctgttgcttcctctgattcattacttaaaatttttcaagtattttcataaactttttatttaatcaaaacatacatggggaaaatgatagtgaataaagcattaagagattctttgaaagtttcagaaacagtaatcgtaccatttctcatgatatgagtaactgaagaacttgactgtcttttgatgtgtttgctgccttttttcacttctttctgtgttggcttgtgtttgcttgggagcgtatgtctcgctggtcttactgtttggaaatagagggatgggagtgaggaggccgttcttctgataggcatgccacgtgcatttcctgggagctgccctggactccagcccctgcatcctgaacgctgcagctctgggctcacctcggtcctgacccccatgcagtcctccacccgctgccctcaactctcctgtcagctcgagttgcttttgtttcccttaattatatatttctggcttgttggagggtttccttactgctggtgagcccagcagtgtgacagaaggtatgtcttatgcagaacctggggtttccacagcacaagagcctgtaagatgacttgtctgccacgtccccagaagaggaagtttctagtacttcaaaagcccaacctttggccagctttctctcagccccttttacccagcttcgttttctccccaccagctgggatgacaggtcccgcggcggagacacttgctggcagccggcactgctcctctgcctccccgcacactagcgaagccccagcctcggtggaaccccttgctgtaaggcttctccttccttacccaggaagtgcaggatgccagggaagagcaccggctcagcattctggccacgctgcacagccgcgaacttgggggcccagccgcggcgcgttctccactcccagcagggatctgcccctcccacccccagcatggctgtgttcctccttagcgtggctctgtccccctccaccgtggctctgtgctcatccagctgcctgttttctcactgtgtaacgctttctctgtaccatctgcagtctttgaactttgaactttgaacctggccttccaggttgccatgaaggtagactgtagattgtctaggtgtggggtgggatgtattttatttgatggcttggtagactgatggatgcatttagacgacttgtctctgggcttccttcatgcttttgatcccatctctcctttcattgtgaatatcctctcattttccttgtaagttttgtcacttgtctctggcttcctttctgagcctctaaatataccctaattacttacattaaaaaacacaatgaaacaaaagtttcccgatcctgggtctccccagtctgcagcccagactctcctcagcttcctgtgggagggctgcttgtgtatttacttttgaaccgggacactggtctccaggacactggagagtggaagggcctctggctctggggcgtgggcgctcaccgtctggtgcctttccccctgcagatcctggaggccccacctcccacccagtccctactgtggtggcctgctctgtgtgtgctgggaccatcttcatgcaggggcatcttgcctttcacctgcctctgcctctgttggcaccggatgcccaggggcacctgatgggctttcatgcatgtcacctggcgtgtgtggaagctgctctcagggtcacccctgactacgagggccacaatgcacctgcccccattcctcagggaggcagctctgcgatgctccccgaggccccgcggagggtccccgtgatggagcatgctgttggccatcactgggtcagcacagtggctcagggctgcccccatgcgttggctcactctgcccactccctggcccgctccctctgtccctcacccagcatcccaaaccacattcatcagaagcgcagccagtcctgccatcggtgtcctcggctccgctgtggtcggctccctgtagctgggctcaggaccggcactgtcctggtggagagtcctgcttcagacaccacttgggctcctctcagtgtgtctgcggcctgtgatgggcagcaggtgagtgtcatgtggagagacgtggaaagccactgggcgtggagaccgcagcatggacttcacagttttcagaggccctggggtgcagaagcgggaactgtgactggctgggggcccctgcgccgacgcccttggcgccttcggggcctcaccgctgtagatcccgaggcagcactactgtcccccagcaatgttggaactgctctccacttctccccggcactacatggcccctccagtcagcccaggcattcaagccagaagctagcaaatgtattttgcttttcttctcctaactcccgacagcctgcccatcatccctttgtgacagtgcttccaccaaaacgccatcaaggccgcctgatcctctccaattccatgaccgcccgtggtggccggcactgctgttaccgctcgcggaagtgggttgccaaacacagccgttatgaaaacgaaattagctaaacttacgactaaataagtcacattaaaacaaatgcaatcagtgcttacaactctgccttcctgatttctgtactgcagtgctctcttctctgctcgcagggcttttgtgttcttatggtggaaacgcccaggtgtggtcaggccccttctagcctctgccggcagtggcgtcccaggcccctcgcggtggccagcccgacactcgctgcagcctcgtcggcactgatcctgctcatggggggcggtagccatgagaccaggctttctgctgtttgaggagccccgcagctcctgtacctcaggcccgcaccctggccacttctgctgccgggagccccttcctccggatctcagagacccagcgtcatgcagagtttttttagcttaagcctcagttcctcagagaggcctttccagccagcttgactcgccagcccctgccctcatagtcctctgcgggccaggcccgtggtgtcctcttgtagagcgcattcttccactgactgtcaagctccctctgcaccctcagcctcagcattgctcctgcatgcgtggctgactgtgggcgagcgaatcctggaacatcacatgttttgtttgtggagtggtgtgtacattgtttgtagagtggtgtgtacattgtgtgtagagtggtatgtacattgtagagtggtacgtacattgagagtggtgtgtacattgtagagtggtgtgtacattgtttgcagagtggtgtgtacattgtgtgtagagtggtgtgttcattgtagagtggtatgtacatggagagtggtgtgtacattgtagagtggtatgtacattgtagagtggtgtgtacattgtgtgtagagtggtgtgtacattgtgtgtagaggggtgtgtacattgtagagtggtgtgtacattgtgtgtagagtgctgtgttcattgtagagtggtgtgtacattgtttgcagagtggtgtgtacattgtagagtggtgtgtacattgtagagtggggtgtacattgtttgtagagtggtgtgtacattgtcgagtggtgtgtacattgtttgcagagtggtgtgtacattgtagagtggtgtgttcattgtgtgtagagtggtgtgtacattgagagtggtgtgtacattgagagtggtgtgtacattgtagagtggtatgttcattgtgtgtagagtggtgtgtacattgagagtggtatgtacattgagagtgctgtgtacattgtagagtggtgtgtacattgtagagtggtgtgtacattgtgtggagagtggtgtgtgcattgtagagtggtgtgtacattgtgtgaagagtggtgtgtacattgtagagtggtgtgtacattgtgtggagagtggtgtgtacattgtagagtggtgtgtacattgtgtgtagagtggtgtgtacattgtagagtggtgtgtacattgtgtagagagtggtgtgtacattgtagagtggtgtgtacattgtgtgtagagtggtgtgttcagtgtagagtggtgtgttcattgtagcatggtgtgtacattgtagagtggtgtgtagagtggggtgttcattgtagagtggtgtatacattgtgtgtagagtggtgggtaaattgtagagtggcatgtacatggtgtgtagagtggtgtgttcattgtagagtggtgtgtacactgcgtgtagagtggtgtgttcattgtagagtggtgtgtacattgtttgcagagtggtgtgtacattgtgtgtagtgtggtgtgttcattgtagagtggtatgtacattgagagtggtgtgtacattgtgtgtagagtggtgtgttcattgtagagtggtgtgtacattgagagtggtgtgtacattgtagagtggtgtatatattgtgtgtagagtggtgggtaaattgtagagtggcgtgtacattgtgtgtagagtggtgtgttcattgtagagtggggtgtacactgcgtgtagagtagtgtgtacattgcagagtggtgtgtacattgtttgcagagtggtgtgtacattgtagagtggtgtgtacattgtgtgtagagtggtgtgtacattgtgtggagagtggtgtgtacattgtagagtggtgtgtacattgtgtgtagagtggtgtgttcagtgtagagtggtgtgttcattgtagcatggtgtgtacattgtagagtggtgtgtacattgtagagtggtgtgtagagtggtgtgttcattgtagagtggtgtatacattgtgtgtagagtggtgggtaaattgtagagtggcatgtacatggtgtgtagagtggtgtgttcattgtagagtggtgtgtacattgtttgcagagtggtgtgtacattgtgtgtagagtggtgtgttcattgtagagtggtgtgttcattgtgtgtagagtggtgtgtacattgtgtggagagtggtgtgtacattgtgtgtagagtggtgtgttcattgtagaggggtgtgtacattgagagtggtgtgtacattgtgtgtagagtggtgtgttcattgtagagtggtgtgtacattgagagtggtgtgtacattgtgtgtagagtggtgtgtacattgagagtcgtgtgtacattaagagtggtgtgtacattgtagagtggtatgtacattgagagtggtgtgtacattgagagtggtgtgtacattgtgtgtagagtggtgtgttcattgtagagtggtgtgtacattgtagagtggtgtgtacattgtgtggagagtggtgtgtacattgtagagtggtgtgtacattgtgtggagagtggtgtgtacattgtagaggtgtgtacattgtgtggagagtggtgtgtacattgtagagtggtgtgtacattgtgtgtagagtggtgtgttcattgtagagtggtgtgtacattgtggagtggtgtacatggtttacacacgtgtgtgcatggggacaagacttggatggagtttgccatcccctgttaacagcagacagttccaggatgttgcgtcgcatctttgttgtgcctggtgtcttcctcacgcgggagagaggcccccgagcctcctggcagaggccacaatgcacctgctcccacaatgttttccttaccctttttaagttgcttggaggcttcagcatttgggaccaggtggggaggcgtgcagtgcccgggtcacctgcctgccttctgtgcccctggctcgcccatcggagggaccagtcggcacggctgagtcatgctgactcaatgtttcatacagtggagctggcttcccagaaacagctctgtattcctctaatgttcttcgtgcatgtaacgtgaagtggagtttggggcaaaatgtgctttcagggcttgtggccttctttccttctttaacacagcgtctcgggagtacgaggcactcgcacatcagctttgcccccactcttgggttgctggcattgttaaaaacgagagaatataaggtagaaatttccagatgcctttttttttctttgaccaacatgtttttcagggttgatgccacaagaaccagcacatgtctcaagtggcataaggagatttcatcagcatggccagttcttagctgacgagctggaatcccagggtgctaggaaacacaggcactttggggttggggggtgctgtcctcttccgcaggagtggaagggatgagatgctcccgagaggtgggatccgcactttctgtggaccacagttattgatcctagaattcggggagggaaacgtcagacaggccactcatggtttgtggccactttggaaacattagggaagggtcctggggaaggcgtggagaagcccggtgagagctggccattcatcctgagggcgcggtttccacctggactctcgtggtgagggtaggggacactcctcactcagtcgcccccatcccatgccccctgcgggcctggcctggtgtggctggttcttgtccccaggtcccctgctctcaggagaccttcatttgtgggaggcactgtgggggctgtgtgagatttctggcttctgctgctgctggagctgtcccagctcactccaccctgggctgctcccacccctgcccttctgctcctcaccccgacagtgtcctctctagggagaggttttctgctgggacgttggagagaggacagacttcagaggcagagagacgggcctgaaccccagcttttctgcctagatattgggagcattacttagtttctttgaaccttgattttctcgtctgtaagatggatgtagtagaactgcctcatgagtttattataaggctgaggggatcaagtgtgaatttagtgcctggtgccagtttgttcattgatccctctaatgagtcatttgttcagtcactgttttcagctcagagacgtgagcatctcctggtcaggcacagacctcaggctttgccttcttagcagcccagagtctcctgggagaaacagcaaatcaggcactttgcttttgcaagcaaaagccattatgaaatttgagtttgctgatgccctggaatcaggaggggagccctccggcctgtgggccctgctgccccattacctccaaccactttccccgcctggggcagggtgtggccccacaccagccccacttttctttctttctggtttttcagtcctgccggcagcatagtctttttatttgtttgtttggaagagatagggtctgacactattgcccaggctggcctcgagctcttgggctccaggcgccctcctgagtagctgggactacatgtccacactactgcacctggcttcaggagtgtggtcttcccggccccggccccaatggtcctcatgtttaaagaggaagagagccacactgatgggcaggaaagccgtttcctgaaggaaggtccagagccaccttagaaggtgaattaaagcaaaccacagccttcggccacttattttgactgacatgtggtacaaaacatgttttttgtttttattgagacagtctccctctgtcacccaggctggagtacagtggcatgatctcgcctcactgcagcctctgtctcctgggctcaggcgatcctgctgcggccttctgagtagctgggactacagctgctcatcaccatgcccggctaatttttgtcttttagtagagatggtgtcttgccatgttggccaagctggtctcgaactcctgggctcaagcaatctgcctgcctcagcctcccagaatgctgagattataggcgtgagcccttgtcctggcccaaaatatgtttttacattttaaaaattatccttttctttaccaattagattgtcaattttttttttaaacaaatgctttctgtggccttgtagaaaatactggttggtgggcacctcttcttggaagactgccactggagggtcctcagggtgaagtcacccccacttggcttgatgctttgttaccagtctgtttttttttttttctttttttctctaatggtgggataatttgaaaactcaaccctttccagccaatggtgagcacctgttcatttctcaagacaccctgagcctccaggtggcctccaccagcggggagccgagtgtgcggctggagtgtgtagctggagcgtgtggctggagtgtgttgctagggtgtgtggctggggtgtgtggctggggtgtgtggctggcctgctcaggagagacggggagccgagtgtgtggctggcgtgtgtggctggagtgtgtggctggggtgtgtgactggggcgtatgactggggcctgctgagcggagagtattctcagttatttgtttccggcagatctgagaacctgagtagtaggaactgcttcaggcctgggtcccggcccgggtggagttgctgtggaacgcaggtgttttctgtgtgagtttgctaagcgctgttgggcgttctggaagtgtctttccaaagcagacattatcaagccagggtccttgtggctacaccaggctgggcggctgtgtggcccttttaggcagctagaactggcctcactggttccggggatgcgtgcggtgagagtgggcacatgtccggtgagcttgtggaagtgccctgagaccctggttcctgctccggagtacagaacgtgtgatgatcagcgatgggccaccatggcgtgactggcaccaacagcgcagagaccataaacatgttccttcctgctgaccggcccgtactcccagggtggtggcccagggcctgtccacctgggtctgcacttctgggcttccctgtcgtttccccagcttcccttctggtaatgagcttggtgctcctcctctccccacctctcacccttgtgcctttggaaaggccttactggacagaccgggaacaagagggcatctgctatttctggggagcttcagaagctgagctcaccgggctcggctctgggagcatggttgtcctccaaatacatgttttcttcttttactgatccttctgctaacctcgggaccccactataccaggtgctgggtacaccaaggtgagcaggaccccgtccctgctttcaagaatggttaagagaattgcaaaatattagtgccgtgcagagtcccaggtgccaccagcaggggcaaatgcaggcccaggagggcgcggcagtggaaaggggctgcacagagcaggggaggctccacagctgactctcgaatggtgttccccaagggctagaggggtgtgtgttagggggtcagggttgggggattttgtggcacggtgacagacagtgttgcaagaagaatgaactcatacacagacctgatcacttggtggtggcttcaccctggagcctgttgtcattccccctggcctccctctgccgtcttgcctcgcctggctctgctgctctgctggcctctgcagccggcctttgtctgggcagcgagcagtgtccaggcagcagacagcgggtagtgtccaggcagcaggcagtgttccggcagcaggcagtgtccaggcagcgggcagtgtccaggcagcaggcaatgtccaggaagtggcctgtgtctggagagcagatggtgtctgcggtgtatcggtgtctcatctccagctagagggacttaggtccccatgactggtgaagccgtttcaggaacagcactgatgaccaatggagcaatctctggcctagttgggaggtccgtcagggctgctttgaaggtggcacaggccatacatgcagaacccgggtgcctgtcccactcctgcccccgtcctgtggcctggggtccagacacagggagctggaggcagaggggctgctgagtcagttagacaggcctctctgttggcgggaccacgacttgacgccttctcccctcaacacttccaaggcatacttgccaagggtccgcacccgctctctggttcggggcctctccctgcctctgtaagactggtgcagctgctctaacttgtctgccatcttcaggttctctgcgttgccaccagagtgaacttgctggcgtgggggtcggtgtctgccgtgagtcaggtccctgcgcagtcctccctggcagtggaggaacactggttctttgcctggccccagggcagtcccagccccagaggtccctggcctgcgctggctcagagcatgctggccatctgcttgggcggagcctgtccaccaccgcctggtgccttcccgcccatccttttaaggcctctcctcctctgggaagctttcccaaatgaggcaggcgacagaggagcttcatcttctccgccccataccttcagggtggcacgtggcaccatgaggagctatctggggctcccctgggtgtcttcccctccctgtgagctcctggaaggcaggggtcctggcgttctatcttgccttcttgcatcatgggtgtgcctggcagcctgaggggtggggagtgggaccaggcactgcagaggcccccagcctcactctgaggctggacctggagtcgcagggtggcagtaccgaacccaggtgtgccacccgcacacacacagaccgtgcaggcaggggcggtggctgctgttcttccatgtgtgtccccctcgtggcggccctgcattgctgcctgttggtggggttagggtctgctgtcactccgtgggccatgacatcgccactgccatcacatttgcagagctccgtgtgcatacatgatagcgtcccgaccaacagcgcctccggtacacaaagccgtttcttggtgaatcagcaagtctgggctcctgccgtttctgggtgagccctgtgcttggacagttatgaatcatttgcttgcctcttgatttgcgtcaatcaaaccacatgtgaagaaagcggcagtgagcagcgctttgccggcagcctggctccagcgtggggcggcttgccagggacagcctcaggaggccagcctgcgcggcctggtggtctgggctgagggcctggggtggcttcggcccacggggcttccggccggcccccaccctttcttcccccgatccccgtcagccacgggagatgggtgagatggtaatgatagcgtagcgtgtgctggcttcctacgtgtaatcctgtggccaggggcacatattcgcagctctgggaatgtttatggttggaagcccctccgctgatctgttcttccctctcacacaaaatcactccaggacagggctctttgcaaagattacttgtaagaaagccttaattaaaaagagatgtcaccatgcccctcccctccttcaaaccaagaggagcagcagaagggggagtggcccagggtcagaaggacagctgggaggagcgtgggggccaggccaggcctagggaagggccatccacctgggacttctgagccttttcttttctggagcagctttggggatgaggcttgccctccgttgagtcacggtgacagctctgcactgtgctgggctgagagagccccgccgtggagggccatctgggaaagtagggttcccagggccccccagcttcactggcttgctttgctttggttattttcgaggtaggcaaatgaggttctcgtttttaccgtgaaggttacttgtattgttgttgaattagctgttgaatggtagctgttgtcctagtttcctagttagtcatggctgtggctcgtggcttagagaccagcggcgccctggctcattcccatctcttgcgggggcccatacatgattcgtccttaaaactgggaggggacgccggggtgcactgggcttgtcctgtcgtttggtaatgatcacaagtgtgtttatatgtgactcttccagggaatcgtggaaacttagtggccatgaggtcccctggctctgaaatttctctctgaatgagctgggagggtgtaaccttccacaattgtgagcccaggtttatgtttgcaacaaataataaacagcaaaacagaacagagtgatacccccgtccaaatctagcaccttcactggctatctttcattttttattacggaaaatttcaaacatttacgaaagtgaaaagacaataaggagcggactaggctgctgtccccatcttcagcgatggctgagcagggccaggcctgcctcactgtattgttccaaagcagttctaccgtcatgcaggtgtcttccgaacatgcgaccctaataccattgtcacagctttaacacatcaacacgtgaatccatcaaataatcagtcatttaaaatccccattgtctcaaaaagttttcagtctcttttctttttgtatgtggctgttgttcaaataagtgttaagtaaggttcgtgggttctaatgggccactgtcacttgtgatggacacagccgtttcctccctcttgctctccagtctatttgttggggagcttggcttgtcctgttgtgtggccacggcagagctctcactgcctgtgtccatgtggcgtgttgagcaagttcctcctccctctctttctggtgacctggcggttgcagctggagcctgcgccggaccggggctagttggcaagactgtggcatgggggcgtgggcgttctgctgggtgatgagcgggtcctgaaggtggctgtctagcttcattccttccttcctgggggctgcagagtgataatccaagacactcactcctgaatcaggtaaaagacttctgcagagaggaagtgccctcatcagctcttcggctcacacaggaaaggctttctttatttaccatctttcagaggaatgagctcgttgctttacatcatctgaaggtcactggtgagttttgtcgtttgtttttgtgtgtaattgtgagcttgtgggtttaagtgtgctccatgccttttaggcctttgctgctgttactctcattgatgttcaccttgtcctccttgatccacgaggccctgtggagttggcccttgagtcttttggacataacccttgcagtctttgattgcttccttgctctgctgtgacaagacaccttgtcaccttgtataattcctgtccccggaatttatctgataatccctcatctcagtatccttaatcacatgtgtaaagtccgtttgagcatctaaggtggtgtatttctaggttccgggaatgaggatgtagaccctgtgtggggtatcatttatccttcctgtgctcagccctcagacctgcaggtctggtctctgactctgccgctcatcgtgggcaactctctggccaggtcgctagggagggaagaagccgttgcaggaatatagggacagcttgggacgagagggccagggtagatgcctgtctaagggtctagggaggtacagaggtgagcccctctgctgctcttgtcccctacagttgcctgccctgctctgccagagtcagagggcatcgcctggggcacccacagcagcagcgcaggggtgcattgggggtgagtgcagatggttggctgcgagaggttccgatgctgggtttgacagtcagggtggtcttgtatctttttgatcctggccatccttgtggatagaaagtgacatcttattgtgattttgatttacattttcctgaggttaacaactagtgatgacagtcatcttttcacatgctcatgggccattgtgcatctttggagaaatgtctgtttaaatcctttgctcattttaaaattagattatttgcctttttattgtttgagttgtctggccctttatattctagatacagctccttgatcagatatatggtttgcaaatattcttttccattctgtaggttgcctttctggatggtgtcttttgaagctcagaagatttttattttgctggtatcctgtttggctatttttttcttttgctgcctgtgttttggtgtcctatcagagacatttattgaactcggattggattggaacgatgatgtgggccccctcttggggctcctggcttttggcttctgttgaatgtaaatgctaaaaggcttctctgggctgttaggagagaggcagattttattgcccagccagcttctgcagtgtctaatggctagattcgcttttcccacagttgtttttaattgaatgtccgtgggaaagtggccaagtaaatggaaggtttcacagagagagctgggtttctttgttgattttttttgaaactgtgcttttttgtcattactgtgcagagtttgttggaatctggcgccaggttgtgatgtctgctgagacttgtattggtcttgttgagtatggcagcattgtagtggcttttcccccactcgaaacacaagttccaggaaatttcgaagctctgtgtaacttccaggtggacatcttccctgttgagaggttaattatgggacgtggagccatcagggactctgaatgtgggacacacatcctgaggagagaggccacgtcttggaaggatgaagggcaacctgtcttcggggtccagaactggactctcactcagcagctgtgccggcctcagccacccaggctttgtgtctgtaacatggggatgacgacagtgtctacccgataatccggagatccacatcgggggatggagagctctagggaggatgccggcagaatcggctctcatagtcctaaacacaatcaccaagatgaactgttgctttcatgtgaattgagtattcctcattattccaaacacaacagcactgaaaacttagaatgtgtaaacaaaaaacacactaagccgaccgagcacagtggctcacacctgtaatcccaacactttgggagaccaaggtgaatggattgcttgagctcagaagttcaagaccagtctgggcaacatggcaaaaccccttctcaaacccctactctactaaaagtataaaaattagccaggcatggtggcatgcacctatgattccagctactcaggagtgtgagatgggaggatcacctgagcccaggaagtcgaggctgcagtgagccgtgatcacaccactgcattccagcctgggcaaccggagcaagaccctgtctcaaaaaacaccaaaaaacatactaagccccaacctttttactggttttaaattctgaatcttgcatttccttcagctccaaattaatgagaaaagtgaaggttgtgtgtctatcagataaacccggtcctttgagttgtaagtattttcagagatttgtaactaattaggatatatttaatattaatgcacatatttgccatgtttctgaatgaggaacggacactgtattttccttgccaaaagctagcctaccagtgtataatttactctgtatctggggttttttggaggtctgtgcatattttggtttgaactaagagccacttaagtctgcacgtgctgctcacagtaacgctcacatctgtcgtatccgtcaacaggtcgtcttactcctttccattaagtagatggtttaatgatttcagaaatgtcagatagttccctgttagtgcatgtaagaaattatacaaatgctgaatgcaagtagcacatctttgtttggaacaagggagtggtccagttccgaggagacttgaaagcattataatattcctgattaggttataaatgtctaggttttttagcccccggactatttcagcttattctggattctcatttttaaaggcctctttttctctatcgcctcattctatctcattttaaagtcttccttttctctatcgcctgcttcactgtgtctcaccatgaaatttcctgtttttctgcatgttgccagctctgctctttctcctttccagttgaatacatcggggggcagctaatgagcatcccattgaggccacagcgagttctttcggcttgctcagaatttccctctccaaggtgtcaccaacggcgcttttctgtttccgtcatccattcatttttacacatacggatgtggacaggccacagggtccacacagctgctccagtgcagcccgagacagagctgatggggcagcctccaggactctgggtccttacctgctgccgtgggagtcatcaggctcctgaaaggctggtgacatcctgagctcatccagagagtaggctctgggacctcaagggccacctgcgtgcagttgactctctctcagagttgcctgttgtgttttgtgtaaggacatcattttggggggcggggagataagtcaggtccactcgctgctcttgtctatgaagccctgacacatgataatgtgcaattaacaaagtgctgggatgagatccgagccagccttgggtcgtaagaaccaaacccatcattgctggccttgtaattatactgttgtgtgtggacagtttgtactttttcccttttcgagcaacttggaagatttgctgtgtctttaagttgaaatgacttgagtcatcttcccttagaaaccttctgtgtagaaactcagcctctgaacacacggtgacccggcagtcccggccacgaggtgaccagtacttgatatttgtctttttaggaaagcgcacgggctcgcagtggccagcccactggggcatgaataaggaccctcctcctccaggaggccagcagggcctcatgcttctcattcagtggggaaaactggggttctgaagaatggagcttgcagagaattcctgcagactggaatggagtttggcactcagctaaaaggtgttgaggtgacacctgcaggagttacctggccagtgccaggaagtcagaccccacccttccttgggcacacagacaatgtacaatatttgctaggtgcatgcatgcatgcacgtgtatgtagatgtgtgaatgtatgtgggtgtgtgaatgtgtgtgggtgtgtgaatgtgtgtgggtgtgtgaatgtgtgtgggtgtgtgaatgtgtgggtgtgtgaatgtgtgtagatgtgtgaatgtatgtgggtgtgtgaatgtgtgtgggtgtgtgaatgtgtgtgggtgtgtgaatgtgggtgtgtgaattgtgtagatgtatgaatgtatgtagataatgaatgtatgtacgtctgaatgatgggggtgcttggatggcttccatctgctggtaaattaggtcttagtgtgcacagtaagagggtcttctaattgaacgtttccaatggtagctcctagaatcaagccgctggaagctcagctatggaagtgatgggtccttgagatttcttgccagtgcgattagtctttctttaaaagccagctcaattccattcttctatgtcgccatttctttgtttctttccattttgtgggggtagggagcctggcaccatccacctggtgccctaaggtcccctggtaggcttctgcacaaaagcttgcctgtctgaccctgttcttggttgacaactgatgaaaaggctaagagaagttcagttctcacacctggatctctgcggtttcctggggagtcctgttcccttttctctgtccagccctcctgaggggctgtgtccctgacaggaaatgggtggtcacctgggattaccctgtcttccttggcctgcaggccatctagtcacagggcaggttcttctgtccctccaggtggtcatgagcaccaaaccgattgtactgtggaaatgcttggtaaaagccagcagggaagaagtatgttgattcctttttgtggtaagttagaactcagagagaaatttgtttactttcatgatgaatatctttatccttgacatgtggcttatttactcagcgtcttttcaaaatcacactttatcctgagaaaaatctagacccaagtctaatctctgatctcttgggtcactcttcacagtgtggaatgggccctgctccttccaggacaggcctgcctagggctgtcagtggggcctggcccgccagggccaccgtcctggccaccagcccgagtctgggagtggccagcgctgttggcattcccagtttgctgaggaccaagttcacttcctccagcacccattccaacttcctaaggagaaagctcagcagcgagaatgggatgaattgagcaaataaaaaaaattacaaccaagtgaatttaaacccctctcaaaacattttctgattattctggtaactctttgacctaatttggacaacagttagagaaattcagatttatgcctggaattcaagtatagcctgtagcttggtgtgtgtgttttaagtgcttgatatttgtctttttaggaaagtgcactcattcttagacgagacggtatttgaaagactgtttggaatgtgcagaattaccatgtaagaactcagaagctgggaacaatggcaagcggctggctttgggtggaaactaaccagctggctggagcagtctctgtccttgacggagggagaagcctgcgaggggatgcagaggacctgccccagggcagagctcttcgtgaggggcctcgtccctgtgatttgagtccccattgccgtgtagaagggcgcagggcccctggcacaggcctcttctgtggagccctccaggtctgccttggctcagggctccgcctcctggtgaggaagtgtcacggagctgtggtttaacgtttccggtttgtggctagtttcttgtgtgtacaactctctatagctgtgccaagcccttccgggaacagttgtagatttttgctgccttcagcacgtcctcaagggtttggggagtccttgctgtccaccgttgtatctggggaccctgggcaactgctgagtggtgccatgggccctggtgctccgctgggaactgttggccactggtgctcttcagactccatcggcttcctcgggagggtctgtatcagaggccgtctgtctggtgtgatatggacgggtgtggtatgcgtgtccatggtcacggattagtgtttacgaagtgtaattataggtgcagtggatgggaactttctgtgggccgggcactgccctagatcctggacggtggtaggtcccaccatctcccaggtcatagatggcaacatcagaggtcaagtaatgtgtccagtgccacaggagtgctaggtggtcaagcggcaccccccatgcagtgtacagctgccgcggagaccatgtgggcacttactctccctctgcacagctgtgagcaccagctgtgcacagccactgtgcccaggatgcccagggtggtgtcctgagagattaccagtagccctgccttgtcccctgtggcttaggggacctccagtggttagggctgggggagacgaaactaatgacctggtgtcccctggggaaggccacagcacctgggtgtggggtggagcaggagtcccaggagctatagaggccaagcgggtgccttgtagacaccgtcagtgctggctaagtgaaggaagagcctcttccactttacaagctcacagtcccctttgggctacctggaaatggtgacattgggagggtcccaagaggcagatgtagaatgtggagacagagggagagagggtgggatgtgagctgtgagctgcagcgcttgcctttgggtgtgtggaagccatgatgatttcttggccagtggcttataatttcccagagggagcaaaggtgtgtgtcatgaaatcgtggactcttgcctcgggacagctggtatgtaattgttagcctcatttgtcctcagcagccccggaggcacctctggaataggtgggggtagcatggccagcacagggccaggcccccctgggcaggtgggctgtgaatctgtgctgcaggcaggatggctgtgcggaggtcatggagggctgggcaggccaagccagtggcttgcagtgcagggcattgaggacagtcagaatctcagtgtgggctcctgggaccagggtcccggcctatggagaatcaggggcacgtttcccacctagcggctctgctacaggaagtaggcctgcctggagtgtgggctccctgcctcgggcactgtgctgggatgccggcgaggggctatggcagtgtggtgggctccggctggcctggccccttggccttatggttcacctctggtctcagcagccttcactggctggcagcccctctggatgccacagcagcctctgcgcaggcttaggggctctgtgtccccctccctgtccttagagggggagctgggcaaggcaggccacgctcctgccatacggttggtgtatgaggatggacaggcagctcgctttggcctcacctcatcccaccaggcccaggaggtcagtactccagcctgatcggggcactgcccactcagcaccagccagcccatggcatggttcccgcattcccattcacccccaggacctagcagaatgcttgagctcatgcataaccttaaaatggtgtttggaagttccaagaagcctggtgtctctgacactgttgtttgggatcctgcagagctggctgaccttgagcctgcacccagcctggtggctgtgtctttgtggggtgcctgtgttggtgccggcgctgtggcctggtgagcattggcatcacctcgtgttcctgctctgtcctttgtgcctcaaggctctgcggagcaggagagtcaggggcaaagggagggcctgggttcccgccccaccgcacctccccccaggagggctcttcacctgtcccacatgcagtgcccagaaagcacagaggggtggtgctgggaggccactaacagtggggtttttctttgattttggaagtgctgtttctgagtgggaggccttggcttctctggaggagtgatttattttgaaaccacacccattgctgggctaagattgacttcctgatacgaaagtctgtggcggtgtttgctgagaagtcacacgtttgaaggggagggttttatgacttcatctgtgatgcctctggagtactgtcagaggctgtgatttttcctgagtgtgctggacccatcctggggttggcacacatgtgggagccctgcttgtcacttgggggttaagggtgacctggagcagcaagtcctcccctggggcgggttcacagtggttcaagggaggtgggagagccccagggctggcccctggctctttggcccccatcccccactctccagcccctgtcaggctctgcacccctgtccacttcagcccgcattgggcctgccctgctctgcagggggaggggcaggagagtccatcttcagggttctctgaagctggacagttctgagaggcagcttccagctcatggaaaaaagaaagcccattgccacacctccagcagcatatgggggccttcaggtccccggaacaccgagtaggaaggaaggggcaggaccctccgacggggcagcagtgggccaggtgtcccccctgcacagtgtttacaccctgggacctgccgcaaggcatggctttcagaagagcctccccccaagaaatgctgcagacaggacggggcttctagagaccttggcttctacccaggaaggctgatctattcttcgactgttgcatcagcttcctcaacctctgcaggttcaggctgcgagccctagggagcatcactcaaagcaccctgttggccacttaggatcaggagggcctcggctcacccaagccatctccctctggtcgcatgtggttggctgtcctgtcagagccgtgggcagccacacttctttttccaagataaaccgctgcatctgcccagcgaccttcatgtgtagtcttacattagcacattcttaacagacatttagaaaccaaccaaacaaaatccagtttcctgcccccacggtctttcgctcttttgccacactcacaaatgtgagctgcatttggaaatgcctgtgcttccatttgcaaaccgaagctgaatggaacctggcaggcgcatctgctcctccgcagtggaggctggggcggcccgagcagaaagaggtgaagcctgtgcctgctgggagtccccgagcggcaggaactccggtgtctgggatggcctttggggtgtgaccttaggctgaggccagagcccgtctccccacgagctccccgcctggcctgggaaagtcagccccctcctttccagggctgtgtcttcccccttttgttttcagtcattgagcccccgctcgaggatggcccccaccccaaaggtcctgtgtgccctgagtaagccactggctctcagaggtgcccacgtacccttcctttcagactgaggggagcagtggccagacagggctctgccttcacggagcttcccctctgcagagaaggggcagagtggcgtcactgggcagccagcttagatcgagcagcaggaggcgaggctcagccgagtcggacagctggggccaggcaggcggcttgctctgcatgcccaggacagcagcactgggctctgtccccccgtcggtgcccccgtgtctctcaggaaccccttcagatgtggttaacacctccaacttggaggcctttcctgactgtcctgaccctgtttattcttctctcccgtgtccttctagaacatactctcaggcaaggcatgaagatgctgctgtgtgtagagcctcacttccctgcccttgcccctgtccttgacagcagctccgtgcgggcctagcaatacccgttgggcatcagtgccaagagctgccctgcctgggggttcctggtggtgtagacgtggacgcctccacacctgtgcagtgaggcccatggggcagctccgagggggaagctgttcacctgctgcctgttgtgaagagaaggggtgatctccaggcaggggactgggcgggcttcggggcggctgatgtgcaaggggctgggatgggcgggggtcctcagggtgggcttcgagacagctgatgtgtagggggctgggctgggcgggggtcctcagggcgggcttcgggatggctgatgtgcagttgcacagtggccccgtgcccttggagccattctgacctctggggcagaggctagggcaccgacacagcagacatgaaggagggtagtgtttttcatattttctagcagtaattgcagtggtgtgtatgtgcctgtgtcaccgccgcagcaggttctgggatcttctcttggtcccgagtgtttggggcagtgtccacatccttcattctctcgtgtcttcatcggcataatgggcccttcctggggcttggcttcccgggggcttcacgcgtagatctttcgtgaagcacagaagcttccaggctgtctcagtggtgccgtgaccttccagtgagggatccactccttagagcctcacgctctcctgctcaccagggcaccagcttttccaagagctgctgggtggatcccagaacagtccctccgtgtccttagtgcctgagcacaggcctcctcgtctgtgttcttgggctgcgagcgtggcccacagaatgccctgtgcccgttgcgccttcagccgtgtgcacccttgggggtgtcccgcttgtggtgcctgcccacccctgcactagcccaggtctcgttggtcccacactcttgcccagaaaatggagccaggctgaggatggggacatttggccaagagtgtcagagccaggctctggccccctcagagtagagatcagtcttgcctgctaatggcattacctcatctcggacctgggcaaacaaggcaagggtgatttgagaagatcctcgtctgtttctaattaaatttctatctctgctttcacaaaagcttctcttttatctcttcctcctaattatttttaaaatctcaaggaaaatacatcccttccacttacgattccgcagagaaccaaattgctactctgtttctaaagtgtgttattgtggtctctgatactaagccaaggtttctgtaatcccactaaaattttatctcacatcacagaaatttaggattcccccaaggagacaccacaggaggaaatactagcttataaaaagccacgtggataccttgtcgtgggtctcagtggaccgtggctccttcttgggccttggggtgagcgtggcccggcgtcactgcaggcggcgctggcgtggttgggagggtccctcagggctttcccttggagcgacaagggggcagatgccaccctgctggattcccacctagggcctctgtgtctggggccttcagggaagaggccaacctgtaggggccgggggctcacgaaggcagtgctttcatggcgccaggcaacccgaggaccctccgacataggcttttcgagactctcagttgccctgggcaggctggcagcagaacctcctggctgggccgggtggggggtgtccctgccgggctcctgccactgttaaggagcgagggaaggttctggggtggtttgagttggaaacctcgccttctaagagtggaccagcccactgctgccccttcctccccgtgggcctgggccaccatctcaccaggccctcttaggacgctgacttctgcttttcttcagcagggagaccccttgtccagccttgtctctagcccgtgggttgtgggggaaccagaaggctcctcctctgtggacctgaggctcccagcctgggaagtctacatgctggctggcaggctagtaagatgcccatttttggcaactgttgaagcgtgttttgtcatgtcctaggatgccccatggatgcacctaacagggtccccagggcctgcccacctcccagagcccaggcctgccacggtttgcttccgtctgtgcagagcctggctggctgtgaccacgctccatctcagcacacggcagctgctggggtggagttctggacttggtgccttctgtacgccctccttagtctcatctctagcgtgttacctgggctcgtgtacattctgttgaatttagttcctaaagtgcatttaggcctcggcagtacctgtctcacctgcacgtttcttgattttctgtttgcctttacagaatgggccagctgggctcagtcttatctttaacaccaccccggccaccccatctcaggaggctgaggcttaagcccagcctgggcaatgtagcaagatcctgtctctacagaaacaaacaaaacatccagaacgtccacctgaaaccttagtgccgcatcgagtttaggtgcatgtacctgtggggagcggagactgccgctccagccgctcccaggctggcttccgtctccaccccagtgccctggccttgtcatcttccacgtaggaagctgggttttcttggtggccgctgacaggataggcttccgtgcctccttctcaggttcaaggtgtgagtccccatcccagcaaagacagagccatttgcacaatgcaatgtgagccgccttcctgccctccatgggaaagagaggcagcgctcgggccccaggtggaaggcgtgcccagggggaggccaggcatgagaacactgcagcagggggacctcacatcccctcacatccaaccttgcaggctgcaggagcagagccggaggccacaggccacaggccacacagcagggccacagagaagcggtactcccaggagtgagtggcctgataggcatttgatagagacacttgaggctacagtgttgggattgctggcgggaagagagatgaggccagcaggccggtttggggcattctgtaccacgatgaaggataatagaaacttagcatgtttattggacaataaacagaccctgctccagacccgttatttgtaccacttagttaatactcgtatcagcaccctgagatccaagcgttgtccttcccattttatgatgaagaaactgggacatataaaacttgcctaagatctgacagctagtgagtgagggagtctggtttgaattgcacgtctgggttcagagtccacggtcttacccaccatgcgatgcttttgcatgagcgtgtgtgtgtgcgtgtgtgcaagagagtcgtcacagggcgcctgcagagtctggacacgcggtccgcagaggggcttccgttggatgggacaccccaacctctgtctttcagctgaacttcaccaaaaggaattgctcagcttatagaggtggcggcctggcatgcagttaggaaatcaatcacagcgttgggggtggaaggcaagggagcggtgtcatctggctccttgagtcttcagccttccttcctgggctctggcaggagcttcacccttagatcctcttctccttagctggctgtcagatgccctctgtgtgacaaaggacgtttcactgtgtcacttctctcttcctctcctgccccacaaggccatatttcctacttgcaggctgtgatctagggactggggctcacgccataccacaggctctgggctgagaagaaactccttttttcttcaacattgtcagcagagatctttcctcttcattagtctttttaaacaaccaggttttggttttgtcacttcggtctatatctcttttctgtttcagtaagttctgttcttattacttcctttcacttttatgagtttaatttccgtttgtttctaagcctttgaagtggaacccgaatatgaggattttaaggccattttcctctatgcatggctttcgctgcttcccagaaaatttaatgtgtgctatttttattacccaatttccctttggcatataggtaatttataagtgtttttttggttgttgttgttttgttgttgttttgtttttgagacggggtcttgctctgtcactcaggctggagtgcagtggtgtgatctcagctcactgcagcctccaccttccaggctcaagcagtcccccacctcagccacctgagtagctgtgaccacagttctaccacgcctggctaattttgtgtattcttggtagagacagggtttcaccttgttgcccaggctggtcttgaactcctgagctcaattgatcagcccacctcagcctcccaaagtgttggggattacaggcgtgagccactgcatctggccaagtgtattttaaggttttcctagttcttttttgttgttgatttttactttagttgcattatattcaaaaaaatggggtgatacgctgtcaaagtcaggaatcagtacctgtgttaaagtctactttgtctgacgttaatattgctatgccagccttccttcggctgttatttgcaaggtacatatttttccaactgttttctttccatactttgcatagctgtatgttttagatatttccttgtgaaaagcatgtgtttgggaatttttttagtttatgttcttctatgcagtctggcagtcttcacttcggagtagagcctttagtttgtttacattgaacatgattgcctagaatgtttgtgtgcccatctgccatttcactgtgcccttactcctttgtcctgtctcttctgtggcatactttattatttgtcaatattcatttccatatatccacacgtgtaaacccttttcattgttctttatatgggtgttcatttccagtcttccctctgagatcaggtgtgagaatgtcttctggtgtaagatgatcagtctttgttggaaaatgactctttgaagaatgcccgtgctggttagaggattctagtttgacagttaccatcttctagtacttctaagcagtccttctgcactgtgaaagatattactgttttctggtttacgtgtttccgttgagaaatcaccagtcatcctaactgctgttctttgtaggtaatcccccctccccctccacggccgtttttgttttcagcaattttccctggtgtcttttagccatttggggtagttcttggccagggtcctttcagacgtgcttttgacccgttcagtgtctcctttcctgtgtctgcctgcacattctgtctcggtgccttctgtttctccaacttcctgcccttgacttttgagatcattctggaaatgtccttctggcccaccttcctactcacaaattcactctagctgtgtctaatctgttaaatgatggagtccttaatttcactttttgcatttttcagttctagaattctcttttcaagtttccaactcatcttcttaaacatagaaatcatcatttctttaaaatctatttctaaaactgccgcaggatcttaaattgcattcaactcttttatcgttactagaacactattgatattcctactttgaaactattgtttatgggtcctggtattgcagcaaataagtaacaaagtctctttctcagaattctattatctggagcacctgagggtctttttctattgtttgttgttctgttgggttttttttgttgggttgtcttttcctctgcctgatatgtgaatgtgtaagtgtgtgtgttgaaaatattatttgcaaaatctgttgagacagtttgaggcctaggatgatgacatcatcctcattagtagactgaagtttgtttctgcctggtgcttgggggccctagcaatgagtcatcacttcagttctatttcaaggattacagagtcattagaagcagagctgcaattgttgagggtccatttattgtggagtctctttttttccctaggggttgcttccagatcccaacccacatttccctccttctctcctgcctgtcagtccctggagttctcctcctaaccctaatatctgcaagaggcggtcaaaagtactaaagattcttagatggctgggggtggggctctgcaaataccaacaggggaaaatcagccccaaatgccatcttcaccccccagcctttgtctggtcctgtaattcttcactgtttttttttaacttagtagtgtcatcaagaagatgtgtttatatttgtccagcttttgtgatttttctctctgctaaggctggaccacatggcctatttcaccttttttctttttttttttgcacttgtgttttttgaagcagtcatgtttattaaatatcgatattcagagtttttttggtcaaaaacaaaattcttctataagatgattagcagtatatatggaaaatcaggcaatttgaaatgaaattaataactaagataattattaaagggtttataggaatgcttattctgttatttacccagagttatttgtctacatggatattttagagttttaacagcaagtttatgtgagaataggtgtttctgttgagggacatctgaaaatacccaggttcttctgtcttcttaggctatcccacgtggattcttggtctagtggatccgattagcagtatacctgcattctaacaaatggaatggtaaaattagtattattagcatgttaaggtcaaactgtttccaggtactcttgcttgggtagagatttggaagttgactatatttgaaatctgaagggtgacaagtcagtgtttctccacattatctgtttccccataggtagcttgatttattcatccagtcatctgcccatccagtcccttctgctgctgaactagtcattgcttcagggtcatggacacaaaaacagacaagggtatgcccctcttaggggcagacacagaacagtatcagtggagcgatctgaggaagccagtgttggcagggagccttctagatggccaacaccttctatgaaagaggaggatgctgctggggtgaagtcctggccttctgggaggggctggaacccgcctcggcgctgggtcagtgctctggatggcagcctggccccgaccagcctgtcctttcccccatgtgttgttctgaatctctttcccctgcgacagaattcacagaaaaagcaaacctaattttttccttagtcaaaactattaaaaaagaaaaatcccacacttaaagccagacctctgcagaagtaaatttgggaattcattcttggatttgtttctctcctgccttaaaagagaaagaagcctcctagaaggagccccactgaacttgtttgctgttttcttcagtgaaccgctttctgtggctctgcctctctgagaatgtttcaaactctgaaacgcagctggaacacacttgagatgctccacacagactacaaagtgatggcatggactgtgcagaacagatgctgtttgcattaaaataaaagacaaacataatatttgcattaatcgagaacctttgcaggagtatttgcatagagtggtttatccttttccaagagctggttactcttaactaatttctgagtgtagaaaggataagcaatcttttgctgattatttctcacaaagaattgcttttgcccaagtgtgtagctgtttccaaagacgggctctccgacatgcacgtgtgatgttgagtgcagcacaggaagaatggcccatgtgcctggcagtgattgctgtcagtcatgctcttgggagctttttgtgtttcagagtaggattgctgagctcgtaccctgcttttagtggtactgaactttgtttcagcagagttgtgcagagttactcacactagaccatatttcagtggcctcctcttcctccttataatgagaagaagccaaggctgtggcatgttggcgtgtcaagtgttttggtgcctgtgcgtacaatttcagggacagctgtacttaattcttatttcattagtgaaggctgtgtaagaataaagacaaaggactcagagcaaagaaaaaatgacggtctctcaaagagaagtagagcccggagatgcaggtcataaaccctgcataattggctctgagtttcttagctgtcaaaggaaaaagggaagccctttaattttaaggtctatgttgttcttaagaggaaaccaaccaggtgttttaaacagtgactttgaaacacacacacacacacacacacacacacacagtgagaaaacaagattacacatagtctcggtatctgtatgaacctttgtattaattgaatattcagtagttattaatgtgtacttacatgatttactagtgtttttgccttaccattgcttctgtcatcttactctttcacctgggatatgattttcttccttctgacataatcccttgttagttcagcaatggtttctgaatggtaagtactcaagttttgtttatctgaaaatgtttttgttttcccttttacccgaatgatagtttagataggtgtagaattgcaggttgctgtgtctttcagcatgtttgaagacatttcattatcttttggctacttttgttgctgttgaaacattgcctctcaattcaatgttcttagatcatctaactttcctaccttggtgcttttaagatctttttccatgtttagtgtttaaatgttttattgcactgtgtctagatgtcgattcacacttatttatcctaattgagacttagcatgcttcttaaatctaaggactgttatgtctgaattctggaatattctcattcgttatctgttttaatactgcatttgtacattttttccattctttaggaactcatactaggtctatgttggaccatcttattcttttatccttgcttctctcctttatcttttcctatctttgtgctgcattctggttagttatctagatctagttttatctttatatctaatttgctgtttttatctttaactagatctaatctgttcttctcaattatagaaaattcacttaattctttttaaaaacttctcatctcccatttccaggtttttttccttcatgatagtttctcttcttcatttaacttttttttttttttagcgcagcttgttgtcttttccacattgttttaatatttgtggacattttggagtcatttctcggttttgttgttcttgccgattcccacatggtgggttgtttccatctatcatttgtgatgttaaatttgcatggtaaactcttcagcaggggactttcctccctcccttcctctcatccttctttgtgtgttttgtgtgctgtggattgtgggtgtagccctaaggagctatttttctttgtcttcctggggctacagggtttcccaggttctagactagttttacccttatttctagacttgagattccagaactactcaaagaatatgaatctggaggccacatccacagggacccaggtttagggtcttagattctcactgaagcctcttcctagcaaccctctattgcttcccaggcctggtgggtggggttttctagttctcttttcatagaccagacagtcctccaagagttctgcccggacacagggtctcagttccagttccctgtccaagccacgctcatggccacctctcctgcccacccagatatgcagccgcccactggctccctggtgcctgtctccagttctgatgactcttgggccccaggaacaggcagctgggtcttagtgcacctgctcagagggccgtttgctttctttcctttctggtaattggggtcttctcttgaattcaactctgcctacaatattagggcgagattttattctatcttcataactgtttctttgttcttacagtgggaagcgagggatccttatcgagtcagtgcagtaaggtttgggaacctaaagttctggttgacttgctgtgttctgtagctctgtgttgtggacatgaggaggctctgtgcttttcaaagtgtaaaattggcttttactacaggcgcgtgttaattcagaacatcaaagcaaggagtacacattcagccactgctgttttccagttcctcttttcttgtagttgagttaaaaggctagcccttctttctagttgtctgaatattagatgtgacatcggtcataacagcatacaggggtgttcgttttaattcaagattgccttcatgcccaagtgtgggactttatgggtataaaaccaaagaaatttgctttagattacgaaagctgcatctttgttttgttttgatgtaatttctgtgttttctttgccgtatgattctgatttttaccacgctaacgcagtggtacaagatttatcatctgagttgcacgttgagtgataggaagtggatttgttcccgagactctaatatcttaggagaagatgaaaatatgtcatgagcttaatgccgcgtatgaagtgtgatgggaatgtgtgttgtgcctctgctctgccaggcacactgccagctacacaggaagcctgctaggaagtgtgcagtgcgggccgccgtggccagcgggctctccgttgcaaaaccggtggccggcgaagcgcaggtggtgcgttcctggcggagaacaggctgggtcttaagggtgtgtgcgtcagggagggaggagagaaatgatcggatttctgcttcttcaaaattcaaaaataactttattaaacagaagataagggattatatttttaaaattttggataactctgttcttagagctatgaagcatttaaaaccttggaaaatcgtttaagaaaacattttaacctattgactgccctctggtttggtgcagtgtttgtcctttggcggagaagcaaggggaggaggtggcgggcacagaccatcttcccatcctcaagaaggaacttccgtgggacatgagagctcttggaggcaacagcttcctttttgttctgctctttccctcgtgccttttgatttttctctttaactttctgctaaaacctgagaaatgctctcagccaatctgctgaaggaggggaaagtcagaggacttgctcccacaacgtgggctgtgtccatggtgacgtgggctgtgtccatggtggcgtgggccatgtccatggcataggctatctgtggcactgcggcttgtgagtacgtttgtgggtgcttagtccagtcctctcagtcctgcaaggttggagagcatcctggcacccattcgatggctgttgacggtgaggcccacactgatcagctggctcatgtggcatcacaggctcctgggagtggatcctggctttgatgctgggcgatcctgctcccacactcccggccagaatcctggaaccaccatgacagtcgtcatgtggaaaccacaagctggaaagtctggaaggggcagaaatccacatcctgccagtgacattagcgtagtgaacatccaacagcaagtcgcttctcctggtggtggctctatttttagaagattaaaatagaatgcaatacaaagaaatcactgtatatttagaaactgaagcttctgttgtataaaaaggaatagtgataagattaagttagtcttggtgtaggggaggttgtgatgtgtagggtatattcattctgtgcataacagaaatgtaatagtgatttctgcacatggtacacctgcttcttagaggatccagaaaagctggttttgttggagggaggagtgtgctggagtactattgaattaaataataatgatgtgattatcttgaatgtacatttgtaccattgaataatgagccttgtgcagtgggagagcgtgttctagaatacaaggaggtagattggggcatctcaagcaggagctaggactgcaggtactgtgtggttacagctggggccagtgtgtggagaatggaactctttgtttttattttttatttttatttttggaggcaggtcttgctctgtcacccaggctgtagtgcagtggtgtgatcttgctcgagagatcctcgtgcctcagcctcccaagtagctgggactacagtcacacgccaccacacccagctgattttttgtattgttgatagggacagggtctcattatgttactgaggctggtcttgaattcctgacctcaagcaatattcccgcctcattcctcccaaagtgttgggattacaggcgtgaaccactgtgcctggctgggaatggaaatctttacccagatcacccacgacgctagctgtggtggcatctgtgtgtctcccccatcttcactttttagaaataaaattttgtttgaaaacattttagatatgaaaataaaactacgtggtgtatattattcggtagtaccaaaattaaggagagtaaaacgtcttgaaatcgtttaaagttgaggacatggaaaccactcatgtggaaaggccctttccaccccacgtcatcctctaagggagctgacggcgcccacagggccaggtgccagctgacgagtctctttccagacgtgctggctgcaccggtaagttgatgcaggtctcgaggtgaaccaggcgtgtggcgggggcacgtgaacacacgtgggcaggttccccgggtctgcagaggggaggatcccgccaagggtgagggaaaaccgcccccgagtcccatctctggcagctcttctgctggggaggcccatgagccagtccactgtcgtgccccttcgctgtggcctctggcagcgggcttctggctggaacacagcagtccacagtcaggccactgaaaaccgtcctttctgtcgaggtcccagggaggaagtgcctcttctggccccttctccttggagaggccaagacgttcctctaaaggaggcccgatgcctgtgtcaccactgccagtgcacgctgaacccatagcagcttctggatacttcaggagaatggcctgctgtgtgaaccagtgcttgattttgtacccactgtgtctgccccaagacaagctgctggaggctccagccagtggcagccccagtggcaggaaggcacgtggagctgactgcctggagctgggccgtgcggggccctggactatctgaatctcatgtcacattttcacagccttcaattccttgttcttccccactggttctggccaggtggccccgggatctctggggagccacctgcagggttagagaccgggtactgaagacacagtgatgttatcacctggacctctcctctcggacccctgggggccgactctgtgtcttcatcagctgggttctcagcacctaaggtgatgtctggaccacacgtgtctcctgatagtgcttgtcagagtcatggaataaaagcagggtgctttgtttaaccagaggacatccacgcatcctcataggagatgtggagcggggtattccctgcaattccgatgggagaggccgcggtggccatcacggaggatgctgcgctgggcctccttccagaggcgggagggctgtgcacggcctccttccagaggcgggaggcccggaagcagagcttccccttggatgacgcgtcacagcaggaaggagcacagctgtcgcggggtgagagacggcagaaccagtgtggagcagccagctgacacattaaacgagtcttcactgcttatgtatattttgtgcacattctttcctgacacaagagttttgagtgcagtgtgtgtcacttaatattcagctccttgttttttttttttctttaatagctcagctaaaggaatgaataaatattttagaagattagagcccctcccaggatggcgtggtatttggatagtgagatttcgggtagagtaaaggatgctgctgaaatacatgttgttgtagaatatggagaacttgaattttgaaccattgacacaaattctgaacattttggattttttttttcctgagaaagtcacaaagtaatgattcaaaggaggtttagacgtactgtttgctcttcaaaatggtgattggctctcttaaaatcagcaggttccatcaaatctgcattttggatttccggcttgcttctccccactcaagtctctctgtcttccctacctgggtgagtgtggcacacccacgccaagtccatcgcagagtcctgatggatccctttccccatctctcccagctctctctccgcctcccccgccttccgcagcccctccccgccctgggcgacactccgcatggtggctgaagtcggaatggaaggtccttaccatggccttcggacctgcagccgtgtctcctctgtctgccccgtgggaacccccaggcttgttcccctcccaggccttgcccttgctgttccctccacctcgtgtgtacctcgttgggatcgttgatcccacatgtccttcaggtgtcggctcaaatgccaccacctcacagggccctctcaggtcactttgtctaaaagaacagtccctgccgtgttccgcctgcgtgattgttattccagcacgtgatcccacacggtcttctaatttacgtgtcatcacctcttcagcagtggaagtttggggtgcagggacttacaacactgtgtccccaaaattgtggccatcacttaatcgctagttcaggaaaacttgaatgaatgagccagtgatgggatgttgaccttgaggcttgaatgagtccgtgtggagaggcagaacagcagagtgggggtcagtttgcttttgaaagttggtcccaaccttgatcaggatggtctttatcatctccctggcttctttaaaatggggacaataacagtatctgtgccagttatttctctggtgagaaccatgagtactacttctgtgaatgaaacccagagataagtgcctgaccatcgtcagctcctgctaggagttacttagctgttattgtttctcatttagaatgtaagcaggatgttatgtttagttctagcaagatatggcaacaatagtttagaaaatgaaatacattttcagtgaattgaggcaaatattgtcctaaaaagcgctagaggtggccgggctctgcagctcatgcctgtaatcccagcactttgggaggttgaggctgcggatcatgaggtcaggagattgacaccatcctggctaacacggtgaaaccccatccctactaaaaatacaaaaaaattagccaggcgtggtggccggcgcctgtagtcccagctattcgggaggctgaggcaggagaattgcttgaacccgggaggcggaggttgcagtgagccgagatcacgccactgcacttcagcctgggtgacagagcgagactccatctcaaaaaaaaaaaaaagtgcaagaggagtaagtctttcaacccaaggggcgtgttggctgaagcaccttggagcagacttttgctgggtgaagccaccggcctgtcacttgggtagctgctggcagggtcagcctgactcgcacagaacatcaccgagtgttatgggcgctgggggagccccagcctcactctctccccatctcactggccactgaccacagattggtcacttccgaaatgctgccttaaacttggcatcaaaggatcctttttctgcacagagaatgagcggtgctttcaggtctggtttggtgagaggaggagagggtgtggtccactgtggtcagcgccctccgttctccacctcgctccagggagggatctctgctttgatgctcccagccgcgcagttaatgtgcctgcctagactttccgcaaatggccactttgagtttattgttctaaattagtgactcatttttcgtgagctacttattaacatgcacctattttccagcttcctgccacctaaccacaagcacctttagcgagtttgtgatgttcagcagtgtggaaaatattctgggagaatggttcgtctgtatagtggttttcgttgctgagtcacgtttggtgagcagcttgttcggctcagatgccctggcgtggagggcacgggccccggctgcggcactgaagcaaaggtgaagcgggaggagcaaagggagtctctcgccccgcacgtactgtgtgcctcgttctttatctgtgttcgtttattcactcctcatgtcagcctcgtctccactcgacaggggggatattccaccccaaaccctgcaggactgcctcccacacgggttctacgtccaggtggagggtagatgcgggtaggaattgtataatatttgttagaattctcgggagtgaaaaggtgttagtttagaaagtaggatgcctgcggggaaacagaagtggtgggtacagcatgaaaaagtgggccttttggtttgcccggctgtgcgggtggcccggcagcgagggagcgcggttatccacgagcagaccgcagagctagtctccagccattgccgatagctgcatcacctttcatcattaactgaagggaacctatccagaaaactattttacattagctgtggagatgctatttgtgtgttttgcagcgttcctatttgacgtctgttgtgtgtgactcctcccactggctctggtgaaactgcacacggtgcatgccaggtgatcctcctcgcacgctcccagcgctgtacagcacagctgtgcagtgacgcacccacatgtgccctcgccactgggcagtggacatcctctcaggagcagagatggtgctgttttcaaaggcaggcgaggacattttctcctgatttgctaaatcacttatgaacgcttcagctggcctgtgccacttggtaggtaggggtagctgagagctgtctctccgtgttgtcttacttagggaggaagcagcctggccatgccaggccctgcagaaccgtctaggagaggccctgagacactccctccaggaaacgctgttctccggcccttagagcacagagcagggccctgcggagcaggaagagcggcttgctttcactcctgccggcgccgtggccatcacctgctcagccagcgcctggccggcccccgcccacacacctggctctatgctcggtgccaggacctgtggcaacaggacagccccattcagcccccgggcagccccttttccacactgattcctgacactgctcctcgcgtcctgtggcctgcagcaaccccggtgcttctccggctgccacgcctcctgggtgcatggatggtttctccgacgggggaggggaaggggcgaggtgctgtgtttccactgccacattttccctgggaaaatccccgagtaacctgctgttccctttcccccgtggctcactcctgcccgcgtttgcctccccaccgggctctgcctgcctgctgagtctgcgtgtccagcgggctcagtttgcacgttttgtccctatcacccgactaagccacaggtgttagcaagcctggcctggcacgtgagagcagctggacacccccctgcagtctcctctgccctgtgtctgggcaggtgctggcaccaggcagaccccatggcgggactggacgcaggcagccagtgtgggttgccggttctgctgggccggggccaggcctctgcgttgctcactctcacgttcccagacgctcagggcctgctcgctgagctgtgaaccagacgtgtgtgtctgcttgaacacataggggctggggatgaactgaagactgttgggatattcgtgaaggaacaagttaggtagatcacccagcagatgctcaggaaagacatattgaatagaaggtgggggcaggctcgtctttattcctggcatctcttgaaaaattgttatgaaaagtttcaaagatatatgaaaggaaagagaccagtgcatagagcgagtgcccacagccacctcccgccaggaaatccctgaggctctccatcgtgaccacttcatctctccacacctttattttctggagaatttaaaaccgatctcagaggccacagcaccatcccttaaatacttgaatgtgtgtttctaacagatccaaccccattatcacactcagcagaaggaatcatgattcctacatatcatcttatacccaaacgatgtttaatttttactggttgtcttaaaaactgtctttttacagccagttgttcaaatccagaccaaaacatcgggactggtgggcatatctgaaatttcccctgcccactctccgcctcactgagtcctttgtcctgggattttctgtttcagggcttgactgatcatagccaatccagtgtcctttagcaggttctgccaaacccgtacttcctgtaagccggcagctacagctagttttgattcttagtggagagacaacaggaatacttcttaggttatccttgacattttaagactgcctgattaccctgaaggaaaaatattgcttagggaaagaatctttttccattttcattttctctaataaatgcacataaactatgttggacatgcctgaggaattcacagcacttactcattaaagtttaatttctattaatgggcagatgcaagcactgttatggaactttggtaattttcagtaacctgcgcagtggggaaaagcagaatctagtggcctgggatgctcgaggctataagcagagctcccagggagggccggttgggtgggcacaagtttatggagcatcaagcctatgcctagtatctgccaggcccaggggtagtgccagggtgtgggccgcacagtggagggaggatgggctgctggggtcactcagcaaagcaggaggctgagctgggaggaggccagcgcaggtgcaggtcctgcttgaggtggcagatggagacccctctgggggttcaggtcaggggaaggacctagggggaatttgagtatttggctgaccttgtagatcattttgtttccaagccatgacatttcagcccactgaacttccttttataatttaattgaacaagggcatcagagtgccagtaaaattctactacctctggtcacacaggttagaggcctgaggggatggcatgatggccccaaacccaaatagatacccacttcattccacattgactcacacgccgtgtggagggaaggtttgcatgtgagtgtgcaccgcaccacgccctccaggaggtgcaggtcttggtgggccacatgggccctcgcgcagcgctttctcacagacacctgccagtttggtgcaggccaagaggctgttttcctcatggccaatcctcccagcagaaggagttttccgtccctccttattcaggcaaaagacaagtccttttgccccagacacgagaaccaagtggtttcttttgtctttgctttaaggctaagctctttctttaaaccatgggaactctgccgttgcccatgaagttcggtttgaaggtatcggggcttctctggtctgacgtcagcccttgcttaggtgttcacgcagctcagtccctggagtcccagtgaggccctgggacaaaccccagttgaagcacattctataaaatacccaagcaggattgcttaaagctgtcaaggtggtcaaaaacaaggaaggtctgagatactgttgcagccaagagaggcaggaccctggatgggcgctaggacagaaaatgggcaccagggaaaaacggaggaaatctgaatcaagtccgggctttttctgtcatgacacctaagcacagcatcctgatggaaggtgttagttgtagggcatggagggtgcagagtacaggaatggaagatgttagttgtagggcatggagggtgcagagtataggataagtctctactagctttaatttttctataaactcacagctgttctaaaacaacacctttgtttgaaaaatatgaaaggatggggagattggctgcaatgaagactgtgtcgttactgtttcccagtagccctaagcttccgttcccgtgtctgaaaagcagctctgttagcacagtggggtgtgcacagtgaggtgtgacctatactactcttgagtcacagcggtttcattgtttttgtctatgtcagcaaccccccaccaaacacactttagaatgttaatttatccagccgggagcggtggctcacgcctgtaatcccagcactttgggaggccgaggcaggcggatcacaaggtcaggagatcgagaccatcctggctaacatggtgaaaccccgtctctactaaaaatacaaaatactagctgggcttggtggcgggtgcctgtagtctcacctattcgggaggctgaggcaggagaatggcgtgaacctgggaggcggagcttgcagtgagctgagatccagccactgcagtccagcctgggcaacagagcgagacaatgtctcaaaaaaaaaaaaaaaggaatgttaatttatccaattctcattttatgctcataacgaaatattgaagtgaggtgctaaggtgaaatgtgggactgaggtctccaagtcttcagaatcaagcgtggaaaagagtttaggtgtagcttgtgtggagctcttgctgccttcctgttcccaaaaaccccctgggcctgaccacgctggtttgtcacaggaatgcaaagttagtttgacatgagaaaaaaaagtttactacgttatcagatggaaggggaaattatttaataagctgaattgatgcagaaaagtttaatacagttaagcaaacatgtgatttaaaaatatgtcttggcaaactaggagtagatgggaacttccttaatctgatagttacctgttggacacctgcagcaagcaatacactttccagtaaaacattgaaatatccttcgtaagatcagaaacaagaccaaagtgtcttttatcaccatttctctttagttactgtactgtaggactgagccagcagaataaagaagaagaaaaggtgtgaggtctggaaggtggaaacaactgtcattatttgtacgtgacctgattctatatgtagaaaatacacgataactacagaaaaatgattgaaattaatattctacgatacagaaccaataagtaaaaattaattgtgtttccatatgcaagcaaacagaaattgataatggaaatcaaatatcaaatacctagtaataaatctaaagatgttcaagaccgcaacactgaaaattctgaaacatttctgagagaaatgaaaggaggtaatagcccatgttcatggattgaaagatgcagtactgtaaagattatcttctctcaaaatgacagatgcagtgcaatcccaggcactgttcgtttccctccctccctccctccctccctcccttcccctccttcctctctcgtcctctctctttctctccctctttctctctctctctttctttctcttttctttctttctctttctttctttctttctctttctccttctttctttctttctttttttctccttccttccttccttccttccttctctttctttctttttctcttttcttttcttttggtggaacttgtcaagttaattttaaaatttatgtggcggagtaaaaggccaattttgcccaagatgatctggaagaaaaaagtagggttttttgccttgccaatattaagagttattgtacagttatggtggttaagacagtgtgattattggcaaaaccaaaaacaagttggccaacaggattgagatttggcttataagggaactaatgttgcccatccatggtgaaagataagacctcttaataacactgaggggacatttggctgttatcataggaaaacataccccaaacccctgtctcatagcgtatacaaacatcagtgccagtagatgagagacttacatataaaagggaacactgcaaagtttcagggtaaaaatatgttaaaatatctctgcagcctccaggaagagaagagtttcttgaacctgacataaaagcagaagctttgaaagattgagaaataggacctttgagaggatatctgcagcatttaattgacagaggattaatgttcagaatttgtaaagaattcctctgaatcaataagaaaaagacaacccaactgggggcaaaaaacaggtcaaaaagacatgaatccaaaacagccagtgaaaaagccaataaacatgtaagaagatggtcagtgtcattggtcatctgggaaagacaaatgaaaccttcaagagacaccctttcaccccaacctgggcaggactaggtgttcccaggcaggtcccaagggtggaaaccacactttctccccactcccttcccctcccagttcaggagcctgtgcgtggggctttcatgtactttctttattggctcaagaaacctcctttcttgtgtgtcggtattgtgatgtgaaacccttggtggagggcactggtcttggtgggtacctgtttgctcaaggtccagcttcagacaagccgctggtttaattgagacagaactggattccggctggtgctcactccgtgatcctaggaaactgcacagcccttgaggccatttccccaagtgtgaagtggggggcctgggccctccgggtgaaagtgaggttcctttggctccagaaggccgggtttctggttagacatacctacccgtctgatgcaaggtggattctgaaaagcaaaagcactgtctgtcttagtcctgttcctcccatgggcggactccgagtctcaaacaatgctcagttcaggctgggtcctgtcggcgcgaaagggactcctggcaagagtgatgtggtcactgcagttgactgtgggtgcattgagcacactggggcacatcatgtgctggtgaggacacgaggtacccgtgctcctcggcctccctctcagtgtgcatctggtctgcagccccagcgctgattaaatgctgtttgaggacactcagtacgatcgtccctgtccagcagggtttccaaaaatagattctcaagcggagacagataagggggaacctgcttgcagcaggcgtgtgatgaggaagtggtactttgcttcccatcttcattattttcctgcttgtaaacgctgggttcttagcaccgctttctcctcagcctgagaaatttcagcccagaggcagataaatatggaaattccacctctcatcactaatttcattttaactcactctggaatatgatatctgaaaaaacacagcgttaagaatctattctgtgcacattcacggatgccgtcatgcgttccagctggctgtgtaccgcagcttgtctatttcaccctggtgacagacgttctttgccccactggccacgctttgtttaggtccgttccaaagctgtctttcccaggcctggtggcccctgcgcctgcaaagtgcactcaccgccactgctttacccccaggattgtgttccaccagccacctctggcaaaacgcctttagtgtttggcttctcgatcatggctgctgccctgagccccagcctttcataatgagggatgcggcatctgtcatgctgtccaggtggacgaccaaggacggctcaggccgggatcttgtcttaaagagactgtggccgtgcttccagctggctggggctcacggggcctccacatgtggggttagcgtccggcactgagacccatgtctgtgccgccgcctccaaggccgcctgtgcttgagacactcctgctgttttctgatagttccacatggctgccctgttccgcgagaggcaggcacttcctattaacccagtgccgcctcagaacagctttcccttcgagcatttccatgtcattctacaaagatgtgaacatggcagtgttgggggtttgaatgtacaggttgttatgagactagccaggcccagtggcacacaacgagaacaagcagcatctctgtgtggtggaagaataagccttatctggtctttgtcctcgttcctggcagggagctcttaggatcccaggagcttcctgagtgtccagcgagcctttcgttattcctaaggaggagcttcttatgtgcttctgagtttatgctaatgaagtgacttagggcaggacccctggatagcctcgggatggggccagtcaccaggacgcagagacgagaggagcagcatgttcagccgcacctgctgaccccagtggtactgacacagaggctcctgcactcaggacccctccagaccctgccttcatgttactgtttatttgcatcttttacaataaacccatcaacatggtaaagtgtttttctgagttttgtgagcccttctagcaaattacagaacctgagaggggcttgtgggaactcctgatttatagccgatctttagaagtccaggaggcccaggacttgtgtctgaaatgggggcagccttgtggacctgagcccctgtggcgtgtgtgctagctctgggcagttattgtcagagtggaactggatcattggacgcccagttggtgccagttggctggtgtcagaaaccaccccacccgccagtatacaggattggacatgttaaggtcaaggtctggtttacgcagggaatccacatgctgttatcgaacggcattctccttggtgtgccagctagtgcaagcatgcaataaatgtcttcttgaagggtaggtgggacgcggaccagcccagtgcccagaaatgtaggtgagccaagacccactaagctgcaccttgatctgaaacacacgagtgatgcttgtggatacaggaacaccacgtatcgtgacttacaagtcaaatcggttgcactgagatctgatgtgtcttcctgcttcagtgtagtaaaagtaacttgtaattaggcctcatgtatgaactcggtgctggagggatccgccttttgggctcaggcataagcagttcacttccaaactcaagaaagggcttcatgtgagctgggactctggccccaccgctgctgctcaccactgggggcttcttggtttccaaactttctggttctagggcttttgctgaggtggaagctaaggttgggcgttgagctgactacaggggaggcagttctgggggacaggcattggctcgtaggaactgttgcagaaccctgaccagggtggtccccccaagccccctcctcttgaccccttcccattggaaaactgcagctacattgagatcttcaaaagggccttctgctgtttctgaaagtatttatagtgggatttgggttaaatacacacacacatataaacatacatacatacaggcaccttttcgaattttttattttttgtctacaatgagcatttatttatttttatttattataaaaatgaatacaaatatatttatttttaggggaaaaaaaggcttgaaaagtactttccaccactatctggggtctctttctgagttgcagtgaaggttctcttgagacatggcatcatgtttacaattcagcatccaggccatctcctaaggtggccatgttctttgagaaagccctggaatgtgtgaagacttggggcgattgctcaggtctggtggttgcttctaaggtgtaactatgacctgccggtctttctcctgacccagggaagcagaactgttttgcctccgaatatgcccagtgtcttactgtctttacttctgttttcaaaccttaagagttgccgagacttgggaggagctgctggttggttggagaggtccccgtggttttttgttgttgtcttcattttgatttttatttctggcacccacgtttgatctctgcattgcccaagagcagcctcacctgctgagctcctgcaggtccatgttggcctcacactttcccagttctaacttcaagagcatgccctccaatctcctgggacccttgtttccgttcttgaatattgaacatctccaaggacatgcacgggttggcaatgctaggaattatctattttggataaaaaaatgggtttttttttttttgcagtcatttgacctgatgttagtcgtttttgtcctgttttaaaacttgtatctacagagttccatggctgccctgcgaaactggtgctctccttcgcttagtaaggaaaatgacctccgcgtgcaagtctgtaatgatatgcatattattgcagggcattttacaccacttgtcagaagctaattttaaaagaaaagtgtgattcctggaaatcttgccagagttttctttcctttctgcttgggagaatatagaaaaatcccaggcggtctaaatccagcctgtgccaggtttaggtggtgggtgggttccagtctcatctttgcagtgagtctgaatagatggaaaccgctccataatacagtctaaaaatggatttaaaagaaaggactctataccttgagaacacctggtgaagcgttctcctccatgcctatttgcagctagagtggcctcagcttgcctccttccctgtctgcacacctggcgggttccgagggctccctgtgctgtgtttctgtgagcgtccagaccgtttgtcactatctgagaagaggaagagctgctcttctctttttgttatcttaatgcttgtggtctgcagaagagccgacttctgatcagcacgagtgggtataatgtggttgctgaacagaagtaaacccaaattgctaagccagtggctcttaggccagaaacgggcgtttgccatatctcagtaggaggctattttgattattctacattggcaaatacaaataatctatgatgaagctgaaagtgtccccctgtaaaagtaggaaggacacatgcatttcattgtttggggagttactccctgcagactcccagcataaagtatgttggctgaaatgcgcgcagtttctgaagccagtgccttctctgttctccagatggactttctggccgagaccagccagtggagctgctgaatcctgcccgcgtgaaccacatgcccagcacgggtaagtccgcccacccctgccctgtccggccggccctgcgctgagccaaagaggtgttcagacgctctgccttattggaggagtgcagagagggcgaggggggaggtgtggggtatcaggttcactgaatttgggtgctcttcctggtggtaaaagaggccatcctttttggaaatgaaatggctccgtgccatgtaaatggtagagaaatgctgattttttgttgttttttttctctctggtgctaaaggatgtgttcttcccaaaggcaccaactgcctggcttaggtgtaacccctggccctgatccccgtgagggcctgtaggaaagacctctgagcttgcagtgggcggggctgggtcccactggccacgtgaccgtggacagaccgcgccttttccattgccaccagcttttgttggttaaatgagtcagtggcatcatctgtcttccaagtacctttcagctctttaacaaaaaaaagtatcggtggtgatcagaaatatttcattccataggtaatttttagttatttatgcatttgtctatttggagacggaatctcactctgtcgcccaggctggagtggagtggcgtaatcttggctcactgcaacctccacctcccgggttcaagcgattctcctgcctcagtctccccaagtagctgggattacaggtgtgtgccaccacacctggctaattttgcatttttagtagagacggggttttaccatgttggccaggctggtcttgaactcctgagctcaagtaatctgcctgcctcggcctcccaaagtgctggaattacaggcgtgagccaccgcgcccagccccataggtaacattttaaggtactccaagtctataggccatggaaacagactttttcccccttttctttgtctgtaaaacccgtttccacatagaatcctccagggtttaaactccttgtgagggtaccattcttcccagccatgcagcctctccgagaataaaacctgaacctcctgatggcgtggggctgagggaaccagtgttccgttccacatgcgtcctgcagggcagtgtggctgggccttgcagggactgcgtcccgaggcctgggtctctggttttggctctgctgcaccttccttgacagtcagcctttgctgccgcctgtgccctccggtgccccagttagacccactcatcaccccgaaaggaagttgaagccagcttgaagccaggctgaacgtttccaagaagagatttccttctttgccttgtgattcttccaagtcggccaggttttctgtcattttccaaacccggagttctggaggtgtctttgccctgctccgggaaggctctctgtgtctgtggggtacggtcccctggcctcttggggggtgttcggggggctcctttctgtctgttttttacaccttgattttactctgcattattactgatcaagcagtttattttttaccccagcacactggagcctgggggagcggtggggagctttaagtaccagatgaagatgcacaattttaaaattttggcttatgtcgacagttttggttttcactttctctcaagttcactttgccggtgttgttttcgtgtaaacactgaattctgtggctggggcatttttgagacaacttgcttgtgcttaaccaggcgtggcacgagggtaagaggattttctgatagcttgatgggctgggaaaagatggtaaatatgcatagtttccaagtgaaccaaaaaaggtgggcttcaaattaatattctggcttgggaagcgcaccctgcctgtcgagacctgccatgggatccctgcctggtgtgaggacaggccggggcttcagcctcccacagagggcacctggggcccgcctctgctgcctgtttgcgtgggagcttaggcgagttgctgaatagctcagttttgttttctcatttcttagccggggatgataatgcctctctacagagttctcataaagatgaaagatatgtgtcagctttttagtagttcctcaataaatgtcatctcagtgtcccgttgactagtactgaggaatgtgtgtgatgtagcctttatatccccgttcaaggcctggacctctcctgcagcctgtcaccctcattctcttcctttggggtgagccgccggacttgagaagtggcatgttgggaaggctgccccatgacgctggccatttacctcccttgtcatcaggttcccattggtctgagtcagagagagtgccgtgtctcctggcatttattgcatattcaggcatgggttggtgggcgtggtgggagtgtttgcagggtaattttaaataacgtagcagcgatgcccaggaacagtgggcagagaaagcatgcatgcatgtgcagcagtcctgtatgacatccatcattgagcctgcacagtggcctgtgccttagaagcctctaatgtgaagcgtgttctttcaaactgcattttggtcatttcaacccactgaaaaatactgcaaagaaatattaatctcaggttaggtgataactggaaaattgataggaaaatgtctttaaagccacatttttatggtatgggagtataaacatttttaggtatatgttatgtcagtcctcaattgctgttatacatttcctaatgattgaatttaatcttaactattctttagacattttgatgtttgaaggtgtggaaacagactgatacacacacacactcaattgtcaggaatgactccagcagtcactgtgagagctcgctccctttgaacagatgagtgtgtacttggagcaggaagggcgcccgggcagccctccccactgttgatctgtcctgtttcctgaccattccctcgtgtgaatgccgttatgttcaacacaggtctttttctgattatggttctttttcaatacacttagtcctaataaattcccacttccaacagaaaagcattattcataccatgtattcgtgtgccatcttgagattttagaaacgtcaggtgagcatatcatgtgctttgggaaagtctatacaggttgagtatctcttatctgtaatgcttggaagcagaagtgttttggattttgggtttgtttttttttttttcggattttggaatatttgcattattcttactggttgagcatcctaagtgtaaaaattcaaaatcagaaatgccccaatgagcattgcctttgagtgtcaccgtgaaaaagttttggatttggaggcattttggattttggtttttgggtttgggatattgtcagctgtactggaggaggaaaaagccaaaatgccatttgtcttagatcaactttgatttcttcaacttccctcataactttttatctgtagactttgttctctttcttttttaaaatgttttaaaaattttaattgtaaagtagctctatcataaaagaaaacacataaccatttgcctaccactaagatataacagacatgttgttagtattattccatctttgcctcctatttctttgcgttttgaataagtggaatgtcacagttgtggacgtggctttgctcttcccccttcctgggagttgttgtctgcttgctgaggggaagggccacccttggcttggtgagggaagggccacccttggcttgctgaggggaagggccacccttggcttggtgagggaagggccacccttggcttggtgaggggaagggccgcccttggcttggagagggaagggccaccttggcttggtgagggaagggccacccttggcttggtgaggggaagggccacccttggcttggtgagggaagggccacccttggcttggtgaggggaagggccacccttggcttggtgaggggaagggccacccttggcttggtgaggggaagggccacccttggcttggtgaggggaagggccacccttggcttggtgagggaagggccacccttggcttggtgaggggaagggccacccttggaggagacttgacaccgaggcagatcccaggcggagacatggtggcagggtggggtgggggcgggagctcgtgacccccggttctctgccagagccttgtgttttcccatggagtgagcaaacagagccattgactgagttaggctggggagatgttgcagtttgaggacagaggagaaggtatggaattagtcagccaggagagaccagcaaaatgtcatacaggattataaacccaactatgcccaagggctgaattacggggaacttaaaaactattactactcagtcatttgtttcagattcattgtagctaaaactcctccccttcctgattataaaagcaatgtatgtttattgtagaaaaaaatcactaaagtggtgggtgttgggttccaaggctggaggtcgagctggcttccagccaggccttgcaggcgctcagcagcctcgattgaggagaggggcgcttcggggaggacgcctacctcaggcatccgggagcaggtgctcagcagcctcgattgaggagaggggcgcttcggggaggacacctacctcaggcatccgggagcaggtgctcagcaacctcggttgaggacaggggcgcttcggggaggacgcctacctcaggcatccgggagcaggtgctcagcagcctcggttgaggagaggggcgcttcggggaggacgcctacctcaggcatccgggagcaaaccggaggcaaacaaaaaaagtcagtagcaacaggaagtgtggatgaaggacttactgttaaacagacggcatgctgagggcttacggccctcatggcgctgctctccaccgtgaccgagtgccctggctcctgtgccccccacccgctcctacagaaggaaagccagagcctcagatcccatggccgctgtcccagggtcgctcagcatatacattacagggcaggacacatgactgccctgagggctgtgctactggggagaaagacatcctcagaaaatgcgatgcccttccatcggccaaaaggggaagtagaggccgatgttaagaccgggatgctggactaaagagaagcacgttccacggtttcctgaggcataggggtggcggtttcatcaccctctgtacctgtgtcctgggaaacgtgtatctgtcagagttagggaggctctttttaaggttatgtttcaaaagcaccatttttaaaagaaaactctggaaccttaaaggggattaactagaaactgtagagaaactctccaaaataacgcaaaattcacgtttggcttcagcgttggattcccacatctaaggggtgtttgaccagcacactgtcaaaggagctgtatttccagacactgctcttacattttggaacaggaagtatttgaggttggctggtgcctggagctcatgctgcctcctagatgtgttttgtggcggttgttgcattgtttcgtttggtgagaagaaagtggaatctggtacaaatctgcaaggacgtgtgacctcaggggaagcttcgaaagtctccctttattggcaccggaagctgttaattaccttcatacacagagcccgtggtaacaaagtccttggttgtaatattcctgcgtggtgcccctttgtgagttttcatcataaagctggcatttctggggtttggatagggtccagtgaaggacccacggccatctctggtggttcctcgagtggcccccacggaaggactgggcaggagtggcaggaagaagagaggccgtggcggcctcgtcctggcggcgcctgccgtgactgcttgggttattttcctccgatcagggaagtgtctttgaggaatcaatgccctccagcccacggactcggcagcttgccagccacaggcaaggattggccaggacggtcatgtccgccacggaacatgtcgcctgctttgctttttttttttttttttttttgcttgcttgctttgttttaatttttagaggtaaaatgaagtgtagaatgtaaagacatcaaagtaaaactgtttgtgtaaaccaaaaataaaattctaagtcccccaacccaatgaatggacccccttcttgaccaaggggtcccaaagaaacttgaaaaatgagttcaggccctgatgggaatggggggttggacaggcctccttagacgccccctccttttggcgttcaggcccagctgaccagcgttaacatcaaaacagcgatctcacgactgataaaacagacacagcagtaagattcccggttccaccctgactctgggatagcagcaggcgacagagagcaggccctgcaggaaataaaagtattttaccccagaatatattccttccacctattttgagtggctatagaaaactgcctcttgggggggaaatttgcattctggagagaatcccatgccctttccaggtctctttttcctgatccaggagagatttaactacaagtcaccttttaaagtcccataggagacatttaccatctattctctctgaagcctgcttcctggaggcctcatccacataacgagaatctccgcttatcttaactcaaacatttttttatgctgacatcaactcttcagtcagaaaacctttcagtctgcctaggatctgtgaggtcctcaccctacttcttcaagatgttctgggccaaaccaatatataccttacatgtgttgcctgtaatttctgtctccctaaaacgcataaagccaacctgtaacgtgacaacctcaggcacagacttcctgaggctgtgtcctgggccatggtcactcgtatttggcttaaaataaacctcttcaactattttacagagtttggcctttttcgtcaacatttgaaaaatctgaaaagaattcccatggtttgattctcttagttcaaactaatgttgagagtttgttgactgccctccatcaagttaacctgagggccggtatgaatagccatgactcaaaggccagacgcaggagtctgccccccacatggctttagaagctgactgcaatatagcgttactcctggaggccatgtgtgtgtcgtgtacaattatgagcaatttagaaatgctttaagagtcacttttggcaattaggcgaattggccccattactttattcattttatttttatttttatttattttttgagacatagagtctcactgtgttgactggagtgcagggctggagtgcagtggcaggatctcggctcactgccacctctgcctcccaggttcaagcgattctcctgcctcagcctcctgaatagctgggattacaggcgcccgccaccacgcccggctagtttttgtatttttagtagagacgaggtttcaccacattggccaggctggtctcgaactcctgacctcaagtgatctgcctacctcagcctcccaaagtgctgggattacaggtgtgaacgactgtgcccagcccttgttactttatagtagagaatagttttggaccagaagctgcgccctcctgcttggtcactaccttgttcactagatgtggtgtcgagtaatcctcaagttccaattccccttcgatggctgaaggcatattacctcttaagaatttcaaaaggtgttatttttcaaggtctgttcatacccatgcccccttctccagtccttcccaatatctcatccctatccgcccctaaaccttcagatcgttctgtttttctctgatgctgtttgctttttgccacctggagacaagtcacttctgatttctgctctccttcccctcagatctgtgaactcccatgagcagtaacatcaggtttctctggaaacactgcggggccaagaacaccacctttcacgtggcgtacacagcctgtatttgcaccccattcactttcctcctaactctcagtgacagctccctcctgccatcccgttccggctcagtattgacagaggccagtgaaggatcaggtcctgggctcagctgagttgctccaaggcctgggagcctggcagacatgggggcagcacagtcttcctgtctcccttcggccacatggcctccagcaggctgctcctcacctggtgtcccggggctgcttggtcctgggccagggcgcaggcagcaagggcaagtgtctggcgtagcgtctggcacacaggaggggtctgtgttctcttgcactcttgcttcctggtgccctctggtgtgcctggccccaggttcgtggctctgcccttcctgcagctcaaccaccgtcccttccaccttcccatccctttgtggcaatgtccctaggagcaactgtctcaagtgaaacccagcccagctgatgctgggaagcataacaacaggagggcttgaattgcgttgaaaatgtgtcttgagaagatgcctggtggatggaagcagctgggagacctggcagagggcccgggccaccctgcagtggcagctgctggacctgcagtccgctggacctgatctgcagggcgatgactctcgtgaagctgctgagtcagtcacatttgccttcagagggcccttctggcttttaatggtgttagccctctgaggcttgcttgctcatttcaccgggcagagactatgttcctccgcacccgaggcatgccctcctgtcctggaactccagggctgcctcccgctccttccgcttgtctttggagggcctgtcttcccttctctctgtctgcatttccccaaggtgcttgtctgtctgtccaggctctgccttctgtgatgacagtcttcctggcctttctggtgagcacggtatctgccatctgtagcagagggcactgaggctggcgggacctgcaggggcatgcagggtgctggccgctgggggctgcccggtcccacttggcatggtgtccagcaggctgcttagcccctgtgacctcactgggagggcccaatgctgcctgccctgcccccatgctggggcaggaagaccaggacacctcacgtgtagctggccagcttccactggtccgcagttttcagtgctgttccatctccctctccagagggtagtagtccctgggctctgccagccacgtggggtaagcggtggttggggccctgcattccctgagcagatatttcattctccttcacctccagtcctggtcccaccagcccctgtgccccggagggctgtgtgaccgagactggtctgcccctcccttggcccaccctggctgatgggtcagctttgctgtctctgataccttattcacccagatcctttctgacttccagcattttgtggctgctctctcatctcctgtgtgtgtgttgtgttggtgtgtctttctaaacaatccacacactgtttcagcagaatcttggagggatcctgacaacgtgattgtgttcactctgttatttttgaccagaaatgccctgtggctctgaaatgccaccctgtggctggcaggtgggaccgtgcctccccacgcggcccaggacactgctgcctgccagccccacccgtgagcctgccggcctcactttccaactggttctttccctgtccgcagtgcctgaggcagaaagatagaaagtttctccatcctgggtggacattagattgtttgggttatctacatttatcaccccccccattacatgttacattgttgttgttgctgtcgacccaaagatttctgaagagcttactgtctgcccttagcaaggaacatgggtggtaagaaagcagacggttattggttggggcgtcgtggagaattgggggtgctgtctgagaaatatcctctgggtgcttctaaaaccgtccacacatccacagcaaatctggatggggtggagctggtgactggttgtttctctactttagagggagagagaaagctatgtggcagtcccagcagtgcccctcaaccgtgttgatacagaatacagagaaatctcactgagtatctctcggggaggattccacagttctaagtgatgattggttggaagaaaggattttttttttccactgagaatttggtttggtttgtgtattcggagtgtcactggtggccaaaagtattatccaggaatgaatttttgcatcatgacatcatttctggttaaagggctttttatcttttttcttttattaccagcttcgtgtgctttaaggctgtggactgtaaaatgtatccagagggcctgcggagcccctcagtggcatctggaagcctgtgccgccaggacgagggagatggctctttgccgacccttgtctgtgttagggtgtcgcggtgcagctgaaagggagttccttctcagcagccacatttgaccctaatgtcatgttttcgccgtaccaacaccatgtcccctaccagaggaacctgcccatcttttaaggaaggtttccatttctggacctcacagcaagatgcacacactgtcacacgtgatgcagaaccaaactcaggccctctgtgtttccaatgaggggctccgaggggccatcagagccaggtgtctgaccaggtgagggaggactggaggtgtcccttgggtagcaggtacgtggccacgggcgaggggaagaaattgaaggcggtttagtcaggcgcctgaggaaggggctggcacttctttcagttctacagcacccagccctgcgtgggccttcctgggcgggcctgccctcccctgccgacctgccttccccgccttcctggcttccctctcctgctcttgagcccagccaggctccacccctccatccaggtgtttctcatccccccctggggtgggggcaccctgcaggtggtgggagtccagctatgctttactctcccgcagaccgacttctgccttcgtggatctgctcttgtgggtgtgttctctgttttattaattcctgttttaatagctgttctcctttctctgcatttattcggatatgcttgttcttttaggttgaacatttcacttgttaatttttagcccttcttcctttcggatggaggcattcagggttctgtgctgtgcttcccttggggttcaaatggggctgctttggataagttctaatttgtattatttaatttgtaaagcatattacattaacacttcataaagtcttggtgtttctcaagagagttattttgaaatttgctttttggttccttttttatttgaaaaaatgaaatatttagaagtgttttttgtttcccgaaagtctgaattttccaagtcatcttttttgttattcatttctaatttactccattatggttagaaattacccagctgttgaattttactgagacttgctttgtggtcaatttttatgaatctttaatatatgtgtgagaagattttgaattctctagtaattgggtgctggattctaaatatgctcattaattccagcttattgattgtaaattacctacaatattagaacatgtgagaggcgagaatcgctgtggaggagagtgagcagtcaaggactggggattcaggagggtggatttctgcgttcaactcattcattcattcactcattcatattgattgggccttctaatgccatcccctgcccttggcatatggaatacatgtatttatgattgacacagagacccctatttcatggtactcatgttaccctgggaggaagagaggaaactagtaaaggcaatgagtaaacagtagagcagggaaggcagagcagggctcgggagtggaggggctgcgattttacacccgctggtgagggcaggcctccttagaaggtgagcagacatttgcaggccgaagacctggtcaggagaagagggagtgggcggtgcgggagacataaaaggccgggttaatcaattaggcatggctttgagtgacatggaggctcctggaggttctgagcagagaagcgacaccacgtgacgtatgccacagagaatgcagtggccacgtgggacaggcatcggaggagcagggagacccaccagggtctgggagcaacccaggcagtggatggggctcagtccgggtaggtggagtgggaatgtagaaaatggtacaaattctagagatatctgacgtagatgggatttccttagcctgcagatgggctgtgcaggaaacagaagagtcgagggtgacctcaggatttttggctttaagcactgctgatggagttgcatgaattcatggggaatgtgggtggagcagaccctgcgctgggatgaggattagtatggatctgtgcagtgctttcaaaggcacccagtttggaacactgagtggtaggcgttggcgagcctgcgctgaacgtgggaggggcctgcgctgggcattcatagcagaaagatacatggacatgaactctcccgggcagtggatctcctccgtgcaaggtccacaaagtagactttgtttcttttcccttttttttttttttaaacaatgtttgcttagtgctggcatgcatcttctaccaaatcctactttgtaaagtgttcctgctggcaagagagttactggctccgggatctttgctgggcagagagtgtgagcgcacagcctccacagccagcagcaaggtcctgctcaaagtgggactcgtggttgctcctcattacagcaatgatgaggacactgatggccacaggtccccttaccaaggccacccatctgtcactcagctgcgtaccgtgtgttcattggcatttaatgcccctggggacatcacacagtagttactggttcaggaactgaggctgggaggcgtaagtcactttttatcaagctgcccaggtgatttttctggacagaagtctgaaccagccccctgccttctgcatttccacctgcctgctggattattccacccccagtgacccgcagcgcccttgaaagatgctgcagcccacgccggtctccagaaagccccggcggaatgtacgttgctgcctggaagaggccggctcgccccagagagaggggctacctccttcaggcctcgtccttggtgccctctcttcttctccaatgttttctatttttaaatatttcaactgttactgttaagtaatagtggttcctactttggcccagctgttaggtgaaacacataaccaaacgtttggaggttgctaagaaggaaattctgaaatgcgttcttatgtaaacttgatcttacgtaactgagaaggcaagagcaactgcagtgggatttgtaggcttcctagaccactgaaactatttttaattttcagacaatatatttttatccattgggtttagggtatttggatagctttcaggagtaacgtgtaacttgtgctggtgtgagcaggctggagagatgggctgcagtggtttcagggaggtggtggtgttccaggaggtgtggccagttttgaatccaggtgacaatgcttactggctgcatctcccgtctgtgatacccaggtccccgctgggacctgcttcagggggctgtgaggacgaaaggagatcacaaagcaaaaatactttaaattcgtgctcagtcctgaaacattagttttttgttattgtttctattcgattgcttttgcattggaattgtagagtcttagaaagattttccaggaatgctttgtccataacgtgattgtagcagcatctcagacggatggttctgtctgttatttctgggggtcatgcttgtctttcatggctgcgcttctgtatgagaacttaaagcacatttcaccatttttttttttttttttttttggtatggggtaaggcctggttctatttatagtttccaggaagtacatttgtgcacttcttgaaagccaacttaccaactgcatgccaggtttttattttcagctcttgctcaatttgagcttgcaaatatttccaaaagatgtttttttcttcctggggatatagaacaaattagaaacattaaaaggattttctaaagagctttaaggatagttctgaaatagggagcagggaaaaaatctaacacttgcgttttcattaaattgtggaacagaagcacacagatggtcttgctccctccagatacagccctggctggtacggccagcacccagggactctgcacacggaattccacaagaataacatcacgggctgccgtaaaagccagggaagcgaagggaggcgtttctgatctgtttctggccttgcgctggcacagggtgtcatcccttgggtgggaagggtctttggagccccttatggcagcaagtttacagccgcatttggatttaatgctggcaaggaaggactttattttctgttcgaatcaaatttggaatacgtttttgagtaaagcttgctgcgttgttgatacagcttattactcagaagaaaaaaagccttttaagtgacctgttaaggaaagttttatttcctcaaagttcgtgatagcttcaatagtttcggcttgtcatttaataggaccttttgaaagaaatattcaccagaaaagaatcacttcaagttgtgtgtgcattataaaaatggctctcgtccacgatgactggctgaaaaatgagatttttgagtttgtcatacatttaggggacccttaagaatgtggacagatgtggaagtagctgttcttcagttgaaggctgtgtgtgtgtgtgtgtgtgtgtgtgtgtcccactctcagcgcactttgaggcgcaactcgaggtgacacagttgagtccaggccttgcggtgagtgctgaggacacagagatgggcatgggccgtccttcccagctggccactcttaacccctggggaggggcacagggtctccgaagctcctgccacactcctgtcttttttgttttgctttgcaattcagtagtccctgtggggtaaccagatgctcttagctttgttggttggagctgtgatttttttttccagagggtttcccagaatgctcccatctcctcccctgatgtggtgtcaggtggcaccatggtgtcccccgctcctgtgcacagaccttggctttcctcagcggtttatgtcagagaacgggccgatgtccgctccatccccttcgcttctcttttattcttctaaatggtattcgcaagaacactgataccatctgacagggttctccttcatgtagaggaatcatttaaggcgcctgtaaacggggaaggtaaagagagacagggcggtgaggcctctgtgcttcactcagcgggtcacacgccaccgcccgcagaatgagctgagtccaagggctggtgggagggaggtcttcgtggtgagggagtacctcgccttggtcatgatgacaacacggtaccaaggtcggtccctggctttttttggctacagaaggtggaaccagtgggggaaacctggcggaagggtacctgcaacctctctggactttcttggcaacttcctgtgaatctataattatcttttaaattcacaatattagtgtgagaaacctttaataaaatatatggctcgtttcccatctgttatccatttaaagttgagatgtgtcattccatgggattagaaataaagaaaaaaagatggatgttcgtagatgaagctgaatgactaaggttgatcattgtggtagccggatacgtgggtgtttattatattcctctcgctaactctgtgtgtcgttgaagattttcatgatgaaaggccgctgaccagttcctaagagtcttctggcaccatcttctccgaggtcactgtcttcccctacgaagcacaaactgtccccaccataggctttatcgcttctgcctagatccgcaatctgtcggatttctttcatctttattatcttcttcctctttttcagtgcacaatgtatgctttaattttctagttatttttctaactttttgagtctaatgtttttatttgtttgggttccttttgtagttacttacatgtaggcagctattcattgttctctgagctcaattttaggcaattcctacaattttcgatatgtgatgtgttcattactttataaatttttaccactttcactagaatttgaagcgtttaagagaaagagactcatttttcccatggttggatttttgtttctcctggttttatttctggttctgttgcagtgtgttccagtgtttagtctacactgtgtgtatttggaaactgtgttctttatgtggcattggtttttgtaaatgtttcatggaggcttgcagcaaaaggcatacatggcttaatgataagaggttcgaggcctatctgttggctgaagtaagaattgtactattcccatcctctgtatgcacacctcctgtgtgtttgctctgccgtgagtgtacaagagcaagttcatatctagtgctgaccatgtgtgtcttcattctgtgtgttctgtgtttttactcgaaggtacccacagtgtgtgcctcagacagttccgtcatctttgtagattgcatgctttatacttaggaaatggtcaaatatgtttgatatttagtgttggattcaatctttgtgataccgatatctcgattgcacatttcaatttgtttctatttgccttttggggctttttacccgtctaatctgagccttacactggatttgtttttattttatttattttattttattttattttattattattatactttaagttttagggtacatgtgcacaatgtgcaggttagttacatatgtatacatgtgccatgctggtgtgctgcacccattaactcgtcatttacattaggtatatctcttaatgctatccctccctcctccccccaccccacaacagtccccggtgtgtgatgttccccttcctgtgtccacgtgttctcaatgttcaattcctacctatgagtgagaacatgctgtgtttggttttttgtccttgtgatagtttactgagaatgatgatttccaatttcatccatgtccctacaaaggacatgaagtcatcattttttatggctgcatagtattccatggtgtatatgtgccacattttcttaatccagtctatcattgttggacttttgggttggttccaagtctttgctattgtgaatagtgccgcaataaacatacgtgtgcatgtgtctttatagcagcatgatttatagtcctttgggtatatacccagtaatgggatggctgggtcaaatggtatttctagttctagatccctgaggaatcgccacactgatttccacaatggttgaactagtttacagtcccaccaacagtgtaaaagtgttcctatttctccacatcctctccagcacctgttgtttcctgactttttaatgatcgccattctaactggggtgagatggtatctcattgtggttttgatttgcatttctctgatggccggtgatggtgagcattttttcatgtgttttttggctgcataaatgtcttcttttgagaagtgtctgttcatgtccttcgcccactttttgatggggttgtttgtttttttcttgtaaatttgtttgagttcattgtagattctggatattagccctttgtcagatgagtaggttgcgaaaattttctcccattttgtaggttgcctgttcactctgatggtagtttcttttgctgtgcagaagctctttagtttaattagatcccatatgtcaattttggcttttgttgccattgcttttggtgttttagacatgaagtccttgcccatgcctatgtcctgaatggtattgcctaggttttcttctagggtttttatggttttaggtctaatgtttaagtctttaatccatcttgaattaatttttatataagatgtaaggaagggatccagtttcagctttctacatatggctagccagttttcccagcaccatttattaaatagggaatcctttccccattgcttgtttttctcaggtttgtcaaagatcagatagttgtagatatgcggtgttatttctgagggctctgttctgttccattgatctatatctctgttttggtaccagtatggatttgtttttaatataatgattgttcagtcctgttttttatccaatctggtaattttcatgtgactgtgttatttatgaatgttgataaaatggacatatttctcctaaaattttcatccagttttatattctgtttatctgtttttgttttttgagatggggcctcactctgtcgcccaggctggagtacagtggcatgatcatggctcactgcagcctctacctcccaggctcaagcagtgctcctgcctcagccttccaagtagctggaaccacaggcacgtgtcaccactgctggctgactttttaattttttggaaagatggggtcttatgatgttggccaggttggtctcaaacttctggcctcaaacgatccccctcccgccttagcctcccaaagcaccgtgattacaggcgtgagctgttgtgcccgaccctgttttctgttgtgaatgcttcttgttttgtttcctatttgacttcttggatatgggctttcttaccttttatttggtctggtgtgtgtggtttcttttccttctggtgatttggaaggccgtgctctctttttagttcttattgtgtgaactcttatgagctcatacgctttccctaaactgtgctttcctgttccagcaccttcagacgatgtgagagagtagcccgtcggcacagacactttctgccgtctcttttctccaaccttctgattttgttacttgcagtgttattttgagttttggtgattctctttataacatataaataatatatttagactgacatttatcaagttattagccttaaaatggttactgattctatcactgagaaaaatgagaaaacagatacattaagtttcttcccccaaatttcagtttcattaccatttccatttaaaatgcgaggaattttaggttaaccactaggttttggaaagttgggtttgaagatctggtcgcttgattatccaccatgaaggggagtcgacgggcctcttgcttttggagagcttccgggagcgatgctgccggctcctggagaccctgctaccgcctgtgctgtgttcaggctctgccaccagcgggtcccctttggagccctgcggaggtgtgtcctcctgagcccacccttaggcccagtgcccgcagcctgccatggcccagggtgtgagaatgtctgccaaggaggctccctttctataggagagctgtaagggggctcggggtttggggttacactgggggaagggaaagtggcgtgaatgcagtcacctgtcttttgctacttacttctcttctgacaaaccagggactgtgtcatttagaaattgttgagaatagttcgaggtagcttagtcagagcttccttcctgtgcacattctgacttgcctagaaagatgccgagtatggcgggtggaacccctgtgcacccccttctcaccagactcccatcccggcacagggaaggggcaggacacacacccttcccggtcagtcctgttcccaggggcccaagtagcccacaggaggaaggagtgcagcagggcagagtgaaggcggagggtctggcaggtggagcttcacccagagaaggaggctgtgttcctggaaggacattcagttcaagagcaaaggctcagatgttcataccataaatattcagcatcacataaaattaaaaactcagttaaacaaagccttctcttcttcagaaggttttggttgttagtggtctgcagcgcagcaggtgtggacagtgagcacctgtgtccccaggtgtcctgagagggcaagatcagggctggtagggcgccctcctcatcgtcttcctcctcatcgccagttgtctttaaggtcagaacatgagaacatcagctcttagtgccaaggttttttggagactttttcttttatttttttttttctctgggaagatgtgtgagaacatttcatttttgttcttgaatggaatcttccgcataaatactacatatacatgtacatatgtgagtatgtgtgaatatctatgtgtgtgtgtgtatatataaacacgtgcgtttttatattcattgatgtggaaagtgctcacagtgattactaggggaaaagcatgcataatatggccctaattaaaatgtaaaagctatatacaatgtaagcacatgtacatatatatgctgaagagtatatatgtttgattttttaaacaaattagggtttaatgtgttaaaagtacctattattttaaaataaatttgggtgcattctatgaatatatcataacttttatgagtccagccaatggcataaatatttacttggggactttaacacacattatcaaattgccttccagagaggttgcaccgttcattatttattcagggtgattttttatgaaccaagattcgcagacccccagtgcctgcgcggaactgatgaccgcgtcctccagggagcccggtgcagaggcgctggtgcagacagctttgccagtccacactttcttgttttgaagtttttgtgtcttgtttctgttttggttagtggggaaggggtgtctgctgtctggagattagagagaggtgtggcatttcctgcggggatgtctcctagtgttgccgccattcatgttgttgaccagagaagagagatggagtccaggtgggcagaactcgatctccctgcgccttgagccagccccgtcctgagcccttgcccactccagatgtgaggaggttggcgacggtctttggtgccctccctgttgatttcaggtgagatgagggagggcactttggcctgcagggagcccaggtttctggggcgtcgaccctgcttctctgggctcccagcagccagcccctggtttcgtgtcaccagtgactccctgttgccagcttccatgcccggcctcagcccatggcctctcaccagtgttgacttggtggaagcacctccttaccacaccacatgctcctggtaccttcccccgccccggccaccagtcctcaggtgccttggtgggtttttcttatctctccagcatcatcacatccaagcgccccagggcttgtctccggcccactccttgtttccactgagtcattcccttggtgatatcctggcctcatccagtcaaatcatagatcacaacaccatcttgattctgccgctcgaatgtctgctcccgcctggatctcacctgccttccagatcctagagcctgcttgccgtcgatccccagctgggcgttctcagactcagcaagtttgaaagcaggctcctgatcttcccctgcaaacttgcttctcccgcggcctctcctactcagggcaacctccgggctcaggatcccaagagtccccttgactcctatttctctccagtcccatgcatggcctgtcagccagcactggcagctgcccattaaagtgtgtgcagagggaagggtcccagtcaaatgtgaaaatgttctaaaatcttggtaaatctactaaaagattgttggattgtacatttgagaagggcagagtgtaaaatatacctctttaaagctatcaacacgtgtgctgagcctggcggctgctcacagctccagcattgccacgcgtggcgagccacaggtgtcacccatgtggctgttgcaggtgcctcctcacctggccccaattctgttcttgcccctctagtctgatctcggccaaggagccagagtgcggttgacagaataatggaacccccgaaatgtccctcagctaatcctcagcccctgtgactgtgtaaccttacccggccaaaggagctctgcagatggggttgttactcactggagatgaggaggttgtcctggatcatcagggtgggccctttgtcttcacgagggttctttaaggaagaaatcaagaggatcggagtcagaggaggtatgcagacagagtgtcgacagggccatgcaggtgctggtgttgaggagagaagggaccaggagccaggggacatggcagcctccggaagctagagaaggccaggagcagattctcccctggagcctgcagaagaagcacagccctgctggctttctgactttcgctccgtaaaccccatgtcagactctggcctccggaactgtaagataataaacatacgttgtttcaagccattgagtttatagtaacgtgtcacacacatcaagcacaagaagctaacacccagagtgagcctgtcaactttatgtcagccagactcagcttttcactcccaaccatgtgacctaggcaggtttctctacctccctgcctcagttttccacatctgtgaaatggggactagcaggcggttaggcacatgctttgcatagctttctgctttcttgcgggtccccctcatccagctgtgtactcatggagggcaggccctgccctgtgcactgcaagcgctccagggagctggagatgaaggctcactctgtccctgtcaggcagtgtgtgttccatgcttttatttcagtgtgtgctgaatgtgggctgtcctgtgcgtctccccttggtttttctcctgggaaccctgatgctgggttttccagcgtaagcacatcaggagttttgttgctggagttgggtagtggctccggccactctccgagctggaaaaacacaagctggtgtgactatgcagatgcaggcttttggggatagacaatagatgggcctccagaacccgagtgaattccagatgcagtagcaacagcagcaggcttgtttgtgtagggtccagaagtttcttgtggagagctcaatcctccagtgagtggttgaacttgagtagcagtcttcagcgagcagggaatgaggggcgcgggcaccgctgagttgtgctgttgggtttaaagaaacctcatggccgttgctgagtgcgttctttttcagcatccgccacggctcacccttcagcattcctcctggctacccagcatctgtccttgtggctgtggccccgcccgcccctccctggcccttactttgctgttatgggactgatgagctgtgctaagccctcctcctcctcattcttgtccttccttccagcatcgtggccgtctcatattctggggacagctctgggtactggcgggaccagagagagcaacccagatgccacacctcctccagctttgcgttttcctgggcgattgcagggaggggcagacagtaaagaagtgaacaagtcaacagactggaacccacgtgggtacagaggctagagggggcctttgttttggtctgcttttctgtttttcaaattagagtctttcccaaatgtttggtgatcctggctggccagcgtctaagagtgagtctctaacaagctgggcggggcatgttgactgcttatcttcctggccaggtggcagacagggacctgatcacttcctggtggtcctggatgccactgcctgttgtcctgttctcttagcccagagaggaccctctcagctcctccctggagtccaggcctggctcacacagcctcaccccttggcatgtcagctctcactgcccctgtttactgcccatgctggcgctcctgccctcagcctgatagcaccaagcctggggaattctgggggaatggggttggtccctgtatggggggcagaagggatgaggggtcacatgctctttatagctcagccttccctgggccattctggccttcagaccagcctggcttcagctctctggtcagccagcccccgactggcttccagaattctatggctgctgtctgcttgtgggatctgtgtttttggagagatttatatcttttttccttttttcttcttttttttaaactgcttttagaatggggttgagggagtcgggtcagtgccctagcctgtgttctttacaggaagcaattctttaaatgtcaagagggaaatgccccctgcccgcccagctcagccaggaggccgtgggtagaaagaccctttcaaccaagtctcacaattaaggttagagatgattttggctcctaagaatactctagaaatctaaagcatcccagttcacatcacttttatctgtttctttgtaaaaatgcttatcattgggcttacagattaaaattttagtgagacagaacatcgttttcccaaccttcccatcggtcacattagagcaaagtcttcaacagcatttttcacttaagggatgttttctaaaaagtgaccctgtgcttttgatgaaatagtcagctaaggagaatggaaccctttgtaccttcacgctgaagtctaaattcagcgtctgcagggcacgggactgctctcgaggaagctcctcggtggcgcgtggtgccactacctctggattgtttgtttttgtcctttttttcggggcttatttttgaaagcaaaggcatgatcagttatagcagtccttgaagacagtttaagatgctggattctggggaatatgttatatggcttaagaacatctgacagctcagtgaaagcaaagtggaaaagtcactgcctgggatttaaaggtgtgtctgcagcttcagcttttgaatcattgggtttagaaaccacagcccttgcttcagacaaagtcccaagaattggagtctggtgttggctggcaaccatatcattcaagttaagccaagtgaggtgagaaactaacggaatggcaatttcaaatgcagattcctttgatgtttcttttatctcaagataaaactcagtgctggggatttcttcatcctcatttgactaaacccagtcaagatgtgtgcaggggcccggaccaccctggggaccatcaccgttagcaaccaggactttcggcccccaggagaagcacggggcagggctctcaggaagggcagagcccaattctttccagcattctggaagctggcttttatactgcttagtgattttgtattgtgagggcaacaattctgtttataatattaaaaataggatgaaagaaataatatattttcttctgtcagacatttttgtttaaatttttgaatagatccatttaaaatggaatgtaagtgaatctttttgtgagaaagtgattttcgatgcatgaaagctaggtgattttaccctgcagtcaggcttctgatctgcaggtattgtaacgtttaagattgcttcatccagcctttcaaatactgtccagtaaagcaggacaggccagcatccaccttcttttaggatggcatgtgtaaaggaccctcagtgtttgtggagtgtgttttctgtgatcaggttcatgccataaatcccctttaagagttggccggcgaaggaatagtgctttttcgtccttgtcccgtggaaggtgccgcaggagctggttggttttcactcgagagggttctggtctcagccgcgttccaggctcagatcccaagcaggtcattgtataaatgttcttatcccacctgttgagtgtcctctgtcaccaggaattcaggatggtaggattttgtgccgtcactctgtcctctaaactggcgtttcctcctttattatgataatataaaggggaccttgtgtcacaagcgagtcacttttggtggaagtggggcaagacatttccctgtgctggtttaagcagggccggtctcctccaagggagccccaagccgttgtgctcacaggccgggtaataaatgtacacgtttgtagtaaagccattcaccactccccaaaacacaacgctgagaatagggtttagcactgagttactttctttaaaaaactagttttgccgtgtaagtatgcttcctcagtcagcatacggtttggatttgcttttccgagcttttaataatcgaaatcatactgacgtcgttttctgcagcttgtttatttttgtttttgttttttgtgtttttttaactcagcattgtttctaagattcatttacgtcattccacatggctgggattcgttcactttcatgccagatacaattctacactctcaatattccactgtttatctgttgctctgttgatatttgggcggtttgtagttaatgctgctataatgaatatccttgtaccattctccttgtgtagacgtgcaggaatttttcaagggtggctgtcctaaggagagggcttgttgctgggtcacgaaagcgagattcggctgtctatgagaaagcccactgttctagaaggccccgtctcattcatgctgctgctgctcccacgcccccgctccctgcctctccacccgtagttgggtcggtgggcgtaaagtggggtctccaggggtctgatttgcctttccgccctcactaacatggtccagcgtttgatcctttgtttcccctgctgtcagggtcttctgtgaccaacccattcataccttctgctgttctttggaattctctccttctggcggctttataggagttacttacatgttacggatacaggtcctttgtcagttgctgtgttaaagtagctcctctgagattcagcctttcactttttaaggctgtctagtgagcagaaaattttaatttaaatgtagtcagatgtaacaacgtcatattttgtcgtaagaagcacttttcacatcttgagttttctattccaaggatattttccaatagtgtctgctaaaaatttcaacattttgtctttcacatttgagtcttaatccacatggaatccattttggcctgtggtgtgaatagggacgaatcccatctttttgttccccgtagaatagtaggataagtgtttgtcccagctgcatttgtggaacaccctgttttttccacagtaatctgcaaaggacctgcatctaccctctttgggaccacctcaactgcttctcagttcttcttccatgtagttttatattcagcttttaagatcatgaactaccttgcactggacctgtagttccgtttggagagaatcactatctttagaatagtaagtcttcctatccttgaatacgagctatcttgccatttatttagaccatttaaaaatgtctttcagggccaggcacagtggcctgatcacacctgtaatcctagcactttgggaggctggggcaaatgaattgcttgagctcaggagttcaagaccagcctgagcaacatggcgaaaccccctctttaaaaaataataatacgtaaactagccatgcgtgatggcgcgcctctgtagtctcagctacttgaggggctaaggtgggaggatcgcccaggaggtggagactgcgatgagccatgatcgtgccactgcactccagcctgggtgacagagtgagaacctgtctcaaacaaagaaaaaaagtctttcaatatattttataatttttatccataaaggtcgttctcattttttgttagaaatacttctaggtgccttgtattttttttgtttcttatgttaggttttctgcttgttgcagtatgttgaagtggaattggatttctatgttgatcttatctaacaccgtattacatttccttattagctctattgacttccctgtcattcttctctttgcaggtggtgggggtgggaggagctcagtatctgtagccttggagtctggatcaggagttgtgttccctccctttgtgcctgtatcattacatcagctttttcaggattcaccattaaaagcaatatttgctgggaccttttaatagataactcttttttggttaaagaagcgctcttttatttctagtttgctaacagcttttataatgaatagctggattttaacatatacttactttcattctgaagatgatcataattaacggtgagttggatttataggtggtttgtacataggttgcttttcttgtgttttctttttttttttttttttttttttttgggacggagtctcgctctgtcccccaggctggagtgcagtggcacgatctcggctcactgcaggctccgcctcccgggttcacgccattctcctgcctcggcctccggagtagctgggactacaggcacccacgaccgcacccggctattttttttttttgtatttttagtagggacggggtttcaccgtgttagccaggatggtctccatctcctgacctcgtgatccgcctgtctcagcctcccaaagtgctgggattacaggcatgagccaccgcgcccggccttttcttgtgttttcttgtgttaaaacaccaggtgtattggtctgctgtcttttctatagactattagattaagcttgctcatagtttatttgagatttttgtgactgtatttatgaccaagactgtaatttttctgtcttttttatactttgcccagttcttttaaaaggatatttattctcccctcataggattggctcaggatcctgcctgccctttgcattctcttgaagagtttgtttaaagttgcatgatccattagttgaaacgtggctgtcgctgcctttaaaatgatttttgtgaaaagattttaaagtattaattcaatttagttcatgattatagggttaattctgttttctatttattttttgtcaactttggaatgtttttctagaaatgtgtctacttcatgtaagttttaaaacttactggcctcaagttgttcctttgtatttttttattttttaaatctctgccatatctgaggctaggtgattaaactcctaatgttttttaatttgtgcctattctttttattttctaaatcactcataacagaagtttgtcttgtattggtcttttgagagaatcactttttaaaattattttggtgtatatgagtgtatgtaatgattacatttcatttcatttatgtattatctgctttcatctgttttctttggatttgttctactgttgcttttctaatttcttaaagatatatctcgtctttcagttcgtattattattgtcataataagtatttaaggctaccaagtttcctctaattatagtaaacagaatcttacaagattttgtatgtatttttttcattcttattctttttaactgttatggcttcttctttggcccatagatatttagaaatttttttttttttgaaattgaactttctattgtagagaattacaggcatacccagcggtggggagagcaggtggagtgagccctggggcgtggtcaggtggcttaggccagggcagtccctccagtacttgcgtttaggcctccctcccatccccagcctctcagtctttcagaatcagaccccagtcaccatgtcatttcatcaataacattctagtgcctagctctctaaaagatagggactcttttactgcattgatgatgtacatatttagacaagatgaaccattctttattattagcagatttttacccaatgttgatatatccctgatggtgtttaaaatcacttttttagtttgtggtttgacttttggtaccaggagtctctgggtccaagcagtgttcatacactgtgattggcacctgtcatgaagtcctcagttaatctctaggtttcttcttcctaccttttttttttttttcagtccttgagatttatctgttgaagacactgtattgtttgtcccacagagttttccttcctaggttctaaattttacttgattttagccctgtcatgtcatttaaaatgttcctttgttgcctggatttcctataaattggcagttagatctagaggtttgatcagattcaagcttggttatttttggtaagactttatagatgcaatggtgcacctcttttgggaggcaaccagccatacccatgtgtgtgtgtgtgtgtgtgtgtgcacgtatgtgtgcatgtatataacagccgtattttaaaacatttatttaattactttctttttttttgaggcaggtttttgctcttttgcccaggctggagtgcagtggtgcaatctcagctcactgcagcctctgcctcccacgctcaggccatcttcccgcctcagcctcctgagtagctggaaccacaggcatgcaccaccacacttggctattttttgtagcttttgtagagatggggttttgctatgcctcacaggctggtcttgaactcctgggctcaagtgatccacctgcctcagcctcccaaagtgtgggattgcaggcgtaagccactgggtgtaactaacagccatattcgttatccaacaaattatttctttcttctccttaaaattctttctgatggatcctgccccaacctgaccgctgctttggaggtgatgtgctttattcctggcagttaaggtgaaacgttactgcatgagcttaaaatgtctaaagtccctattttatgtccctgacctctacaacacgtgggttacagacactttaacactgagcaccccttccccattcacctcttgccgttctctactatttaaattttccttcacttcaaccccacaagttaggtaaacttcttccttcttccttctttgttcttctcccttcctcctcgtcctcccctcctcctcctcctcctcttccttcttctttcttcttcttcctgtgttgttcagatgaagtctgtttagatttctctccgtagcccccagttctttgctcaccttttcttccctccccctttctctgcccacctccatgttgttgatcctcccctgactgcttcctggtgagttttttaaactttcttagttttcagcctggtatatgtttatatcctgagctttcttgcagaatagcttccctgtgaatgcgattctagcttgacagtggctttctcttagttctcagaggctcactggtcctggcttctgtgactgcatttcatttgttggataacgttgcccatattgcggggtcttctgaactctgtctcagtggtctgctgtttcgctttgaagttgtcttgattccattctgctttttcatgcatcgttgtgctttctgtgtctgtagatgcatgtctcccaccagttctggaaaattgtcagccatctatcttcaaatattgcctctccagagttctgacagtatgtagaggtttgcagctcagagtacagactctggcacctgagtccctggcctaaatgtaggccttgccacctgccagccacgtggggtggggagaccaggccggaaggatgagtgcctgcaggagttcagtgctgagggacagaggcggctcagggacgggggaaggtggggaggccctagcaatcagctttgatgacaggtggggtagggaggagcacagacaccttccctgtgacattgagttagctctttgacccaggtagcaggggttagctctgttgggggcaatggggaccctaagaggctttggtgtctgaaaacagaggaaggggccatcagaggcccctccgtggtctcagcacctgccctgataggagctccagaggatagacttggggtgccctctgtcctggagggttggatgcagggttgaaacctgacccattcccagggtctggctgttgaagggcgagaagcggcagactctctgtgccaggcccgggacgcctggtccatccctaagcccttcctgagcacacctcagtggtgcagccctccacggaccctcttttccctgaaagcaggggttcttgggccagcgtaggggctggcagtgcagatggcagactgtaagggccggtttcactggacgtgatccgaatcagagccctctgcccatttccctgggcccatcgcagcctgcctgccagctacctgccgttcctgacattctgcctgggaaatcgtgtttgtgttcccgaaccctccgcagtacagacaccttccctacggagccctgtgtattcagggtgccttttctaataaagcccaggccgagtcaccactgcctgaactggagggcccgtggcccgggcacaggggccgctgcatcgtggtcagcattgtggtcggctgtctatctgcagtcactacacctgcacagcatggggacgccgggacacggccggccagcaggatgccctgcgcagagaggagctcacaggttcacagaagccgccaggctagatgcttagaaatgaggactcctgctttacacaggaatatgaggtttaccagaatctgcttcattgttcgaattctcttcccttcattctcctacactatgaagagctttttatttcccttggaagagagagagctcgatggatgcattggacccggactcctaaccaggagctgtgggaagggcgctgaggaaatgaaagccagtgtttctttctccctcttcagtggagaacaaatcagctcctattttcttggtgccttatgaagcgggagtgtttctgagtcctactcgaatcccttgaagctgataattccattttagtgtcgtgtctgtgttagtacctcgcagtccctcatctccactgctttgcatacagaaggttttgcagactgaggaatccccagccagggctgggggtgagggatggaggctgcagtgaagtctttccctactggactatgggtcagggatgggcaactgtctgtggtcgccttggcagtcaccacggcagtcaccacaccctccttttacagaagacagtcagaccgtggacgttcagttcatgcatgttttagaacccaagtctgtttcagttaaagcggttcagcttcgagaccacaggactcatactggttagtgatcctggagggagggaaaggcaggtcctttggtttctttcttatatcctgaaagtgtaatttttgtattttccaatgagccttcttggcttctagttagagtaaaaaatggaattttctaaatctgagcacggtcaaacgtatttttatccttgactcgtgtgtgaagctgacactgattttgctagaataattctattattaaaaagggacagggaggattcttcccaggtgcacctgtgtccaccttgtctgtgctgggtgggcacccacttgctgggggtttggagtctccagggctaggcatccacactgggcttactgagctcttccccttggtgtttcccgctctcttgctggaccagtggacaggtcaggcccttggccttttcgcggtagcttctgcctgccaccctatggcacaggagccctgcagggctgtgtgcctgtagggctgaggctccgctcagcgctgccagcacccaggagtctgggcttgctgcctgggctgtgctgcaccccgtagcctacatccaggtgcggcgatcagtctgctgctgctcaggcggcgtggacaggcccttcctttcttgtcaatgctctttgccttcctggtgctcaactaacaggacatgccaaaacctgcagccctgcgccctcctggacacactcgtggcatcctgatcactgggtttatcaccctgggtgatgaaaagctttttctgggcctgctgttttgtcccagaagtgtgtggagctcatgaggtcagggggtacagctccatcgaggaagccttgccttgtctctcctggacggtgattctccatgttgcgtggccctgccaccgcccctcccgcgtggagggtgcatcctgtccctgtgatgaagaccagccacacccatgccagcccttctcccagagtcctgtgttgaagaccagccacacccatgccagcccttctcccagagctccggttgccctgcaacaagcagacatcctgctgtcgccccgatagatggaggccagggtaccttctccagagtcaccccgctgggtctgaactcacaccccacccaagtctacgccccgtccactgccccactttgcctgtctccaggtgttacctgtttcttctcgtgtcttaagtccacactggaaatttggagagaccaggtctttctatctgagtgtcctgtgagacaacctaaaaggagattctgggtggagattactctcattaggctttcctgacaaataccatcctgcagtctggtactggagactgcagagcttcctactataggtagtccccatcttacgccagtgtcccctcaggctggttccaaggttcgtggatgaggtgagggcatggagacagccagccctccagcagcacccgctcgccttctccatcagaatgttctcgggtccagcagacccggagaagccctgggatgctggagatgcctgcaggggggtggaggctggggaaagatcctgccaactgcagggaccacccttctcagtggcacagatttgggctgagttcataccttattatgcatgcatctacttagactttttttctgccagtaagaaagcagtttgaaaacgtagatttggaaggtgctttgagtttggtgcaagtgaaagccgatttacataaaaacaaaaacaaaaagacagtggagtaaaatgcacacctggtattaattgtagctttttatttttagcagtgaaaatactgtttcaggaatgtgtcgtttccatctctgtgctcagcaggctgggcttggccgggcttcccctctcgtcacctgtttttctggtgctgttgggaagggaggtggggcctggctgtgcctctggggctgtcgtctcggccttgagcagctttgtgggagcagatctaggttgctgccacagccccaggagctttttaggaaaaagtgactttattcacggagagctgtgggctgtaggctctcagcgaatagtaattacaggggggcctggcctttggtcaggaatgaaaccaaagcccaagccacacagagcaggccgaggggtcgggcaggcccccagtgctggctttggaagaccatcgactccggagcagaagttctgaggcctcagggatgcttgggtctctacggcaggttaggacccaggccctctcattgctcccaaatccctgtgttgctgaccacacccagcctgaggcacccccctgggtgacctgtgagctccccataacactccttcagcccctgatgtttccagcaagaccagcctcctctcactgttcagccaggttaggatgccagggttctggtttgctgtgcactagtgtgtggccctgggcaagtcacttaaaactgtctgtacatcagtttcccacacctgtcaagcggggtgtcccttaaatgaattaatacatcagcactaaaggccgtgggccagagttcaccccaggccctgtgattccccggtagtgaagaggacaaggaggcaggggaagtttcctgtgtgggccctctcccacctcctgctcgagcgagcagtctcctctgctgcagttctcagggagcctgaagagctccacctcccttcttttctagaaggctaaagcgcagtgccatccaggcctggccatgtgctgcagctgccttcatgctagaactctgcaccgagaacgccactccgagcacggcgtcgaatgcaatctgcctgtgacgcgtctctctcccgcccagccccacacagagaaagcctcccctgtgcacatccataaataccactgtatcttctctttgcatttatttctttacattttgatttcaatggaaagcaataccaagcaccttcttcttgcaccataatattttttattcttatttttcaagcataatttaacttacagtgattgttaacataagcttttgtctttggcattgcatatatccatctaaatgagagaaacagaagtggcatataaaaactcacctacatacgaagctccaaggtagggccacttaagttacatgttatctacagaatatttttatatctttaccttaaagaatacttctactttctctacctcgtctctactttgcgtgcgtgcccctccccaccatggtaaatacaacagttgcaattcagttaagaacactgggggaaaatgacatcacatgtaagtcagcgtttggaatgggtctcagttatgaccgttcaggcctttgaatgtcagcttcagcgcgaggtgctctccatagctctgaggagggatggcaggtcaaacacgcatgtccgtccctcaggaaattcacaaaaacgccagtaaagatcgatagttcgtaagtcccaacccaataacagcgcttaccccagtctccagactgtggtctctaagactatttcccaagaaagggacccacacaggggtcaagaaatgtacaggaagagggctgggcgcggtggctcacgcctgtaatcccagcactttgggaggccgaggcagatggatcatgaggtcaggagatcgagaccatcctggccaacacggtgaaaccccgcctctactgaaaaaatcaaaaaaattagccgggtgtggtggctggcgtctgtagtagtcccagctactcggaaggctgaggcaggagaatggcgtgagcccgggaggcggagcttgcagtgagccaagatcgtgccactgcactccagcctgggtgacagagcgagactccatctcaaaaaaaaaaaaaagaaatgtacaggaagaccccaaagcatctggtagcagaacagggcgctgctctcagagagcactcacagggtctggagggccgcccgatccaaccacggggctcctgctcgtcaaggacaggactgtgagcattcgtaaacagtgaccggaaaacacaccctcctcactgctcgagtttggaggctgccacgagacccactcaggattttcagacatgggcaaaccgaggaagagaatcaagcatgacactgcctttctcataagcgctgtttgtgagagtaacaagatagttgatcttggattccttcccgttagagaaatggtcctgctaacacatggagaggggctgatgggactcgaagagctctgtttttaaccctgatgagagaatctagtcagtgatcattttgagccttcgcaacacaaaaaagccacccagagagcaggggttcgccttaggccttgctggcaagtctaagctgcctctgaccaggcctctcggtgagcacccagctttcagaagaacgggggacagagccttgctcgtcagcaccagggtgtaatcagcaaagtgcagatgacccgatgtcttcagctaataaattatcggggtggggggcaggaagcaggaggtcaggggaaggggtcttaaaagatacatcagctaattacaatgtatttggatcgtgatttgaacaaaatatttaaaagtgtttatgaaactatggggacactttctggctacttcataatattacagacttgtccatttatttgcgtgtgttgatggcatttgatttggaagtcttcgcagtgacgactggggcctgcttccctgtcatctagaaggtggggaagtggtggatgagcagaggacctgagatcggcttgattacactattcttcatgcttttgtgtatttttggaatttctcatgaaacataaaaatatatattccagagaaaggtcataagctcacaaagatggggagaacagaagaggggcgacacgaatgagagcctggcaactgacagcaggtgacagagtcacagcgattcagcagacccaaaaaacagatctcagccaaccacgaggagcactgagaactcaccagatggaagctgcgctgccacaaaggggtgctctccagcgactatgatcctgagcgcctctgcatggggacaggagcaagctgaggatgtgggtactgcagcaagaacggggggctagtcactgtgtccacagcaaacactgagtagggggtccctcccttggtacactgaaggcccagctctcaccctctagtcccaggatggagaggcgcctctcgtggacagtaggccagccctaggggaaggttctctgggcactgagccagggggttcctgatgatgccacctccagtcaccctccatgaagcctggcattgagaaccagactgtgcccacagttggcaggtggttttcgtgcctccactcacactcggcaacacataaccaggggcaaccaggcacctgaggggaggcttttgcagggacggtggagagcaaacagagactccacagggaaaagaaaacttgtcaccaggcttggtggctcaggcctgtaatccctgcactttgggaggccacagcgagaggatcacctgaggtcaggagtttgagaccagcctggccaacatggaaggaagggagggagggagagaaattagctgggcatggtggtgcacacctgtaatcccagctactcgggaggcaaggcatgagaatcatttgaatccgggaggtggaggttgtattgagccaagatcgcaccactgcagtccagcctgggtgacactcagcacacacacacacacacacacacacacacacacacacaaacttttagtgagctatcattactatcttcagagactagacaagatattttatctaggaaatatgaacaggatgacattttaaaaaaagaatatccagggtccattgtcctctgaaaatggctgttttatttgtcagttagaaacaaaatagcaaaaatcatgaaacctcatttaaaaggttagaatatacatttaaggaaatcacacatgaagaagcgtgtaagacaaagacaaggaaaacagggaggatggaaaagacccagtattgttctgggagatctcctactcaaggggtagaagttccagaaggagagaatgggaaaggggaacccttgatgaagtgcttcagggagccccctacgatgggagcacgggagctgccgtctccaaaggaccagccaggcgcccagcagtgggtgtgaaaggtcttcaccaaaccacacggcttcgaaatttcggaacgctgggggcctggagaagaccttatagatacccggagagagacatcgagtcacactcaaggtgcagcatcacgtggcgcccattttcctgacagtactgggagaggaagacaacagagttgcgccttcagaatcccgaaggcgaaggatggtcttcaagctggaattctatacccagccaaagtcaggacgcgtgaaggggagaatcgacacgttttcagatgtgcagaacttactctcatgcctccctttttaagacacagctggagcctgagttctgcagagtgagaaaataaaccaaggaagacgatggctgggacaaaggaagcgggagacttaaggtagggcagagacagagggaatcccctggaggagttggacccgtccaggccagcagcagtgcagacagagggagcgcctgcccggggtgagtggcacagcttcggaggcagcgtctgggccggcctcaccagactgcctgcctcgctgcctaaacctgaggatgcaacactcagccgcttgtctgtgcctgacctctgttgaccacatggccccactctctcttccttgccccactgcctcgattccccgaggtcactcatttctccaagggggtcttctgcccagttcccacctgagagctggaggtggccaccatggagggcagctcaccccccagaccacaccttctggcacctggttctggtccacatgactgccctgccagatgttagacggggtgtacttggtttcctgggggtcacccgtggcttcaccccagaagaagctctggtcccctgtcccagaagctgacggcagactcggactcgagactgtcctgtcccgggaaccatcgtcaactcctccttccactgcactggtgttgctgccttcagtcttcagaaagcaaaggacgtgttttcagggccacatatatgcagatgttattatcatagcaaagcaagaggacacttaacaaggtcaggatgttgctcacggggtagggggtgcatgtggtttgaagggacgcagagggtgacgtttgggcctcattgaagcggaggatgcactggtgctggtttcattactgttcttttactaaacatacttgttcttcagcatggatggcacactgcacaataaataaagggtgaaggacattgtagctaagtcatgcatttctgatgtgctgtctccctcctcttctgtcccatcctctctcttccccccacccccacatagaggcaaaatatcagtgtaagaggaaatcatggttacatagttgaaatatctattatttttcccttgatttgaatgagtcattctttacttgaagagaccctaaacattgactgtgttacctaaagaatagtgcctctttttcttccatatctgtatgatggcatgaaatcgcgtcctgagaagaggacctaagcatgtcgtggaaaatcagtatgcttctttatgaacatttattttaaaagagcgagagagagagactaacaggtttttctgtttgtgattgagaattcattcacagcacactgaccgtctcccattggactctgaatgcggcctttgtgctctcactgacgtcaggagtctgattgtcttaatatgtttctcaaggcacaacctataaaagccgttttctgctgtaccgtagaatattcatgagaatacagacttttttgttttgatgctgcattctttaaggagagaaggttttattgttttcttcagggtgctttgggtcaaaagcactagcagcttctgttgggaactcgtggcattttgaatggtttttgatacagaaatagcacaagtcacgtctgacacagccgtaggcgcacgaatgcgtgaatgcgattgtggttctcatctctgcagctggtgtgtggggccgggcctgggacagcttgggcctcatccccacccacccggctcccaggatcctcattaggaagccctcaggagccctggggtgggtctccttgccctgtgaacgctccatttgtgttattgaatccaacataaatgcagcattgtcttcagaggtgagcaatggccgtggccggaggtgcgcatgggatgcaggcggcgtgtgctgctgttgattttctctgctctgctcttagcttactttagcagatagtggagtttcacgtggcagtccggtaaaccaaggcagtgtgaacatcccttccccacaatgagtgaaaatgcaggaggtgccgtagcgagaacagcgacagcattctgcgcattggtgagcccgactccccagcctcggtgcccaccgaagccccctctggctgcactgtgccagtgagtccaggctccttctcagcagaaggtggctgctctgcagggcccctcgcctccctgctcctcaggggacccgcactcttccatgtccgtagggagacgcgcaccgagctggagacacagatctgcgaggagtaacttgcctctctcaccagcactgccaggggcggatcagcgccagcaccttccagcatgcgctaaactgctggagaagctggagtggctggaaggagccctgcctgcctgccctcctcctcctcagttgctggccttggcagctctagggtgacccagcaggggcctggaggagtaggaagcagcttcccagctgcagtctgcatcatcctctctgtgctgtcacagaatggaaggttttagcagaaaaaggagtttgtaagcgacattcagaagatttgggcagcagtttcttcccccatagggtcctgtcttttgggagtggggagtgctgggccaggctgctcgctggctgtttcacaggtggtggaatttaagagcagacttgggtcgagctgtgaccgttcaggtgatgcacgcacaggaggttcagctgtgtgcctgtgaggcgggcaggagcgtcacccaagcttcagaagagaattccccggcagcagcgtggcgctcagcatgttccgtgtctgactgttttgattgtctctcagtccagttgacaaattccttttaagatgaaatttgaattaatttgcagaacttgtacaaatctccaagaaaacagcttaaggaacagattaaagaatgaatgccttaggaattaaagcattaatagctcttgagtagactggatggaaagatgagttgtgtaggttatccagatgaggctacatccagggagcaattcttaccttcagagggcgctgcctgtcctccttggcatccaagtgagcgcatctcctccacgctcaatgatgaatgctggccggcatccctgtgaggaaccttgtgatcattttccatttctgaaaactcccaggtggtgggggcccttggcccacatcagcattgaccaccccgggctcagatctggccaggtgcctgcgttgtgatgggaatttcagtacactgaattttgcctctgaccctgatgaaatagcttcggtggcatttgcatcaagatcatgttagtgtcatctctattagatgctttggagcaaacatgaacttgggtttccttttaagatgtcctgtgattccagattcaggggaatctgagaaaagtttgaagaaagaaaattccactcggccagccaaccttgggtgtgcagagcctgccccgccttccccactttgtcctgagaagctgggtcctccccagcaccagagttgctgctgcttcccctcgcgctcttggctgctctcccggccccaagcctgagtgacactctaggattgcagatggcaggctggtctctgggctcccccgtccccatgaccctccacctgcacccagacctctgggtccttgctcaggcagcccctgccctcggtgagacgcagcccactgtgggcccttcccctgggcctgccatcagctcctgtgctcctcggcgccccagcggctgccctgggcccgttcccacagcacctggcacacagcaggagccatgaatgttctttgggaactgaatgaggagtggaaatgcgggcatgtcatgtttttgaagttaataaaaaaaatcccttaaaagttgttttatgttcggtttttaaagagattaacaccagacgtttacaatgctgccccctccctccatctgtgagaaattagaaatggagggggatgcgctaaagccagcagcgggtcaggcctctgcccagcgcctgtggtgggaccctgtttctacatgggaccttgggtgacagcagcacatcttataagcaggggtcccacccaggccccccacacagggataaatgaggcgagacgtaggcaataacccagcttccaagatgcaacgctgtgcagttacttattccctgtgcttatttgttcaagctaaaatgtctctgtttgaccaaacagaaagaatatgagagagaccagtttcacctacaaatatagacaccagcattctaaataacatggtcgttgttgatgctattttgtttttctaactttatcccttcctggagataaatgcaactttgttcttctacattatacaagtgtatgccttccccgatgggttcacccatgggtgctgactgtgtaacttagaagaacaaagttgtgtttatccctggaaagcacgggcccgctcacctgaggcactctaggaagtcactgcagggcactggtcccaggagaaccgcgtgccaatcacagccatgaacgcggaagagggaaccgcaacctgacagtcattcacgagactgtgtgttcaggaaagcatttagcaccgccgtgcttgtgagagccggacccgtagcccccagtgcccacagcagggagcccgccagctgagtcttcttcaagaagccaggccccgttctcttttctccgagtttgcgagtttgctgacttagctctcctccctgcctttcatatattttattccttaaaagaaagtctgaagcaaatgtaggtgaacgctgatgtttcataaaaccagcattgcttacgcagtttttccattttgctatattttgtcataaaaatgatcagaaaagggaagaaaggaaatgaatagggtccagtcctcacccacatatggggtgggggagtgggtggacccctgctttctgctcctgcacatggaacagtcctcacctatgtgtggggtggggggtgggtggacccctgctttctgctcctgcacatggaacagtcctcacccatgtgcggggtggggggtgggcggacccctactccctgcttccgcacattgaacacgcagtttatgtgcgtagattcttctcacataatagcaaatgaaaaccttttactgtgtcaaagtcgacacccaattaaaaactaaatacatgcattttaaaagttgggggttgcacttcactgatttggggaaagaaacagaaacagtcagagaggaggatttcatttaaaaaacaacaataacaacgaggcagcccgtgctgcgctgtggaatgtgatcagatatattcagaagcttctgtcaccttctgggttgctttgtgtcttttcactgtccaggaaagtggcctgagctggtcttcgtggcctgaggcctgggcactcctcaggttcaagccagtccagccagggcagccagcagggccaggttaggagcatgattgactgcggtggggcaggggaggggtgaggagacagtgaagtcagccagagaagctgagagcacccctcaccctgggcaccaggagctcaggtgactgcagctcccacggctaagcggcaacccagggatcagaaccccaagctccggccagtgcccaggcctcccccaaagcatttcccacccttttctcaggagaaggctgagtcctgggaccaggacctccagtggtttggagacaaagccagtgtgggacctgctgcctgggcagtgactgtggaaatgctttgcacccaggggcagctgccacctatgggctgtttcacccaaatcggtggctttgagactgtggagtgcaggttttcctaggaactgagttgctgacaaggcctggtcttaagccagtccagagacgggctgagtgtcagggtgaacgtgggtgggctgctctcagggatgcacctggacaaggtcacgcccaaaggtgctgaccctgaggggcgaggagctgttttctcagcagccctcttgttggcccagacacccctctgagcttgagaccctcctagagggcaaggccccacctccccacttggcccaggtcacatgagtgttggttatggggagctttctgaggggtgggcctgtgggaggggagcaggcaggctgggctctcacttggactctcagtgaagttttcggcagagtcgcgtgtctgagaagtgacgctgggatgtccctgggctgtgccaggagcagtgctggctcagagtgagtgcctgcacacactgcatgctttcagaatagggacctgccgtaaaaggggtgcgcaggtcgggctgtttgtgatatctgtaatttaaacctacccttcttcctgtgttacttttctcactttcatttggtattgattgtaaggaatgaaattgattcagcttctgttcctcatcaaaattacttgtagccttttctcaatagcacattagtacagggcagaaaatccatttcttcgcgaggtgcagaaacgcatgcccagaggaacgcacttgtgccaagagccaggagcacgtctcgttggctgtgtctggtaaacatgttttccaagggggcgcttgtctcaccatggaaacgggctccgggtctcgagcgtctgtctggaccacttctggggcacacgctcttgtggctctcacagcggcacggtgacttcgatggaagaggaggaagaggagcaggacaggcagtcttcctggctgagacctggcgcccgcgcttttccttgaacagccacaacctttttctttatttttctcattattggcctctagaaatgacgtcagcaaggcctctgggcctgtagcggggtcctctgagagccggcctcccggggagggtggaggaaggaacagggattgtggagtgcgtcctggcctgacctcccatgggcttttgtggtttttgcccttgaggaatgggccccagaggcctctgagtcttgcattttgagtttgttgggcaagagggggacagggggagaggggtatccaatcctcaaatggtcacaaccccccccccgccccgtgaaggtggccagtgtgttgggtgggggctctggggcccagggacagcaaagggcggcagtgaccggctctcctgcttgtttttcccacagtggatgtggccacggcgctgcctctgcaagtggccccctcggcagtgcccatggacctgcgcctggaccaccagttctcactgcctgtggcagagccggccctgcgggagcagcagctgcagcaggagctcctggcgctcaagcagaagcagcagatccagaggcagatcctcatcgctgagttccagaggcagcacgagcagctctcccggcagcacgaggcgcagctccacgagcacatcaaggtgaggcgcggtgcggggctgcgggtgggccaggcctccggcaccctcaactcccggtgactccagccctgcctccgcggagtgtgctggggccccaggcatgatgcagggttcctgcaggaggccttctgcgttgggacggtaacaccaggcaacaaaccgcgggcagcacttgcgtgtattgtggaggacgtggtgctgagtgggaacggcggtccaaagtcattgagtggaagcatattccaaataggaaaaatgcttatcgcctaatttcatccgaaacatgctcagaaatagaaaagctaccaaagggaagaagcaccagaaccttaatgatcgttgctgggaggtgtattgacaaatctgtgttttcttttccttaggacttttctatattttctattttctctactaaccttttataattagaaaaagataatattttcttttaatttaaatgcggtaagaaaaaaaagactttttttggtacttactgtctacaaatatttaatctgataccagattttaaaattaaatcaattggaaatatgtactagtgatatgtagcaaagttatatagttggcaggctagttatgatatctgtgattataatatgctgtcactgcatttagaaccatttagagcaacaccgtctaatagaaatatacatgagtatattaaaattccaccagtaattttaaatattctagtggtcacagtaaacaaagtgaaaaatcccacaaaaccagattaagttatctatatctgtgtaacaaaattaccccaacacttagcagtttaaaatagcaagtttgtattgtcttgctctgtgggtcaggaatcctggagcagcttcgctgatggggtctcccattatgttgttattaagatgtcaggcagggctgtggtctcatctgcagggttgactggactgaggcgggaggagctccattcaggctcactcacatggccgcaggcaggaggcctgaggtcctcatccacagggctgctcacagcatagcagccagcttcccagagggagcaacccgagaggaagcatggccaacatggaagccacagggtctctcgtgccctgatctgggaagtggcaggccgccaccaacactgctgctgttgttgttcatgctaagtcttggcaagccactgggtcgcacgtagggcatgtctccattcaggccagccgcatttcgagccacacgtggttcgtggcaactgttggacagcacagatgtagggcatcaaaagcctatgaccgtatgcaacctggtgcttctgagatgctcacgtggtccatgggtagaagttgttcacctgaggtcttggctacctggcattagcccacacacagatattagtgtgcccacctagtgtgcagagtagcttaggggtgcatccctctgtttctgccctagctgataattctcttgaccacaggatcccagtttcccttcctttatatgtaagacactttgttcagtgtctttatttcataatcactgtcgagaaatggaggtaaagtagtatcagttgtctgtagacttagtggcagattgtgggggaggctgcatcccaaagctgggctggccctggaggacaggctcagggacagctccatgtcccctctcatgggtgccaaaccattctgtgagtgcctgtgcttcaaaggtgagcccggagagctctgtactcggccccctctggccttgagggaacgggggctgggaggtttctggctggaccctgaggggctgcttgcgggctctgggtctttggacttggcaccgttgccttggcatttgttggcttgggagttgttgctgctgctttttcccagatgcatgggcctgctaatgtcagtgtttgacaaaccaaggagaggacactttcctgagctcttgaagtccatgctttatcgtttttgccttcagatttcagagcgacctagcagccgtgtgtaacaaacacgtcacttgtccctgtggagattggcccaccagcctccactggcaccctgtccactttaacaagcacactcgagtttagggtggggcagttgagagctccacaagcaccataccctttgggatccctgtgatcctgacactcctggcaggtgggacatgagagaggacacagtcttcactttactgatggcaccactcggtgcagtggacaggccagtcttgcctccctcacggccctgaccatgggcaactgcagctggcctctgtttttctggcctgggagaagagttttcaagctggctgcaggaaacaggtgcatgccaggcagaaggcgcgggtccgggggagtcactgcaggcaatccctgcagcctgcccagggcttcagctcaccagcctttccatgatctgcgaagagcagccctcaagaggccactcgttttatttagtttttgcgccataggctcacattctatgactcctagaagtaattttttaaaatgagtaccgtagctccttcgtattctgcatgttggcaaccccacatcaagcccgaggactccctgacagcagtcttgacccaggcactgccctgtgcctctcagaagcccccgtcggccattggtcccgcctgcctcggggacatgaggaccactcactcactccggcttccctgcgttcctgcaggccaacacagatgctggctgaggatggcctcaggggctcctgctgaattccatttttcctgttgtcactgcaccctggtgagccctgcagtccttgccgttgatccacctggagcattcacagtgcatgattaggaccccaccccgaagccgccatggctgtcggtgcagagcgaggttaaagagatgggattgctgatgtctcattccgtgctggttgaatttgtagcttttacaagaagacgacgtagatgagaagctgagaagtaagcctaagccccgtgtgtttgactggggctcctcaaggtagtcctaggaggccagaagacataaagaagacacttgagttggggtcagtgctgccatctcagggtgaggccaggtctcacctccagaacccctctgcctctcctcttctggtgccccaggagctggcttcactgcttggaagagagcaccccgaccccagtcctcacgtcgctcctacaggccaggccttcaggccatgctcctcattcctggaggggtccctgggaaagcccaccccatcaccctctgagagatggccagagaccttagaaccatggctctggagccagtctctgggccagggtctcaaaagcacagaaagaagttcaaggttgcctttctctttgcattttaatcatttatttcttcattaaaatagagattataaaagccatttgaactacatagtggtttcattacattaggaggcttttgtttggatgatttaaactctctttataagccatcatattgtttgttagtgacatttggcaatagtgtttgtcagacagatttcttgaacacaaaatctaattagtgtcattaaatcatcagtgaatttgaatagagttttataattgaaaagggagtcatttttaaaatataacttaaattattaatgttgggtaaataggatcttttaggagaattttaatgctcgtggtccccttggactttccggtttcctggctgtttgtggtggtttagacacagccttgcctctccttctcggatggtgcttttccaccaagaagcggatcccaggtaagcgtggaagttctctcttgcacttctgtgtttttgtttgtttgttttttgaggcagtctcgctcaactgttgcacaggctggagtgcattggtgccatctcagttcacttcaatcttcgcctcccaggttcaagcgatgctcatgcctcagccacctgagtggctgggattaccagcatgcaccaccacaccctgctgctaatttttgtatttttggtagagatgggtttttcccatgttggccaggctaggctcgaactcctggccttaagtgatctgcctgtatcagcctcccaaagtgtcaggtttacaggcgtgagccactgcgcccggcctctctcttgcatttctgatcaatgcctcccagaagaatatggagaggcaggacacaaacatggatacccagagagggtccaaggacaggccacgaagccatggctagagcatgctccaggctggtgagtgatggagcaggggcatgtgggagaccccaagcacaagactgggccccggcacccacctcagggtgcatctctccccaggaggcacagggcaccccccacactgtgcacctctccctaggaaacacggggcaccccctgcagggtgcatctctccccaggaggcacgggacacccccacagggcacacctttccccagcagttagggtacacctctccccaggaggcgtggggcaccccctgcagggcacatgtctccccacgagacacggggcacccttcatagggcagacctctccccaggagatacagggcaccccctttagggcattcctctccccagaagacaccgaggcacccctatagggcacaactcttcccaggagatacagggcaacccccatgggggatacaggcaccccatggggtgcacctctccccagaagacactgggcactcctcccatagggcacagcctccagggtagtcaccgagggacccacccatagggcacagcctccagggtagtcaccgagggacccacccatagggcacagcctccagggcaggcactgagggacccccccatagggcacagccctccagggcagacactgagggatagccctccatgatagacaccaagggaccccccccataggacacatcctccagggcagacactgagggaccccccaccataggacacagtctccaggacagacactgagggacccccccataggatacatcctccagggcagacactgagggacccccccataggacacatcctccagggcagacactgagggaccccccaccataggacacagtctccaggacagacactgagggacccccccataggacacatcctccgggacagacactgagggacctcccccatagggtacaacctccaggacagacactgagggaccccccatcatagggcacagcctccaggacagacactgagggaccccccccgatagggcacagcctccaggacagacactgagggaccaccccatagggcacagcctccaggacagacactgggggacccccccccatagggcacagcctccaggacagacactgagggaccccctctcatagggcacagcctccaggacagacactgagggacccccccatagggcacagcctccaggacagacactgggggaccccccctcatagggcacagcctccaagacagacactgagggacccccccaccaccataggacacatcctccaggacagacacttagggacccccccatagggcacagcctccagggcaggtacagggcaccttttgtatgtaggttgcacatcgccctcctgcaaggcttaccctctctccctgcactggtgtaaggcgtgccttttcttccctaacttcagcctattcccagtcgaatgcatgaagagtaaaaatcatttacacactgttttagtggcatgtcttttttttttttttttttttttttttttacactagcaaggctggcctctttttcgtgtgcttgtgtgtgtgtgtgtgtccatgtgacttgtgctatggagagcacagtggataggagagagttttcagagctgtttagttgatagtgtgactcttcctttcagggaggaactaacatggaaagaacctagttttctggcactgggagcgtgggtcatgatccttattctctttaatacctggccgaggaaggtgaagagatgttgcccaggcccagctttctggtcacctgaggcagctgtcagtgagcattagagctcacctgagctgtgccgaatgcctgatccagggctctgcgccaggacaggggtgcggtggggaggcagggggcaggagcacactcttggtttggagcagagtccctctgtggtgcctctgggtgaaggttaagaatagacgggaagacctcgtgcacacctttgcttagcatgagctgcctcccaagctaggcagaggcacatgcacgtggcagtgggcagtggggccaggtgacacatagggcacgtgggcacacacctggagagccatggatgccgtggccctaccccagctggtctgcacctggtgttcccatccatgggcggcagcttaccgtccgtggcgtccattctgccgccctttcctcctggcccctgccgctttatgcgggcgcggcatctgcccactctggggctgttcccctggcaagttgaaaaagagacacaagaaagtcaagagtttcgttttaaaagtgaaaatctttttgggttaccacttgaatatttgtatattaaattctgaagtcagagtcaaagcagctaaattctggggctcctatatttggttcagagttcagtgtacgcttaacgtaaacttaaagtctggttagagtaataggatcagctatgattggttttgtttttgcttttcttagaagaatgaggtcgtagtcatcttattttaaattgctcattatagtttcagtctgcaaaaaattgcttcccaacagcccttgccccatggagtagtctgacgtgtaaagttagcgagggactagttgcagacaattttagctaacttaaaaataagcgcatctcaaagtcctgtttttcgaagcctgaatttggtattccagtgacgcacctgccctccagaagccaactgagggttcccatggagaataagtacctattcacgatgctaggatgtggggcaggagtgaagaagagtgaaatggccatcttcccttgtggttccagcattttccgagcatgccgagggcagagggtccctgtgtcttctttgaagatcaagaaacaggcctgacgtctcagcttgtgctatgaacagggagtgttgaaatcctgtttgtcctgatggctttcactttgcaggctttgctctacaggtaatctgttataaatctaataaggtggaatgcctccctacaagtagcgaagccgagatcacacagcgttgccgggggcaggtagggaatcagtcactgtttgtgactgctggtttcattaaaactccaccacagtcatgtttctgggagttttgccttcctgtgaattttaatccccagcagccatggttgttgctttcattctttttgaaatgatggtggaaagagctcactttccctctgggttctggctgacaagtagatactgtgagactgcattaggctgcatctgtccgctctgcgtttccgccctgagtgagctctgagcagcgggagggagggagccaaggggccctgtgcaggtgacagccagaggggaggggctcgccatgacgaggagatcagttcaacaaaggactgtgtttgttttctgagctgagaagcaccccgaagccctgtgggttgtatgtttataggttaacctgctggtggcattcccaatctgcagacagtgtggcccagggatgctctcggggcacctttccctgtgtacacagctccgggtccccagggcagagtcctgaatctgtacatgcccagatgtttgtcctggtagagggactttgcttgcatgtggcggcaaggaacaccgcgttaggaaggtgtgctccaggtagtatctccctagccttgagggggcctgattttaccttaggatatttagtgtctgcaggaagtcggcgtctctaggcgacatctttcaaaagtgacggtttgatgacaatcaggccgcacggaggcaagcccagaccagctcttctgagtgttctccccatgccacctcttccagtcctcacaggaacccttgggggcaggtgccacatttaacccagcacggagaggttaaatatttaggtgcaagtgcgctggcagcaagcaggtgggtggagcaggttttatcagccaggcagcctggcctgggcactgccctccagccagcgtgctatgggccgcctgtgagtcttcggaggccagcgctgccctgatgaaggacatggcaagagcttgcttatgtttatcccaccatccccaagaagttcatttaagttggttgttcggaattaagtttttgccatgggaaagatacaggtgagatgcttggtgtgtgcagctagccctgacggccctccctgcccctcctgcgcacacgctgctgccgggcgtggtgggtgccccctctccctcggcccacccaggcctcctgccttgcctgtgcccacacatctgccaggagcagcacccctgctggaaggcaagcctgcattgcacctgcctgggtagggtcttgcctcagcccctcctctcctccctccttccttgggtgtgggcctacctcctgccacctctgcagctcttctatccccgtgctcctggctggaattgagtcccaccccccttgtgagggctgtaggtgggtgggcgtgtttgtggacagggcttttcatctgtgaggagagccggcaggtcctgtccccaatgtctggatgctgatctgctctctctgctgctgtaaatccttgctgtgtgtgaccacaggtgtgactgggcagacctgcctagagcccgaggtcccactgccctggactccaagcgattcctgtggggctctgccatccaggccacttccgctgccatgggacagtggacggggaggctggctgtgggctgcaggctgcaatgacccagcccaggtgggccgggaaagaccagcgctgtggtctccgtcctggaggctggggcagcctcagtccagagctatctgctggggtcactgcaatggggcaggcggtttctgcctggggactcttcctcggggtgggccatggggggcagcggcccagcacacccttccatccacatggggcactcatgaggggcaatcatgttcattttgcttgttcactgccagcgccagtttgaggttgccgaatgccatttggttggccaatgcctgtctctgtcccttgtctgggctgggggctttacttacagaatggaagaatgaggagttttaccttacaaaattacacagttgatgttacgtttaacatcgtggacacaatgtgattcaaatttcacacaggtcacagacatgcggggtgactggcatgtctcatcttgagtaggaagaggctgtgagcaagctgaaatcctttcttccctatttacaagtggttctgggtggtcgtggaaaccggctgagtcctcagcagtgggaagcgaggtccaggaacgggattgatgccctggtgaggccattcctcatcccctgcaccgcctgtgaccatgaaagggcttgggccaggctgtttttgcaggctggatcttcccagaagcctaggggtttgaaaggtgtgtgtgctgggtgcccgggggctgagctggacctccaggctctcgcaggagagggtgtggtggccacctggaagctggctgtgcaggggcagcaagggtgtgaagcttgccagtcggctcgggcctctcatgtgaagaaggacccagcaagatgcaggagatgttcccggacacacaccgcctgcccccgtcaccttgccaacgccgctgaaggttggcgcccacagagaagggcagcgcccttgcacgctcacagttacctggagcacacatgctcaatcccacgcgctcactcacattcagaacgcacacttgggtgcgcaagcacgttgatgtgcaggttcctccgtgcgggcagccctgttgtcttggagcagcgagccctgtagcagaaggcttgtgccgcctcccaccctgagcacgccgcgtgggctctcaggctgtggcacctcagggacccagccccccatccctgctggccctactctgtcggggttgcctctgcccgtccgatgtaatccttttcatctgctttcctacccctcagccacttttcattttcctttgttatcacctcttgctctgaagtgatgcgcatttgttgtagagcggcaatcggtcccgacctttttggcaccagggaccggtttcgtggaagatggttttttctgtggacaggggtgggggacgcaggagaatggtttcgggatgaaacttccaccacctcagatcatcaggcgttagattctcataaggaccatgcatcctaaatcccccacacgcacagttcacaacaggatcacactcctgtgagaatctaatgccaccactgatccggcaggagcttgagctctggcgggaatgctccctagcctgccacttacctcctgctttgtggcccatttcctaacaggccagggactgctgctacccgtccacggccggaggtggggacccctgtcgtagagggattgaagaatacacagggacgacagtgtgacgtgggtggcatcccatgggcgccagtcctgctgtgccagcgcagtcactcatggagcacaggcatccagtggctgcctcgcacgcacaccccactctatgcctcaggcgtccggtggctgcctcgcacgcactccccactctatgcctcgggcgtccggtggctgcctcgcacgcacaccccactctatgcctcaggcgtccggtggctgcctcgcacacacaccccactctatgcctcgggcgtctggtggctgcctcgcacgcactccccactctatgcctcgggcatccggtggctgcctcgcacacacaccccactctatgctttgctcatcctttccctggcctgagcctcatcctccaggaagaatcaccagctggtggaagccccactctggagccagcccggagcccctgattcactaaatttcctccacagaaagttcctcgggccactctggttgccaggatgcctgcttatcccgtaccctctcaccgtcccctcttcctccataaggggagcaagaccaacaaaaagcaacccaccagtggccgggtgaggcagctcacgctcgtaatcccagagctttaggaagctaaggcgggaggatcacgtgagcccaggggtttgagaccagccccagcaacagagcaagatcttgtttcgtcaaaaaagaagaaaacgtatctgggtgcagtggtgtgcacctgtagtcccagctactcaggaggctgaggtgggagaatggcttgagcccaggagttcgagaccagcctgggcaacatagcaagaccccttctctacaattttgtttttttaattaactgccatctatttgggagtctgaggtaggaggatcacttgagcccaggagctcaagcttacagtgagctatgattgcgccactgcactccagcctgggcaacagagcgagaccctatgtctaaaataaacaagacactgggacaagagacaactggtaacggaacaatcactggggacagcagacagaccatgaccgggacacgtgcggccacagagggtggcagagaggctctcccaggcaggcaggtggcagagctcctcacacctgtggaggcctggcacttcccccgggctggcccaggggtttgtgtggaagccgaggaaagtgtgtgcagacagaaccctggagcatgcgaacgagagcggagccatctcagaggagcggaaggacgtgcgggagccctggagcctgggttgggtcccaggacagaggtgctctgggtttgcgggagtccctctcagggcgtctggtcagttgcaccttcccacactcgtcagcgccaggccaaattgttccttttcaccttttccgataccgtgagtgaaatgggaagtgttcactagtgagcttgaacatttatcccgatttctttttaaacagttcttctgtgcatcttgttcttttctgcccaacgttttagtgggctgcctgtcatgttctcattaatggataacaaccatttatataaaatttgtatgtcataaatactgcagtttttcttttaccttctgccttttgttattaagacaaacattttatgtcgacgtcagtttttgaaatatgagatataatttatactcggtagaatgccagcccttaagggtgctgttgggtggctgtgcccttccctgtagacagtcaacaggtcggacactccacccgctggggcgtttcctccggcctcggcacccccaaccctacctcacccccgcagaggcagccttcttctgattttcatccttgtgcgttagttttttctgttttagggcttcatgtgaatatagtcagccctccatatttttgggtttcacctccactgattgagccagcggaggatcagagcctggagacactgagggccaaccacccgtatttccacaccaggctgtggtggaatgtgcggatctggagctgcaagtgcagaggctcagcggagggtctttcagtcttgcctcttctctctgctctttcaccctctgccaacacctgctgtttagcagttcacctgtgttttcttgtgtacacgtaggttgttgttttttatggttaggtggtattctctttgatgaacacacatcatttctccaagtgtccaccttcgagggaacatgtgggttgcatcaaggctggtctgtgaccagagctcccatgcacattcttgtacaggctttttgtgggtgtgcttccgtgtttcggataaatagctaggaatgggattgctgggtctcggggcagatgtgcatttaactttataaggaagtgcccagcagttttctgaagtggttgtaccatttcacgctctcttcactgtctttgtgtcgttctcaaaatagcatttccaacttgcaagataacataactcttcttgcgtattttcttctagcaagccaatggcttttgtttttaatgttttccacttcgaaggtaagacaatgcccagagcccggaatggccctgacttctttttttggactgaaatagcagcagtgcagggcagggcagtgcccagggccacaccagggcagacgtgtagggcctgggctggtttcttgggtcttcattgggtctctgtgtgtgtgtggagcctgggctctgaccgtctgtctcctccttccacttgcagcaacaacaggagatgctggccatgaagcaccagcaggagctgctggaacaccagcggaagctggagaggcaccgccaggagcaggagctggagaagcagcaccgggagcagaagctgcagcagctcaagaacaaggagaagggcaaagagagtgagtgtgggcacggaaggccaggcagagggagggaggccgggcagagggagggaggccgggcagagggaggggtgcgggcacggaaggctgggcagagggagggagtgcgggcgcagaaggccgggcagagggagggaggccgggcagagggagggaggccgggcagagggaggggtgcgggcacggaaggctgggcagagggagggagtgcgggcgcagaaggccgggcagagggagggaggccgggcagagggagggagtgggggcatggactccggaaggtgaggggcagaaggagtgagtgcaggagggcactggggcagcacacggggagtagggaaagatctaggggcagctgagcctcaccatggtgactcttgccactttgcctgtgctgggtttctaagaagcaggccaggaatgggacccccaccccctgacagggacagtgagtgtgacagtgtgtcagcccacccatggttagctcccccagtgaaccagagtccatggatttatcttcatccagggctgcaggattcaatattaacatcaaagcaaggggcattcagcccgacttttggtttgatttaaacattttaaagactatttggcaggattcctaatagacttaaaaatattaaaagccataaagcatgccagatgcacagtgaatttcatctgtgagttctgccctgcatttttcaaagtacttttctttcgggagcattttataagtgccttcaaagcaggtgtgaggttgtagagtgacccacggcccagtgagggccagcagcgtgctcttgctatctgctccttccactctgaattttgccttctgtgggggctgtgtttgtacatctggagaccagcatggtctgttttcttctaaggagagcccacacttcatactatccaggagaacactgtatttgctgtttcccactttggacagttagagggacgcatctactgaggaaaaggtaacagtgtcgcccctgctgactgtgggctgctgggacgatgacccgtgggctcctctgcacgaggacggtgcccagcgtcgccagtgtgtctgagccctggcgtgtccccggggtgcagggtccaccgtggggctgagtcagctctgagcatcctctcagatcttcacttaaaagagcccttggctcactgtgtgtttatatcctttccatggacaacttcttgttttaagtgacacagacagtcaggatctaatcaccagagtgaagggactttcatagacactccgagtttctgcccaggacttacatgctcagttaaatttgtctgttccctggtaatactgaaaaggagtcgaggtatacattttcctcaggtaacaggattccaggtaaggagagtagagggatttactcttgtagggctggcccatgagtcagaagagaagtccttatgcacttcccccttccccaaagataactcctctcctgatgtttaacatggaagattaattttgcctgcttttgaaatgtatgtaaatggaacccttaatatgtaggatttttgcgttttgcttctttctgtggacattatgcttgtgaaattcatccccattttgcatttagcaagaggtcattcattatctattatatattgctgcatggtgtcccatttataaatgcaccaatgtagtcatttcttctaaagttgttagatatttggcttgtttcctaaccagagctattaaaagcagtattgctatgtgcattcttgtacatgtttcttggtacatgtgggcaaatgtgaagtggagttgttgaactttggggcatgcatgttgtcagtgttcatacgtgatgcccaaaagttttcaaagtagtgtaccagtttacactcctaccagccatgtacaggggttcctgtggctccatgtccttgtcaacacttgctgctgtcagtcactttaatttcagctcctcctcatgccctcagctacatttctttgattaccaataagatagtttattttcataagtttttttgccgaatgaatattcccctttttgtgaagtgcttgttccagtctcttgcccatttttctgatgcgaggtctccctttttcttgatttggagttgttctttatatattatggaatcaacccttggccagttgtacatgctgtaaatctcttcttccactctgtactttgcctgttcactctcttaatgttatctttcaggcacagaaattctcccttctaatacagtttcagtcttttcctttagatgattttgtgccttaagaaatctttcctttcttcagaatcttggatacatcctctttaattatctcctaggagctgattgtacctggaattgatactagtggggttttgtttgtgattgcattgactctgtggttcaaattaggaagacctgatatttttacaacattgattatttaccttctttaatttttcttaataatttcttaatagttttatgtttaggaggcttgcatatatttgattaaatatatgtcaagccatttgatggctttggttgctattgtgaatggcttggtttttataattttgaaaagcagtcagtttttgaccattgactttgtgtccagcaaccctgttaaactcagatatcctaatcattaatagattgttttgaattttcaacatttagaatcctgtcatctataaataatgagaagattgcctcttttctgattggaataccttttatgtcttttacttgcttattatatagaatgggctgagattgccaatatagtatcaaattgtggtcctgatggcaggaacatttgtctggttcccagtttactgttaggtgccatgttttctgtaggggctttgtattttttactcatttgtctacttgtttttgacaggtgctatttatcagatcatggaagtttcccttccattctttgtttgctcggggtttcaatatgaatggatattgatttttgtcaggtgctgtttcagcatcttttgagatgattgtatgattttttggctttatgtggttaatgaagtaaagcatatggatttatttgaatataaattctaactggcatttttaaaataaccccagtcaacttgattgtaatatattatcttttatgtagtgaaaacttggatttgctaacattttattttgtatgattgcaactgtgttcctgagggagattgccaaacagtttcctttctcataatgtcctcgtcaagttttggtgtcatgactgtgctggcctcagaatgagttaagcatcattcctctctccttttgtattctctggcaaagtttatttaacatggatattactttttccataaatatcttgtgaaacttactgctaaagccatcttaaccctaagatttcatttgtgcaaaggtttttgattacttattcaatttttaaaatagttcctgggacatttttcccccccggctcactttagctaagttgtatttttttaaaagaaatatatgcctttgttatacatttttgtatttttgacttagtggtttttggtgtcatgtccttttctggtgttttttatgtctgtcagacctttaatgatgtcctcttttacactccagatattggttgtttgtgctttttctctttattgctgctgttttgttttgcttttgtttttcttggtcactctctccagaagtttatcagttattcttttcaaagactagcttttgactttatggatgttgtttgttgaatatcgatttcattaatttctagtatttttatttctctatgttctgttttcttagggtgtattgtggtttttgtagctttttgatatagatacatagagcattgatttcagctctgtcttctaacatatgcttatatagctatacattttcctctaaatgcaactttatctgcatcccacaagttttgatacgtagtttgacaatctttgtctttcaattagtttggcccatttacatttaatgtaattattgatatatttatgcttaaatctatcattgtacaatatgaattataattatctcaactattctaatgcacttgtcttgcttttaatgtatgtttttagtgatatatatatatatatttttttttttttttcaccagcttggtaatcactattttgctgtttctttactgattatcagtaggatttcaacaactgtctttaatctatcacagccttatctaaattaatacttttgccaattctggcaaagtaagggtctgggatactttaactcttaatttatatactattttgacctgtatttaactctaaacttatctttaacatcacaagacattgttgttattattttatatagtcaagatttactcataaatttatcctttccacttttattaatttctgcatgtctgaactttcatctgtgatattctttgtttaccttaatgtgggtctaatggtgatgaattttctttctgttcaaaatgtgatttcaggttaatctttgaaggttatttttgctgagtatagaattctaggtttgtatttattttctttcagcactttgagaatgccattccattctcttctgacttccattgttaatctccagaaatgagctgtccatcctattgttccttctttggaaataatctttcttccctagctatttttaagattttgtctttggttttttgaagttcttctttaatgtgcttaactgtagttgctttcattttaatgtcttctttttgggatttgtaattcctaaatctgttgttttatactgttatgaattcttagacctgattattctcaaacttcacctcaacagatactgactttgccccagtctctccatttaatctatctgggatttagttatacacctgtgttggattagctttcagtatcccctaagtttcttaagttatttttgtgtctttgtttcctttttcttttgcctcagtgtgggtattttcttccaatttatcatccacttccctaatttgtgctttacctgcacaataatctgctgttaaactcatccattggattttacatttatttggttttcagttctaggattttcatttggccctttttcatagttttccatagactttcttgatcttatttttttctgcacgtagtgcagttattttggagtctgactggtaacactctctggccctgtggcaaggctttcctgcctgttgtttctctcatttttttttttttttttttggtcagattgtgtttatttctatggttggatattttaggttgcatgtctgactttgcactgttgtgatgatgggggacctgggatggtgacacattcttttcgagtggactttgttttccttcttgtagttgaccagaagtggccaagtttcttaagcatctgaatgcagtcaggtctggagctgattctgagttgggtttcaggccttcaaaggcctggtggatttctggccatcgttactcataaggcatatccctttgaggtcctacgcacaagctcatgaggtttattggggtcctttaattttcctcagtttttgtggccctatcaagggcctcttctgaaacccactgttgagtctagagaacaggctacccgagggtggggtcctgctccccgcggtccctgtttctgacctcggccctggtgttccacgctgccctagttgttctctgtgccttcacacagaaggctagggtgctttgtctagatcttctgaccatttccagtaggtttaattgaattacctgaataaaaattcttgaagttacattattgaaaacaccatgtgcttggagtactccaggtttcctaacctgttctttatactgtttatgttcttcgttttgtctggagtgaaaggatatgttaatatttggtgtgtttggtgatttgccttcatataatttttagattgtgaaattggcattttgcttttaattaatctgcactagatttgaagtttttccaaataggacatttttgttcatttgtttgtatttgaaatccttgtgttctaaaaagaattaaataactattaagtaaattcagtttgtaagtttatttttaatgtaatgaatgttataactaatgctaaattagaattgggatataatctaaactgtattattatgcctatattatgttgtacatttttataaatatttgctatttcagactagatatatttttcctaagagtacatagctaatgcactctctgagtttttagtttattcctctatttagctatttccaagttcttagtaattgtttttgtccataaaactaacacttttatcaattatcacagcattttactcttgaaataataaatgcactttaaatgttttttcactttaactggtagaatttcaaggtagaaggcctctgaggagggtttatattccattgtaggtctaatttttgcatcaggatttgaaagtgagtaccaaatctgcctgatggccctggctcctggcacattgattagataaggtggtgacttaatccccagggattgcccacaggggagcgcttccagacatggctgcagaggccttgaggagacggggcggcataggggagagcttccagacatggctgcagaggccttgaggagaaggaccctgcagacagggctgcacacacgcacgcctggtctttgcatgcagatccgggccctctcggtagtggacggctgtgctgtgggtctctgttcactccagggtgttctgccaaactgatcccaagtggaacccggctggcagtgttcttgcttctgaagctgcctagtgcgttgcctgggttgaggaccaggagcgcagctgagccctctggcttcacgtgtgaggaatctgagtatcttaggggctccacggcctgctgggcggggcccaccctgtggggttgctttccactttagaaagctgccttccgtagacaatagcacgcggtccccgtgggagccctgtgcgcggggctttgacttgtctggcctgtgctggtgacgctgcagtgcaggaggcgtgcgtgggacccacatcgcgggtgtgcgccacgggcccaagcactggggcctctgcctggggtccggcctcccctccacgcttctgtggttcgccggtagcccagggtgtatcctatgtatttttctttggagtagggaaaatagttgcttatcaaagaattgaagtttaaaatttaaatatcagctgggtgatttgtgccacaactaaccaacaaataagagtttttcagattgctaaaaagcagcttggtctaaattacttcctcagagtttaccagactcttccaataaaaataccatcttgaggctcacagaatatgaaaagacttcacttcagaaaacattttggatccgtttaccagcccaaaacaatccctgcgctgcatccgaagcgccgtccacccttaactggagctctggaatgttcctgctcccctctagccccgtcacaggcggccgtcccggtggttttcactgaggatttgggtggtcagattttattattaataataaactgtgtacagttgggtacttggcaagcttgtgtcggctctgcagccctcagagtgtggtcttgtggtgaggacgcagggccgcaggcccctgtggtggacgccactcgggggctcttatgtaagcggggcccaagccggcgtcttcccccatgaaggaggttcttgtctgtgcaggctggaggagcagtggcgggccggcgcgggggacacgaagcaccgccagcatctaagcatttgaaaacacggtgcacagcatctgtttattctcttgggttttttttaagtgaatttcttattgagtatctaataaatatcattacacttataaacatttacattacttttaattttaaataattctgcacttttatttattgataccaagtaatgcaattcatttgacagaacggtggcagttttcatcatgtttagcaagaacacactgtctttaaccagctaggttttgatttagattaacggcacttgggaatctaagacacggctcttcacataagctcggggaaggagcaggggcaggctggactcggcccgagcagtgtggagcgaatacagccccgctttctctcactgcggtccacacgcgcagccctgcagggaatggagggaggtcactgagcaagtcctttgctctgtgtaaaaatgacgtgaaaggctgatcctgaaagtcattaggtgtcctttccatgaagttgtgccttcctcagaggcaagggggtggagagaaaaaggagcactttcaggcagaagccaagcagaacctgccacagctctgtcgtctggactcgccaggcccaggccacggccctccgggagcacagccgtccctccccgaacacagccgtccctccccacctgccccgccccgccccacccagagctgctgtcctcctctctctgccccgctcagctgttgctcgctcattccttaggtctcgggtgcactctctgccccctggtatgggaagaacttggcctcttttatccaccgcttcatctctgctggccagaacgggctggcatctcatagagcctctgtagaagcctccatgcaggggatgagtgatactcaatgtgaattaagaaaaaaaaaaaaaaagtaaaagtaaaaattagggagatctgctatccatttgttgaatgggttttttcattctagaactttaagtgagaaacctgttgacagatgagcgtgtgcataaccagaagtgcagaaacggggtgggggtcagaatcagcccctcattttgaatactctcctagtaaagtctgaaagatcaaaagaagattccttggtggttagaaaggtcatgaatcgaagacttaccttcctcgtgtttcctgctggccaggcctatgctgggcatgggtggggtgtgaaccccagtcatgtctgccccccactgcatggggcatgaacgccagtcatgcccagcacccagccctgcatagagggagccaggcaggacccaggcttgtggccaagtcaccctttgccaccgaatggtgtttgcagaagcagggagaggacgtgggtcataaagtgggtcctgttcctggagtgcgcaccctcccccgtggagggccagtggatccacagtaacagctgtccctgggaactggtgttttgagcaggtaaggctgactgcactgagtttgggtctactggaaagtgttgagggcgtcctcgtcccgcacaccgagaacctgcttcttgtcctgctctgctgcctccactcaaggacggccgtgtagggggacctgcagggcagtcccctccaacaactggccatctgggtcctcatcctcactgtcgctgtcaccagcatcattttgcggttggactacttccctgcactgtcagcagcatgggtagtacccaaaaaaatgttatccgtgtaaaggcaaaaaattgaagttacccatttcacttcttatttcttttatcagtaaagttaagctgatttaacatactcattggcaaatttgccttctccttttgaaattcgccttctgtgttctctgctcacttatcttccccaccgcccggcctttccttttattcctagttgtggaggcagtttgtatatttacgaggttaactctctggtttatgtctgggtctgtttttccaaagttagcagcctgttgctgataatcttttaggaatgccagtgctcacatgcctgggaatggtagaagcgaatggtttccataagtgtgtgatcttctgaccagtccccttacagacagacagttcagctaaaagtgcttctaagtgatgttcgagtctaacgccgggtgccctgaaaaagcatccctcctgtccccccaccgccaccctacctggggcagtgctcaccgcagtcacaacttaggtgatgagacatcttcagcagcatgagctgggggacgtcacaggcacagcttgactcgggcaatgacatgattttctcagaccgacagagagccctgagcctgaagcctcatgcatcacggtggcccttcccggactcatgctggtggtcgtgtagttaatgtctttgtgtttccctggcttggctagtgcaggccccaccacagcctgggtagaccctgtttccaggcgtctcattgctgactgacccttgaccagacattaaagttccaccttaatgtaatgggagtggggttctgccgtagggaacacagaatgagcctaactaacaaaaactccatttgtgagtggcagcaaagacatttggtatgtgatgaaggtggcaaggaaaagacatctttctaatgatattaatcatttattagcagttggtcagaatatccatagagccttatatgccaaatccatttctgagccatcagagtgagtcatgaaaaaattcagcaaataaccaaatgaatgaaaacccagcaccagaaccaaggataaaattaaaatgatggcttattaaccactgaaaggaggaacaatggcagagttttaaggaaagggaaaactcacaaaggaaaaactaaaatagactttataaaaacaagcatttgaacattttacccaaattgtaaaaggaaacaagaggcagggtaaatgcacacacacacggagcagccgagagccacgaaccagggcgtccatgagacttggtaactgagccaacctcacctgaggcgcacctggccgcctttgtgttctccatccacagtcgggggatgagaatacctatttatagctctcatgcgaggccgaaccaggccagggctggcatatactaggctctcgatacagccattatcataagaaacccacgcaactccagtggatacaagtatgaaacacacacacacacacagacccacaacaccactgtgcacatcgccggaagattctaagaacacataagccaaggacatgaattatcttgcaagagaggaaatcggcgcgtgtccagtggtgctcaggggtgcctcacagtgatgcctgctggcttttggatttgggcaaatggtgatttgaggaccagcaggaggagcagctgcccctgctgcaggtggatgggtggttcagggggtcagcgtgtagagaagtttcgtttttctttttttcttttgagacagggtctaaactcgcattgcgcagggtggagtgcagtggcacagtcttggttcactgtagcctggacttcccgggctcaggtgattatctcacctcagcctcccaagtagctggaactacaggcacatgctaccacactcggctaatttttgtatttttagtagagacagggtttcatcatgttgtccaggctggtctcgaacccctggggtcaggcagtctgccctcctcagcctcccaaagtgctgggattccaggtgtgagccttcgggcctggcctatgtgtagggatattttggacagcaatttaccaagatgtgccgagggttagaatagtaagtttgttagatgtagtcactttgccaagatgtcctaagcaagtaattctaaaggtagtcagtgttacccactcataaatgttcactgcagcgtggtttctaacaaccaaaactgcctcccagtcgggaagtggttttgtaaacatgcttcactcacctcaaggtgtgtttttgaccattacaaacgctatctgaatattatgcaacactaggaagatacttaaggtgctgtaagaaggatagaagtactgtgtggttagattggagatctgaggcgagcagcctccgtgctaacaggccttgtgttcaggcggtgagagtggccttttttgccagttccctttaatgaggctttgaaaaagaatcaccgccacggaagaaaaccacagtttcgacttcggtcccacttggtgcagtcactctgcctgagtctgagctgccaagctggggaggacaggcgctgccctttgatgctgttggaagcagagccggccgtcatgtcggcgcaggtgtagaaggaagcacgcctgcctgtgagactggctttgtccctgcgtgatgcatccatttgcacaaagccttctctcttagattctgctttgcggtagcaagaatgcaaccaccacgctgccactgcctaattcagagtgttcttttatgtaagaatattaaaacttccttcagaagtgggttttgtgttagctaacaataagtctttcggatgattaaatctgcattttaaatagaatgcaatgatgtaaaatcttgatgggaagaaaacctctcattaaaacccctcccggccttggttctttgaggaagcgctcaggaggccacagcgtcctgaaggtgcatagccgtccccagcccttccctccctctgtggccccgctgccctgcattgctgctgtagggcagagccacacttcaccccctgctatgctttctcccacgccaggtgccgtggccagcacagaagtgaagatgaagttacaagaatttgtcctcaataaaaagaaggcgctggcccaccggaatctgaaccactgcatttccagcgaccctcgctactggtacgggtaagtgtgggtgtggggagcaccccggcctcctctctgggggcccagaggactgtctgatcgccggtagatttgcatggagccagctcttcacctgaggcagggaaggagggtgaggaattgaaaccccaagcacagtggtgctcggatgtgggtgacgtgttctgggggtacactcgtgcggcagccgtcctcacggaggggcccacctccagagtgacatggtctgggggtacactcacacggcagctgcccctgccctcacagggggacccacctccatagtgacgtggtctgggggtacacttccacagcagccatcctcacggggtgggcccccctccagagtgacgtggtctgggggtccactcacacggtggccgtcctcatgggagtgggcccccctgcagagggaccgagcagtgctccggaggctggtgcctgtcgttactcttggtaatgttgtgccatttttcagccacaataagagccacttaaactggaactcttgtctgaatcctctgtgctccgacagcgctcccacctgacgtttcaataattcttaggctagtcaggaagcccccgtggtacttctattattttatactaagaaaccctgccagggcccacgcaattgacagagaccacaaaaggcttgttcgtctgaggactgaagagagccgacctgccatgcaaaagaaggccttcggggggagagttcacagagcacagtgcgagcgagtggcgaggtgatgcggcttgaaacagtgagcaagggcaacagaggatcgctttgaaatgtagttttctgctgctctcaaggttcatttcatttctagaaaaaaatcccataagggagtttttgtaaatcgaaatatcagtaatttcgttggaaaaaaaatagctattctcaagcctcaaaatggacagctatgtgtagtgagacccccccacagctcagacgcgatcccccttgtttccgtggaggccgcccgctaccccgacacatcccaaaaggtgtttccagcacaggtggcccacgtcctccactctggcagccgctgtgcttgccagtggcacataagctgcactcacggcagacacaccgtctggatttgggtaactcgaccagggacacacaaacttgcaaggaggagtgagaccggcgtccatgggaggcagcacgtgacagcagtgacccactgggacctgagagaggaggtggcttcctgagaatcgctggcaaccggcacctgggagcccgctttgggggagaccccgatctgtgcccccagagccagtccactgcctggactggttgtggagaaactccattgtcctactggctggggcagggcgtggggttgcagggcagaaggagcaagggacaggagtgtggatcgtggttcagatggtgcccctggggcccaagctggaaagggcaggatgaggagccaggggcagggtgggcctggggcctggcggaggatggagagctggagtgcagagcctgctggaccagggcagggccgccttgggtccccctgtgaggcagccgagcaagcgagctttgagaagacagtgataggagtggggcaagcacgggcagccctttctgaagaggagcacagagtctgggaggctgcagcgggagttggaggactagagcagtggggctgctgggaagcaggggtcacggtgagcacagggcagcccccagagggtggccacggcagcatggaagaaggtggggagctggcgccccctcgcccaggagtcagtggacagtggacggggggccgaggccagcaggaatagaagccgggcagtggcctggacctgaggggaggacggagcagcaggcccaaggaaaggctgcacctgcagtcaaggaggccacgggagaagaagtggcctggggcagcctcagggcgctgagggacgtgctgagagacgggagatggggggcttccagggaggaggggtggcaaacagagtggctggggctgggaggactgacttttcctggaactccctgggtgagctgggtgttcaaggtgagtgtcttggcctggacaagggcggcgtgccctggctttaatggcaggggccggaggtacttcttctcagagggctctggggaccttcaggctggagggggaaggacttgatctcaagtcagccataggacaggtttgttttcctggagcctggtggttttcttgttttgccgtatttgaaccctgaacttaaacatcatggagtggtggcagaaactttgtcagaaaaccggctcttcatagggaaagaactgaaaccctgatcccagcttcacaccacgcatgattagttcagatgtcatagacctgagcctagacgcaaaactgatcaaactggaaggagacctagtagaaacttttcccaaccttgatggggagggggaggcaagatttcttaggtcgccaaaatcatcggctagataccaaaaacccaaaacatgatatttccacaaactgaaacacttctgctctttcaaaggcaccattaagaaaattaaaaagcaagctacagaatggaaggaaatattcacaatgcgtatatcttacaaaccgcttgtatccaaaatgtagagctcgttcctataactcaatagtaaaaagacaagccgcccacttaaaaatacggtcaaaaggtttgaacaggtacctcacaaaaaaaggcatggggatggccagtaagtgtggaaaagatgctcaagatggctggtcatcaggtaaatgcaaatcaaaactgcggcaagcagccccttcatacctgtggggatggccggagtgaaacaggccgggtgctggagcagatgcggtgtccctggacctctgtgtgctgcctgttggaatctgaatcacacgtgggaaaacaggcaggcagtttcctacaaagacaaatacccaccaaccctgtgacccagcaatgcttctccgtatttgcccaagacatgaaagcaagcaacacgacgagtcgtcatcttacggtcacagtcaccaaacagtggaaacaaccaagctatcaacaggggaacggccgcgcaaactggggcccctgcacacgctaccgtgcaaactggggcccctgcactgctactccgcagtgacaaggaacggaccgctggcgcctgcagcagcttgggggagccccagaggcacggtgcctagacaaagaggccacccccatgactccactgatgggaaattcagagtcagcaaagtgaatcgactgtgagagaaagcagaccagggctgggaggctgcagagatggatggtgctgtggcttcatcagggcgtggactctgtgggtgtttacgtgagtcaccgcttccagctttaagactgttgagacaagatggcaccttccagtgtggctgccacaagccacacgtggctcccgagcacttgaaacgtggctgggtccgaccaggacatgccatagatgcagagcatggaatttcagacacttggtctgaagaaaggacctacggtgtcttattaatatgtttatatcgattataagttgaaaggatggtttttataatggtttaatcgaatactaaaattaattccacccatttatttttatccatgttaatgtggctactaggaaattgtaaatttcacatgtggctcccatcatggtacatttctgctggagtatcctggcgtatgtggttcctcgttgtatttcttggaaatcactggtacgaatctgatgaaagggcaatggtttggaactgaaatggttgagtttgtatgaagctttattctacagtcaagccagtgtttagaagaaaacagtatttgcttttccatcttcctccggaagacaaggtttgcctttaggtgtggcatccgggttggccccagggccccgtgggggctgcacctcggctcctggcccagcgtctgtgtcccatccccaggctgcaggaaatgaaaggttgaaaaatcggaagataatttatggtcaggtgaggtagagggagcagctctgtaggttctgccctcagggctccgtggggtggccagtgtgactgtgtgagtgtggagtgtggccggggtgagtgtgagtgtgggctgtggccggggttagcttagtgtagggtgtgaatgggggatgtgggtgtgtgcagtgggtgaggtgagtgtggggtatgagtgtgaggtgtgggaaaggtgacaggtgtgagtgtgagatgcgggtgtgtgtgtgggaggtggggtgtgggtgggtgtgaggcatgaagtgtgggtgtgtggggtgtgggtggggtgtgcgtgtaagtgggtgtgaggtagatgggtgtgagtgcgggaggtaggcatgagtttgtgtaaggtgagggggtgtgggtgggtataggttgtgaggggggtgtgggtgtgaggtgggtgtggggtgtggaatgtgggtgtgagtagtgtgcagtgcaggtgtgagtgtagttgggcgtgagtagtgaggtgaggtgtgggcgtgagtgggtgtgagtagtgtaggtgcgagcgtcaggtgtgaaaagtgagatgtgggtgtgagtaatgtgaggtgtgggtgggagtagtgtgaattgggggcgagtagtagtgaggtgcaggtgtgagtagttgggtgagctgcaggtgtgagtgggtgtattgtgaagtgcgggtgtgtgtgtgtgaggtgtggaggtgagtagtgagatgcagatataggtatgggtgaggtgtgtgtgggtgtgaatagtgtgaggtgcaggtatgggtgggtgtgagtagcgtgaggcatgggtgtgaatagttgtgtgatgtgcggatgtgagtgttaccagttgtgtgatgtgcggatgtgagtgagagtaattgtgtgcggtgcgggtgtgattgcagcagggatagagcttcacttctgctcgccctgctggacgcttcttcgcggagggcacgcgtgtgcggtctggcctgggaccatgtgaccagggctgggcgggtgtgacctgccctgacggtgagggccgccctctcctggtgtctggagggcgggtgcgcggtggggcgggctctgcatggtgtgctcctggcggtgagctgggctatgcaggaggtgaggtcgctcctgtgaggtctctggatccatcgaggtggtccagcggggaggcgctggcagttggggggcagggcccagcccctcctgcacctgctgctctgctcgttttaaggtttgacaggaaagtggggattttaacactgaaagcacctcaagagatcagaatagtaagagaacgtctgttagatcttaaaccaatgtaacttttgcaactcctacttcactgtaagcaaatcctaccgttcaaatataataatttttattccatttatttaaatttattattatgtaaatactgatctttttaactcgtgggatgcatgtacaagtcactccgtgtttcccatgaaggaaaaagtgaacgcggaaatggtcccagactgtcacctggtgttgaagaagtttggaatcagccaagatcacattccccataggatacaatctgaaaatactatttggtagagaaagagtgttgcccccagaccttttcatgagattgtgagacgaggggtagaactacagggaagagaagggaggcttgcacaaggacgtggtcccacttggaggccacagcccctgcacaggtgcagacaggcgtgtcccagccctgcagtccgagcctgactgcatggtggaattccccgggaaacagcgagaagctgcttggggttggaggtgtgccctgagcagtgggcggggttggggcgtggcctgaagctgtgcagttttccggagctccctgagctcctcctgtgatgcacggcccagcaccccactgcccaggtgcctgggctcggctcctcaattttgtctatgagttcccttcagcacattctttgcactggtgtgctctcaaatatttaaatatacacctgtacccatttacaagctcccattcttaattcaaataactccaggtgcattggtgtgccatactatgtattcaaatagtctaaccaattccaaataagtaagtcggcaaatttgtttgtagtcattaagcagattacgcagtttaaagactcagaatttattccactcagcacagtgttttgagcaagactgagctgtcagtgccgtcaaaaaaggccttgctgatggtcatccgggtggcagcccacatccccgtcccggcccagggcccgcctcctccccatgtccgtcctccggccattctcctggcagacgattcctgtcttgctgcctggagggtgtggagttgtacccagctgttcatacaggaagtccctttcgtaggtcagctccctgggcacagggtatcagtagctgccatcctgttcctcccccagagagggaggtgaccagggtgagtttggtgaaggcacggatgacgatgggtgccttctgagagacagccccatgggcttcttctctccaggtggcagagagagtcccacacatcacagcgtttgttcttagaccgttttttgccccgtctcagctgcctatgaactcacctttgattccttatgcagcagcctactgttttcctcttcctctccccaccggggataggctctctgagtggccagtggtggccctggtagcgaactgactgggctggagccatctgagaggacagggccaggtggagaacagccaccaggaaaacggccagaggtgctgcccatcccatccccaagcactgctggtcccgcagaggaggatgtgggcatcggatgtttgcttgcttgtttagcatcctgtttgtttccatttaatttcagcttgaccctagggaaaaggtgtgtctgttgaggtggggctgaggtttcaagggaaagatcatcgtgtgtggcttctcggctgcagcatgcctggggcagtgcgctgggtaaactaaaccatctgtctttgccttctctccaggaaaacgcagcacagttcccttgaccagagttctccaccccagagcggagtgtcgacctcctataaccacccggtcctgggaatgtacgacgccaaagatgacttccctcttaggaaaacaggtcagtgcccaggcatgctgtgggccgggaggtctcctgcacgggcaccttccacgccacaagccacgcagggcccaccgctgtcttccacttagagaaggaatcacctgcagatttttaaatattttctcctttcatagagcatcgtttttaaaagatatccctaaacatttccttattatttatttcaaaagaaatgaacctaacgcatgtacaccactgctgaacactcaaactcactttgaaagcacactcagtttagttttctttcggtggtgtgttagattttgccacactgaggggcgtccccgcagtggtcacagggtgaagcaagttcctgttggtgggccatgtgccgtctgagagcaggtgagcctgtggccttcagggatggcgctgggcagtgccagcagcagggccttccaggtccccagagtgggagggaaatctttatgagaaagaaattcgctatgtcctgcaggggatatcccagctgggctcagagttatgtgccacagttctgtcctaagccaagggagaagggcatttaggcacaagcaggtgcctggaccatcttagaagcagggagaggcggctgcagcagtgtctggcaagtcaggacggaccctctgtgactttctcaggggccacggcagtggctttagataatgattagggtggctgtgggcagtgcgctggggtagcaagaagggcaggggccagggagtgccttccagaggctctgcccagagaattggtgagggcaggagctggagcaggtgctgagggcgggcagtgcctcatcccagatgtggccagtggatcctacaaactgcaagacagtgtgggaaatcccaaggcgtcctccctagggggcggctcttggagatgagagcctaggggcaccgcttttttttgctaaacaaattctctgttatccaaaggttttggccagttctgggcggaaacagtgaacatactcagtcacacaagggcttcttcactggaacaatgaggctttgtgaggggctgctgggagccgtgtcaggccagccacatccctggagcagagggtcatatcaggccagctgtgaccctagaggagtaggccatatcagccagccacatccctggagccgtgggctgtattggtccagctgtgaccctagaggtgtgagctatatcaggtcggccatgtcccaggtggagtgggccatgtcccaggtggagtgggccatatcaggccagccctgttcccaatggagtgggctctattagggtgtgttgaggcggtggtgtcccaggtggagtgggctgtattgggctggccatgtcccaggtggactgggtcatatcagtctggcccatgtcccaggtggagtggaccatatcaggccggccatgttcccaatacacctattagggtttattgaggcggtggtgtccctggagcagtgggccgtattgggtcagccatgtcccaggtggagtgggtcatatcaggctggccacgtcccaggtggagtgggtcgtatcgggctggccatgtcccaggtggagtgggtcgtatggggccggccaagtccctggaggagtgggtcataacaggccagctgtgacctcagaggagtgggccgtatcgggctggtggagaccctgctggagtgggccatatcagcacggccatgtcctctccaagtcaagaaccctgcaaacatgggcgcatttccatttgggccataaacctttattgggaaaagtgaacctagagcttctgctgctttgtttcatgggtgtgagcctgtggttcttactgatgcttctactgagaatggtcctggatttcacctggagagcgccctaaagcttgacagaaagaacggatttagagatcagtattttttccagaaagatgtgcccagtagtatcaggagagaatctgtgggctgattcttacaaatcgccctccaggttccctttctggggactgatgctattattaatcaaattccatcaacaaaaccaaagtccgcggtgagtggtgggccctatgctgggagagagacccggggaatggggaggcaaggaacatgcctacccggaagaaccctgccctagaaactggagcgatgccgagggtggagggtgggagcccggaggtgttgtcatcaagtgctgtgggttggatgtgtgctcattcatgtaatagctctgtgtgccctgaaacaaatgccttccgttcccctggcctccatttcctcatcagcacagtgggtctgcccacacccacatcctcacggctgtggcatgcacccatccccagagtctcctcttgtcctgggagtgatggctgtggcactcagactccagagccatggacccaggagggagcttccagcgagagcaccaagcccagcaagtcggcctcatgtggggacgtgccttcccagaaactccccatttggagcctttccaccaagggccccaggaaaggacagcacacaccacccatcccatcaggccccagagcagttcctcagcagctccacaccccaactcgcaacagaacagcagggatgggggagccctaggagctatttgcactggctcctcccccatcccaaatgtcagcactacctggggatcagcctcctgttctaagaaacagaaccagcttgagtacttcatagcaaggaaggctatcagcatgggagacggcacactgtcacggccctgccctgctgttcaccatcagaggcctttctcccataggcagggcccgcgccatctctcgtagattccgtggctgttggcttcccatgctgccttgtgtttctctggggatgattggaagcaaagtctccaacaccttctactgtgcttctaaccttgtgatagcaccaccctccaactccctgctttcttgagaacggaagagagaattctgttttcacactccgggaaatgttatttagaatacatagtgctccagaagaacttaattaagatttgattgcattatcagttttttaaaaagtcatcactaccacattaataataataacataaagatttccgagaaaacgtttaaaccacttaagagaatagtgtgtagttacacaccctgtatcacccttgacatctactttcaaacacatgacatcgctcattctaagtaagttatatctgtgcttttctgcagtaattggtaatatgaaacacgtcattaaattttagttatgaagttccttgaatgaactgaaatagtctttaataattgtgatgtagacttaaataattatatgattttgattttacattaacttatcctgacccggcacacagtttgcccatttctgcatctctaaagggcaattgtatgacctgtgaacatgtgaaaagctttgtcactgtcttgtgaattttgtcgtcaccccatgcattttttgcatgtcctttgctggctctgctgacaggtaacgcctgtaccagctcaaacgtctgacctccctggtgaaagcaatgcagtgactcctattcggagcttgggcatattctgggcattcacatcgcctgcacctgtgggcaggaccaggtgcctgagtttctacccagctccttcacccgccaccttgggacctggggaagctcttgaacctctctgtgcctcagtttcgtcatctgtgaaatgtacctttaaattgcttctctcctggagctatcatgagatgtgaattaattaatatttgcaaagtccttcgagtaggaccagatcgaggtgttttctgctcttgtttctctacgctgttagggtgtttttgatttttttctccatccaatgactggtaactgccagacccagcatccccccacctccttgcctccatgcctacagttcaggtagaaaccagcaggagccactcacctccacttagagaaggaccacaaggatgggaacaccaagatttatacccaaaatctggccagaagggcccatcttgctctgttggcttttcagggctcatctcctcgctcctggcttgccttcacctgagtgccatctcccaggaggagcctccaccgctgggcttgagagtcagagacctctacccagggcctcaggtccagctcttcctgccagaggccccgcccctttcctgggagattggcagcaggggtgtctccacttcagaggtcttcacctcccgccagatttcggcccagggtgaggtgcctggtcccttcccatgtctgtgcagcctcaagtgtcaccctgactttgggtttctgcagacttgtgaagccgccaaatgtgtatttttaaatatagtcagaagagacagaactgtgtggatcactgtcatggacataggacgctggatctttcctgcactgtgtgggtgtcagatggcttcaccagaaactgcatttaaacagagcctttgagtccatgttcacgctgaggaatggaggcttttccacttttaaaagcaagcaacgttttgtcattttgatgatgttgagggatcttagttttccccagtaacatcttcatcgtgatcttcttaaagatattagtcaccgtgtattttttataatgactcttaaattttcccctcatgtgactgctgatagatgaaaggaggccaaaacaactaactaactgttgtccagccagcacagttcgttcccatttgtcagcagcttcttgggcctgagcactgaaaaccgtgcactccacagcactccttgtccagcatcctcatgtgtccctgggcacatggtcctagcagcaaacactctccccagcatgtgttggggcccggctgctggcctgggctgtggcactgccatggattgtcctggctcttttaaggaagcaaaatcccagagctcacgtttggtgagaagttggtaacttcagccttgttccggcattctctagcctgcctggtagggcttggtccccacagttgggtgtgaattgggaggaggctgggctggtcctagggaccgaattctgttggcccctgtatggatcatggatctgggcagtcagtcaaaggtcctgggctccctctgcacttgcctccatggtcaggcttgaaaagtgttcatctagctctgccctcctcacctggggccttctgaaaccagtcactcaaggtcacggctgcccatgggaaacatccatccattgcttagatgtgcagatagggtgggttttcctccattttggggggaagctgtcccgcttggtgaggaagagcacagggcctgtggccaggctggcgcccacgacaccatatcctgggcagactagatgacctcccgttgtgtccgcaggtctgcaaggtggggcggtgggcatccacttcatggcttcatggttctttcattagtcaagtcccacagctcatcaataggctcatggctttcgccctgtgtactagtgacctgaataaagttacaagtgtttgttcttatctgtgtgtagagtaggctcagggtactgtgaaataggacagagtgtgttttccaccctcacattcatccctgagtttgggaaggggctctctgtttgcctctgaccattgcttgctgtcccttgttctaatgcagtttgcagaaactgctggagaggggtgggaccaggaagaaatgggcagtgcccacacttcctgctgctgtatgtaaaggtgtaatgtagtacatacttcaggaggtgcagtgtggtgagacttcctgctgctgtatgtgaaggtgtggtacatacggaggtgcagcatggtgagacttcctgctgctgtatgtgaaggtgtggtatatacttcaggaggtgcggtatatacttcaggaggtgcagcgtagtgagacttcctgctgctgtatgtgaaggtgtggtacatacttcaggaggtgcagcgtggtgagacttcctgctgctgtatgtgaaggtgtggtacatacttcaggaggtgcagtgtggtgagacttcctgctgctgtatgtgaaggtgtggtacatacttcaggaggtgcagcgcggtgagacttcctgctgctgtatgtgaaggtgtggtacatacttcaggaggtgcagcgtggtgagacttcctgctgctgtatgtgaaggtgtggtatatacttgaggaggtgcagcgtggtgagacttcctgctgctgtatctgtgtttatgtacctgtgtgtatatctgtgtgtgtacctgtgtgtgtatctgtgtttctatgtatctgtgtgtgtgtctgtgtttctgtgtgtggggtgtgtatctgtgtttctgtatatctgtgtgcgtttctgtgtttgtgtatctgtgtttctgtgtgtgtgtctgtttctgtgtatctgtttctgtatctgtgtttctgtgtatctgtgtgtatatctgtgtatgtacctgtgtgtgtatctatgtttctgtgtgtgtatctgtatgtctgtgtatctgtgtttctgtgtgtgtatctgtgtgtctgtgtgtgtacctgtgtttctgtatgtatctgagttgtcttgttaacaaaaatacccattttgcgttttctcctctacctttatttttaattaatattatatggtggccattattccatttttacgtatgaagctcaacgcctttctctcaagtagtctaagacatagatataagttggactgttttctggttaccattttgccagcaactttgagcacctttcctcactgtgttagtatttctgtaggaaaggttcctgaaaatggagctgctggttcagagtatgtatattccaaaacattgagcaaatgataccccctccccagcagcctgagagtccattttccccaccccctccacgagcaggcgggatggtgttgcagttcattctaggcaatgtggccagtggtgaagatggcgagcctgttggtgtttgagtgagcagtgccgtcaccgtcagtcaagggcgggcatggctgtgtgcttgccccctccccaggagcacgtgagcaacgtgcttcaaagtcgagggtggctggtgccccggagctgggcagcggggctgccctgagcaggctctgtcttcagagccaccctgtgcccagcatctggagccacgcagggcacgtgaggcggttccatcagtgctgaatggaggttgcttagcggcagtgcgttcacctgttcttctgtggggcatcgtctttgcttgttcctttgtaagtactgtttatatgttgtttgcaatgctgtgttttcatgtattacagaagttagattccagtctgtcatttgtcttttagaattatctttttatttatttatttatttatttattttgaaacggaacgtcgctctgtcgcccaagtgagacaacctccgcctcctgggttcaggggattctcctgcttcagcctcctgagtagctgggactacaggtgccactaccacacctggctaatttttgtatttttagtagagacgggtttcaccatgttggccacgctggtctcaaactcctgacttcaggtgatccacctgcctcagcctcccaaagtgctgggattacaggcatgagcctccatgcccggccagaattatctttttattttcaccgaagtaaataaacgtacatttacatagacccccatgatgttcatgataggagaacggccgtccctgactgcctgtcccgcctgcgttattacagcgtgtgtcacgttcacagcagaaccagagtccacctggactgcattcacctcgtagaaatttttccggaagttgatcatttttttcatttgcttagtttcacacctgcctgctatcaattcaggcccacatttcagcagacctaggagaccctcctctgcacagcaggccgcctggtgcttctggccccactgcccggtgcgtgtgaacggtctgctctcccggcctggcccccgcctcctctcccgggctccgtggcctcctttctgcggcctcgccatcttggtcatgcacgtcttccagtggctcttggagaagtcgtgcatggagcatgagtttttggagtcctcatttgctggtaaatcactttattctgtcgcactcttggatgatcagttggttgggacgggtttcctgcagggttttcaggtcatcgtcttgccctcgatgtggctgttgccaagtacaaaactgttctcaaggccgagcctttgtccccagagctctgaagcagtttgggatcccgcaggtgggggattcttggcctccgtgtccagctcctcttcagctggacaagtaggcctggaattgctgctcatgatttctccaccctgctgattctctcttctcctggcgtttccagtaatttgttgtacgacctttgcactcccatttttcatctttttatccttttattcccccttctgacaattctcaactttttctccagccccttccttctgcactttagtttttgtcctcttgtctttatcctctttaatatttcctttggtgtcactttaggatttcagggcagagcagctggaagcaggtgcctccttctctctgcagttctgcctgcccgccctgtcccacggcgatattgcgtgcattctctgctgctacatcaatgggttctttcctcgctggccgctggacattgcatcaggcccacaaagaaaccgccctccacactggtgccaggtgcacgcctgtcccctctgtaaacccggcccctaagagttaaagcgttccggctctgagagccgcttcacctgcagctgactctcaggatgtttaagttggaggagccagcctgtgtctccatcagaattgcttctggcagaaggatgaaggcacctgctaggcattgggcactgcgttgaattttaaggttgtgattggaatgttgtatctccttaattagtcatttacttgattggcttcaggagaaacaatcccacctgctccctgttccctaaggagcagacactgcatttggaagtacagttggcatccttcctgccctcacccacgcttggtgggagcaactcttccatgaggcctccggcctgatgctttggttctgtcaatgtacctgcagccctcttaggggtgggatccagtttctgcagttcctccacctggccacatcgtgcctggaatgagtggaaggcccgcgagggcggtgaaggggctgctgcactgagccagtacacgtgcagcctcgaccctcacagtcaccaggtgccggcttacctgcatcttccactttggctgcctttggcagaattattggagttacaggcattgtgcaagctttaagacacatgcatttgaagggctgatattgtaggtccctatgtcttaagtcaatctatgagatgcccggcctggaagtaatgagggagggcaggaagcaggaaggctggccaccctgaaagcaggcagtgagccggtcctcgtggtatgcggctcccccggctgccttctgccccctagggcttctctgttctccccaggaaggccacttcatgtgccccgggtggtctccagcatcccccttctctcctggtccacgtgctgctgctcaatcccctccccgagccccgcatccaaaaccctgcttgtctgataggttctgcgggggagtcagagtgctgaatagcccacggggcagggacgagcggagggccccagcctcatgccatgctgtccctggcagtgctggcatggtgtcctggagcctcctggtcagctgcagccaccctgcaggcagagtcgaccagggacgtgcagtcggctagaatcagggagcccaggcaggtgtgcaggctgggaggcagggggtaaacaggtgaggggacagaagaattccagatggtgagaaggctgctgtgaggaagacagggcagtggggctgtgatgggggcagtggggctgtggggggtcagggcagccttgggaggggcgtggagcagaggcctgtggaaggggagaggagggaaggggaggggagtggagggaaggggtggggtgaagcagccaccatgggactctcctcaagagtctcttgcacaaagagtctggagtgcccggcagggctgtggaggatctgccgcctgactgatgacctggtggcagcgtgatgacccccacagggcctgggggaggcggtgcactgggctgcagtaccacagccagtccatggtagcctggagtgaccatgtcatgcccgcctcccgatgccacgtgtcccactctatgtggcagggcagccactgaggaagacctttcacacagggccagggaccctgtgctcttctgtgggcacacacagcccctgcctctcagaagtggctcctgtcccaggcccggggaatccctgcagagcccatgtgggtttcagtggagatctggtggtgagagaagaggtactgttttcttgcctagtcatcagttgggttttttggcttgttttttttggttttgttttgtcttttgaataatggcaagaaacccagcgtggaaatagaagtggagcttgtgaatctacgcttgcctcggtcggttgtgttaggcacagaagtgtgccctggtcagtagcccgtggagaggccggcttgtggctgaatccgtcatctgtcgtcatccaggtcccccgtgccacagcacagaggcctcgctccctgcagaggcttagagtctggtaccttctcacagcgcctctctggtttctctgggaaggctgttttagggagcttgcttctcccacatccttccaagacctgcagaaaaactgtccctgactcgaagccttttccaaagtggagaaggtcctgggctgtctgcacgtcccaaagagtgaagtcatgttggtccccatcgcccagccacatcagtcctgcttccaggagaaactccgtctcattccttgttgctctggaggcggtgcactgcctgttccagaaagattaagaacagcaggagtgctgattctttaagaagaggtaaaatctccctaatgtgcaaatctccaagtggtagaatcttgaaagtagccaagtaaaacctcagaactcaaaggcttgtgtgacacacgtctccgtggcggtattcttggctctgttctggactctgaaagccgataacctctcccgggtgggtttggggatttctttgactccggtcgctgcctttagatccctagtgcttcccaaggcgggcctcgcgccggaggtttgggttccagatgcagatgagttggggaccacggtgggctgaaaggtgtagattcgcaaatggctctgtccacacaggcagagctgttcacagaaaccgacccacgcccagtaccttcaccctgtggtcagatgaaaggtgaagccggcgcagatgttgggatgggctctgctgagcctccccaggtcggggtggggatagcagcctcacgctctggaggcctcactgactgacacagctggggcgatgcatgggcgagcaagaaagtgtgcaacgtggacaccatcctcacatccctgggcccagcctcacatccctgtcagtctttctctgattttagagcaacacagctatgaagataggggtgtattatctagaagagcattagttacgagacatcgccattaagtgacttcacacctcagcagcctcctgccacgcccagtaaatcagcttgtcagtcctgtttccatctcctggtaaacagtggtggcctgattctgtgaagacagtgccagcgcttgcataatgctgtggccacagaaatttatccaaagcaccagattcgttttattcattatttgggactgatgaatgggatttagaatcccctgcttcgtgagctccctgcgctctcccctgcagcaacacggcagtgttgagcaaatatttactcaccagagtgcgtatttttaaaaaaccaccaacaggataaccttgagccagtggtgtctgcctggctgtaatgacatctccttttcgtgcagcttctgaaccgaatctgaaattacggtccaggctaaagcagaaagtggccgaaagacggagcagccccctgttacgcaggaaagacgggccagtggtcactgctctaaaaaagcgtccgttggatgtcacaggtatgtcggctgagcaggtacacccgccccgctgccctctctgccaggccttcctgccataggcgatttctctcaggagcttctgaaaacccacgtgtctgcctcacgctgtcaacccccagtgtggtcctgttcccatggcgctggaagtgccaggcccaggggaccaggtttgatgactccggcatgtctaagccgggccctgctcctggcattagtgactcagagctggttctaggtgggctcaggtgcacaagggtgccccagcttggcactgcgggagatgcagtcaggagcttgagttgaggctcctctgaaggtgggtcttaaccagtcccaccctagtagtggtgaatcgcgtgctctgccctgttccgctgcccctgagcagtgtctgaaccaccggggcattttaacgtcttcccacgccagagcacccatcaactgagcagggagggaagcaaggagtgaagttgcttcagcttggccctagtgacgtgtcacggttggccccatctagtggtggacacgcagaaggacaagactgagcagacccccatcctgaaggctcacccgcccctcttgagggtacatccccatccagaggaccacccattcccaaccaccaccagggtacacccctcaccccaccactcctgaaatcacagcaccaggataaaggagctgcttgggcatggcctggatagaggggaggcagcggacatgtttgcacaacagaaagtgttcaacttgaaggccaaggctcatggtaggtggtctgtgaaaggcacagttccactgagcaggctgttgacctagggaagccggggaggggctcctggtgccatgccccgtgtgtgcgagcattggcatcacacagggactctgcttcagcagtgaggtgagagccagacctacccgctaaatacagggccctgcctgtttctcgtgccctgtcccctctctacttgaggagttcctaaccacggtgtaagggtctgggtctgaatatttgtggatttctattaaaaagtatctgacatcttcatgcccaggggaactccatatgtgtcatttctgatgtaggtttctttcctctggccattatagtacacacagaccttttctacagccatcaagaaatgttatgatctaaagtttcactaagtctagctgactggggaagattcagttgaaacgaggaatcatgtgagttaaaagctttcaaactccaatgcagccttttttcctatgagcagtgccttgcttggccagctctaatggacacgtgaacctttgcgtttttttgttgtttttttttttaaagtgtgcagtgggtgagacggagtcttcagcaagcttcttctgagtgttaaagctggtgttcctgttgtcacccagtgactactgagtgctgtttttgagtcagcactgggctgggcgcaaaaatagtgagacagagtccttccctggaaggagcttgtgatgtaatttgagcaagcagcacatcacacgtgagaccatccaggagccatgcgtgacagggcgtgatcagtgctgagctcacccaggagtcatgtgtgacagggcctgatcagtgctgagctcacccaggagccatgcgtcacagggcgtgatcagtgctgagctcacccaggagtcatgtgtgacagggcacgatcattgctgagctcacccaggagccatgcggcagggcgtgatcagtgctgagctcacccaggagtcatgtgtgacagggcatgatcagtgctgagctcacccaggagtcatgtgtgacagggcgtgatcaatgctgagctcacccaggagccatgtgtgacagggcttgatcagtgctaagctcacccaggagtcatgtgtgacagggcatgatcagtgccgagctcacccaggagccatgcgtggcagggcgtgatcagtgctgagctcacccaggagccatgcgtggcagggcgtgatcagtgctgagctgtggcataaagggagcccgtgccgaggcacctaggagttgggagatcagcacaagccactctaagccagcagagctctgcagaaggtggcatttgcactgggacttggcgggtgagtggggctggggcagagaggcagagggttgtgcgtctcctggccggcactggtaccagggagctgccacgatggggaggctgctctgagtggagctgattttcagaagacaggtattaggagttctaggcggggtggtcccacacggaggagtggagccgatttccagaagacaggtattaggcagggtggtcccatatggagcggtggaggcagtcgcggttcttggcagaaagagagccaggtggatactctgctttttctcagtcactaattaattgggtgtctactgtagagcacaaagaagaaaatgcattcccatacgcactctgtccagagtgaatcctgctcactctgcacattcccgcagcccgtgttctgtgccttcctcacacctgagttctctcactctgcacgccttcccgcagcccatgttctgcgccttcctcacagctgagttctcaccatcttcctgcgccatcctgcatccctctccactcaatttcagccacacgccttttgagcacctccaatggtgttcccgttttgctgatctaagtaatactatgaagattatgcatttatatgaattttcttagacctattcctggaagtagaatgcaaaaaaataaaattaacctcgttgagttaaaagtgggtggaaagttacacatataatttttaccgccccaaaaagttgtccggactccccaggcacatgcgtgagggtatttatctgacgacacagctgggaggcacccattacagggaagatctgctggatcttggtgtgtagctggagacagcttgacatcagagagcaggggtctagggtgggctacggtgggctgcaggtggggcagagatgggagagttggaggggcctggagaaggcgggtcctgctttcttgagtgaaatgcaaacactggctcagcccaggtggcattctcagaatgcccactcacagtgcaaataacatggcctcggcagcgggagaagcctacctctggagttagtgtctggtggaagtgagagggtgagagggccagggaaagaaagaggatggggtagggtcgggacccagtcctgtattcatgctcaatgcccaggacagtgagctgaccccacactcttttgagctccaagagccatggggagcggctggtgtagggcttctgggtggacaccctggtttgcccttgggaggtttagactgccctgctgttgagggcaagatgttcccagggtgttcctggtgggcagcgtggtcaacagaggaggtgcgccttcaccacccagctgggttaactctggtatgcagacgcccatgacagttccctcaagccacgtggcctgggacgagtgatgttgctgctccatgcctccatctcctcttctgggaaacggggtcataatggcaccttcctcaaacagtgactgagagatggatgagctaataaaggcaaagtttggaatcaggtctgccaggttgggggagctgtgggtggctttacctgttcccccaccctcctcatcctcctcactgtggctcggggctatatttgcagagtcaccacctccagcaggcgtggataccacgtgagtcagcatgagtgggcacctgcgtcctcgtgggctccaggaggacgcgggcagcaagcagaccgtggaggaggctttgctggggatggctccgttgaggggctgcttggggaaaacatcccttaacctcccctccagggcccccaccatgtcccttccttctgacctgtatgcgctgcgcatataggttggggcgaggttctgagcacccagagtcgttgctgaacagcagacgcctagagttctcgaggcaaatgggtcacattgtgttttctttggaaagctttaaccagatgatgccattgttaaaatgccgttaaactaaacatatgacaagccaaacaaatccttgtgtgaatatcgagagcctcagcggcctcccacggtggatgtgtgtgcccaaaatagcagcagaccccttcagaggtgaagggatctttggattggacgtggccccttttggaagtcacattcagtcagagcggaacctggtctcattaaccagggtcaagccgcaccgatggttaaagatcctctaagactgtccgagcgtgtgttttccagtagcacggatagatctcaggagacactggctatattttcccctggatgcttgctgctatgtagggaaaatgagaggattcagctcagagtgaacactaatagtaggttgctttattttgaactaagctttttatagtgagcacaggaaagctgaccttttgcttttcaaagtcacttagcttctgcattttctggtcttctgttgttaggtcactaataagtgtttaaggatttatctttttggtgtttaaaattgtcttgaaaatcaaacgaggtataaaattggtaacgtacatgtcctagaaaaagtgaagtcagtggcaaaactggaaaatcagaaatcagcatcatactttcttttttgaaaccatggccatgttctttttgttgggacttctgcctgtcgcaagctaacgagcaggtccgtggaaggcaccgggcattcgggccacaggtcagcacggccctccctccgcatggagtaacactcaccagggtatttctgcctccgcagactccgcgtgcagcagcgccccaggctccggacccagctcacccaacaacagctccgggagcgtcagcgcggagaacggtatcgcgcccgccgtccccagcatcccggcggaggtcagtgcgaagcgtttgtcctgtgtcctacggctagagtcggactcgggacggatgagcttgaaatgaccccactttgcacttgcccttcactcttcaccttccaatttggggtgagggaaagtggcctgtgagccatcctaaaaaggacgcagttggaggttactctcctgccttcctctcatcacagacatctcctttcattatgaacacgctagttccaggcacgtcggggacagccctgagcctggtcctttctcctgacctcttccagagcagatgtcactagatggtgtcccagcacaagcccacgcatggcaggtgctctaggtggacaggatccctgctgcccagctcgctgtggtcgccagtgctctgagggtggctgagaggccgtgggcacgtgggtatagttgctaagtgagacttaacattttttattttgtattgagaaatacacaacacgatgtcggccaacaaactatgtgtcagggccgactggagcgtcacccgtggtcagcatggcagggccggccaaagccacagagcggggaacttttccaggcatcacgggaaccaggcatctcagaccgcagagctcagcacccctggtcccctgccttcatcagaccccaagtggtgccacagtctgggagggacattggcaagctagagaggagtcaggggacgcttggagtccctaggtgggaaagatgtcagagacgcaggagctgagtggcaaggcagggaggagtggcgcccaggctggccgagtcgcacactgaccatactcggaggctttccagggcagcaggtccgaggacctcgctccgtgttccttgagctcctttgcgccccctgcctttatcccacacgtgtcccgagcgccttgtgccaggcccagggacagaaccaggcaggcagcaaggacctgccccacactccacacaatgccccactgacaaggagaggccacccccagagcacggggaagaagagagaggcagagagaggcagtcccgcaggctgagtggtgccctgggcctgggtgggcctgactgcagggcaggggtgggaggggtacgctttagcagtgagttttctgatgagttgagctggaaatgctgtgtctgcttcatggggcagagttctactgagtgggaggttctttctgaattctctccaacttacagaaggctataatttattaaatatagttattgactttccttcttaaatatttagaaatgaatcctgcccttccaaaggattggcaaatcttagctgggatacagaggcatgagtgtttagcattttcatttcaaatttcaagaccgtttatgtataaacatttttagagactagaattactgctcagaacgaattttgccctttgtctccaggctgcttaatccccaatttctcttactctttctacttcatacatcgatttcttttattacctgtcttcttcagcctgccaacttcagtacttatttagatgattagaagttttaacagtcctctgtatggctgtggtcatagctgaggtctaccagtaataagccttataatgcaacctagaaattacttcctgccctgaggttaacactggttgcatcttgttgattgtggtcctagatacatgtttttatttaaaatgaggcacttatgtacatggtagttaatattggaacagtgccttgtttgggtgggtctgcatcattccagttctgtgttaatttttagaaatcacgatacgtaaatgaagctactggaaattaatagaacatgtagaaggagttacaggaaataccaagaggtgccattgttcatgttccacatcagatgttcattagagtgggcacgggcagcctttgcatgttggatcacacccaggcgccctttctgggtttcagtatctctagagttggacgggtctgtgagaacacctgtgcttcatggccaggggctggctctccgttctcacgtggtgcagagtgtagtgagcttgcccgtcagagggggtgtctcgagtggatgaggatgtggggggagcaggggcctcccagcctggctctcagcactgccttttctgttcaccctggggtccctagaaacactactgtaccttgaaggccccctggacccagggaagcccagtgtgccgggcacctcctcctctacagtgccagggaggcccagagtgccggcacctcctcctctacaggccagggaagcccagtgtgccggcacctcctctacagggaggaggcagggctcagagagtgagaggaagtcgcccaggtgcgtaaggggacagctcctctgtggccgctgctgctgttatttacacgcgtgcctggatgctctgacctcaggcccgcggactttccctctgagcacatgctgagatgcggtccgggggcgccagcctcagaatgcctcccgcagggctcggccccgaggcagcagatgccagaacgccctgcgatttctcaggtggaccagtcggcatctccaaggaacaaattctcagaagcctcctttagttccagaaatgggcttaaaaaaaaccttgcttacaaaggaaatgaaaactttgcaaacattagaacgtctccttattttgttcccaaatgataacacaagcatttcctctacagcataacttactgataattctttaacttttgacaaaaaaaaaattgcctaggaaaaatgttttcctcagtagccctttaatcattccttacacaatgtaatatgtgagcaaatctaaagggagttgcagggtttcctctggggcgaggtgcgccgtgagtttgctcctaagtgagaaggccgggctttctgttctgtaggaacagcctgagtgtaagtgtttgtcaggagaagcgtttcttcctatccccaatggccagtcatatgtctttggggaaatgtctcttcagatccttggcccacttttatactggctgcttcaggttttgctggtgagttgctggagttcccgcatgttctggatactgctcccttgtcggatgaatggcttgcacatgtttccccttcccacaggtcgtctcttcactctggtgattctcttcctttgctgtgcagaagctttttagttgagcagagtcccagttgcctgttttcgtttttgttgcctgtgcttttgaggtcttagccatggatctttcacaatagccaagaggtcgaatcaacctcagtgtccttcagtggatgaatagacagagaaaatgtggtgctgtacacagtggaataccatgcagccatcaaaaaggatagaaccctgacatttgcagcaacatagatggaactagaggccctcatgttaagtgaactaagccaggcacagaaagacaaacatggcattttctcattcatctgggggagctaaaaacgttgctgtcatggaggtagagagtataatgaaatctgttatctattcattattaacgttagcttctggcaaggggatttctatctgccaaaccccactaactagcatgattacaacaacattttattccttctctttgtttgcccattcattcagcagacattccttgagtagctactgtgtaggggatatagtggtgataaactattgtcctttttagcaaaacacgttcattctacaagcaaaaagatgttaaatatcacagtagttcaagtccttggagactgttgctgctgactcttcctgtgtggccttctaatctttactcctggcttgtgtttgctttatccaagcccattctttaaaaggtacatgatctataacctgtttttctaacttaatgtatcataaacaagtgtccaagtaatcagctagatcgttcccaacccccagagcatcccggtgtgcaatgcccctccgttctgttaacaccaaggtgtcggggaagccgcatagctctgccatgcctgctgggtgctcggccctgcagcggaggcttcatgggcatcaggccatctccttatttcttaacgttacatcccaagagtggagctccagcatcaaaggttagacagattttgaaggcctttgacatagattgccaaattgtcctgcagaaagggtgccactaactgatttgtgattcacccaacagtgttcgccgttcctctaggccaagatggtattaccatgtttcaaaagtgtttgccaatttgttgggtttcagaataccttttttgatgaccatgatgtgttttcctgagcgccttccccttcctgagctctgccgtcactggtcctcaccgcgtgcttttctcactgttagttgtttgatttgcaagctctctgtgctgaccctcgtctgcctcatacatggccagtattgtcatcattgcccacctttcgtagaggcagttgttttatgattttctctttatttttaatttttgtgggtacataatgtatatatttgtggggtacatgagatgttttgatacaggcatgcaatttgtaataatcacgtcatgcgaagtgtgggatgtccatcctctccggtgcttatcctttgtgtaacaaacaatccaatcatacccttatagttatttttaaatgtacagttaaatgttatttcctttttgttttctgcctttgatgttatgtctggaaagacattgccaactacaaaaaagcattgtaaactatattatcctagaaactgcaaaacggcattgtaaactatattagcctagatttccttctaactgttctgtggtaaataatcaaactgaatagaaatcaacgagatgatgctggacaaggtgacagaagaagaactcgtatcgggaggaggaaactggagtggtgaattgtgctttcatgttgtggcacgtgttgaaatctcatgctctcattgctgtctcatttgttacatgtacgtttacgctcatatatcagaattcagtgcaggtgttttcatcgttgtttttcttggtgtatattgctgatgtttggccgtgacagactgtgatggtcatcgtgtgttctgtccccagacgagtttggcgcacagacttgtggcacgagaaggctcggccgctccacttcccctctacacatcgccatccttgcccaacatcacgctgggcctgcctgccaccggcccctctgcggtaagtcagcccccgtgggtccgtgtggtgtggggtggtggtgatgggtccttccacccgagcatcctggctgtgctttccagggcacggcgggccagcaggacgccgagagactcacccttcccgccctccagcagaggctctcccttttccccggcacccacctcactccctacctgagcacctcgcccttggagcgggacggaggggcagcgcacagccctcttctgcagcacatggtcttactggagcagccgccggcacaagcacccctcgtcacaggtgagcacaaatgggcctgggtgcagccaggctctgaggctgcccacgctctggatggtgccccgccttcgcctgcctttggaggagacaggaatgcacgcctgtcccacccccacagttcccaaacacacatccccatcacgtgatgtagccaccgtgactgcagtgaaaatccatgcctcactcccagagtcaggtagatggagtggaaacagaagtcacttcccctttctcaccttttgggagaggccaccggctcttgcgatttgggtttctgtctggaccaagctgagccagcgctggaagcccagaaccgactcttgtggtcagtttgtgttagcgaacttttacaaatgtgcactgtctgggggagtggttacatttagaaaaatacaatttagaggaaaatgggaacgtccttatgaaattacatagcaacagcaatgtgaaagtgtcacttcagaaatgagggcacaccggccggacacggtgactgacacctgtaatcccagcagtttgggaggccgaggcaggcggatcacgtgaggtcaggagttcaagaccagcctgactaacatggtgaaaccccgtctctactaaaaatacaaaaattagctgggcgtggtggcgcacacctgtaatcccagctacttgggaggctgaggcaggagaattgcttgaaattggaaggcagaggttatagtgacccgagatggtggcactgcactccagcctgggcaacagagcgagactccgtctcaaaaataaataaatgagggagcagctacctacccccttgccgtgcgggtcatcgttgtacatcttcatagctttgtgtttggcttcctggaaacctgttgttgccaattgaaagctgaaataccctcagagctgcacctgtgaaactctggcagtgaacttggtgaaaactcaggggcttggcgtgttgtaggaggctgcgctgcaggatgcgtggggctaggggctggcttgggtgggcttgggcctctggcttgactagtctggtggattttggtgttttcttgttttgtgctgcccatgtgtctctgtttagacagagaggattccttcttattccttctttgcccagaagccaaatggcgcaatctttgttttgtgcctgagcccctttctgtttgtttctccagaagcttgaattcgtgtccctgcctgtccagagcagaggagcccgtggtgtaacgagggagggggcagccctcacagtgcctctctgagctgcggccacagtggcaggcacgcggatctctctggaggaatgtatctgaggttgcgtctgagtctcttggatgctctagatcagctggcacgagtgtgggtagtgaaggacacctgagtttctcgcctgtctttaaaaacgtaaaatgtgcctgatcttcaggattcctgggattcacttcgtcagagatgtttgtcacttatcttctttccttctctaaatcagtttattctgcacgattaaatagcatgcgtaatcttgtgtatcaggtttttggaaaacagcctttttgatagaacctggatatcgagtgtgcatgggtctcacctctctgagaaacgcactgaactcggcgttgcttcttccctgtgtgcgctcatccctcttttcctcccaggtgcagcttgctcgttggcatggggacctgcccaccgtgccctgcccaggctctgtgccaccagggggcccatgcatggttgcccagcttgctctggccttgctttacgcctgtgcccagcaagcccctccagtcctatgccgccacctccaaaaccctgcaagccccttctctcctgcacagcctccccaggttgccagcagctcatcctgcaaaccccctggcagggagcctcggagccagtgtcacgtgtgcagcgtagtgcagccacacagccgcctctgtcccagctttctcctgctccatgaccctgggaagccgcttatgctctgtgtgccttgttttcccatctaggaagtggggatactaagcggtccgcccccgtgagcctgatgagggttaagtgggctgtgcactcatgtgcccctgcaggtgttggcatcattgttgtagtcattgccttgttcttaacctgccacctcccatgctctctcactcccccagccagcccctgtccgtcctcagtgtctcaggggccctcccccagccccgccatgagcagggccctcatttggaacccgctgggattgccccatcttcttgtgggaagaagcctcctgtgcaggttcctcccctccggtctgtcctcctgtatccaccggactctccttgaaggcctggaggcccccacgctgtctagagcagtactggccaggtcaggagccaccagccacggggagctgttaaataaataagtcagaattagaattcagtttctcagtcacatgtgcaccacatccagtgcacggcccacggctgtcccctgaatgttctcattgtcacagaaggtcctggcagggcggcactggcctggagtgaagtcccagcttgtgagcaggaactccagccttcctctagaagcctcgtttctcttccctagtccggtacagcagccaggccagccggctcaatgctggaccagaccgcagccagcccccagagccagggctctttcccagggcccttttccccatcaggtgtggttcgtctgccccctcatcccaggcttccatccctgccccagccctgccttgttgctccttccctggatcacactgcatcttcgtttccatgttctgccctttcctgcagtttttgacgaactcttgcttgagttggtctcctggacagcagtgcctgtgttttcctggcccacagacagacccaccttatcgctggtaatcgtggtgcataggtgtataggatatcaaagctagaacagccctccagccacaaatgctttgaaacagaggcctctgtgggtgaggtcactgtcagagaccagaggggtgagccatggtccagggtctcccagagctgcctcctacacgccacatacctccagtcagcccctttccgcaccgctccgggcagttcctcgccagtcacaggctgggcgtgcctcttctatgtccctgttcatgtgctgctccagtgcggcactccgcacgtggtcactgtggactcagatctttgcagagtgtctggtacatcctcggagattagtctccgcataactagctgaggcggggagtggagctcaggagcccattcccgggtaagaaggaaagtgtctgtgcagagccctgtgctgctgctttagttggacgcaaaactgtgggcatgattgttgcctggacagcccagctaagtcctttatgatgcccgtgtggctgagaagcaggactttgagaaccatgcaatctgctgtcaggacccgagagacagggccccccaagacccaggaggagcttggtagtacaggcatgtggaggagaaggctggagaccagggctgtgccgcaggtgggcctagggaaggcttcccggagcagtggcgtcggagctgagatctcagtaggagcttgcaggcggagagggaagggcacaggtggagggagatgtgtatgcctcgtggaggtggccctgtcacagatctttctagcatcctgaaacagagcatgccaccagcgtcttaaggacaggtggagggagatgtgtatgcctcgtggaggtggccctgtcacagatctttctagcatcctgaaacagagcatgccaccagcgtcttaaggctacgtagccttcctgagctggcagtggagacccactgtcccgctgtcacatgctgagtggagggtgcccctggcttctgtgttagcgatggcatgctactgtttaggcctcatttccccaaaaaacagcgagtcccaggaagggcttgagcacagctggccgtggttcatgtcctataattggcacgcgaggctgtggtcctcagccctggcctggcctcagctccatccccagaagctcaaacagatgctgattggtccaagcgaatccagagcacccacattgttcccttgggcggccgggattgcaaactgtgagttggatctaactcttgcctggtttgcttctcaatggaaggattttaaagaattttgcagaaaaagcaatggaatacaccagatggacttctaaggactcaggcaccctgaattgttcatctcatgtgaattcatcacctaaacagaatcccagtgtgtgcagacccgctcttcaaaactgggtccggaacttgagagcaatccagtctttcaccttcttttttcttaaatccccatacctggtggggtgtgtctaagtgatgcatttgcacactcactaattagtttgggtattgctgagcagggtgttctaaacttagaccctggatggctgggtgcattccagcatgctcactcgggaactgtcattgcaattattgtgattgtgtgttagagtatggacttccaggggagctggccactgagcacagttcaggcccagccccaagtgcctccaggaggagcaggagccggcagccatagggacacagccgtccagcaccaggagccagggtcagctcaggagccagggtcagctgttgcccttgcactgggcacagggaagggcttctgccagtgctcagggcagaaagagcagaagctggaaaaaccctggctaagatgcccaggggaggagcccagagcagggggccactgggaccacaggagccaggctctgccccacaccccgcccagcaccacacagccagcccctgcagctgggtcaccgaccacagaattgtgtcctgatggacttatgctcaaaagtccctgacagcatatcctgaagaccacatcatggtctgtcatcagaagctcttgttaatgatctcagggatccaaattggaaaccaccctgccagcaaatagcattgctatgcagaggtcagggcgctgcttttcaaggatacccaggggtagggtgtccctgtgtatggcggccctgggttttgcaccctggaggcagcagagtgaaattctgagtgggcgagataggctgagagagagtgaggggctggtccgtggggagtgcaactggaaaaggaacagggccggtctgcacaggggtctctgctcacaccagttctgaaaatgaagccctgttccaatggggcgtaggcttgtgtccccgtgtgaagctggtggcctgggaaattcctgggcccatgcggaggatggcgggaggcagagccctggaccagaaggagcctgggagcgctgtgtagcccccactcacaccgctggctcgagtcgcttgttccttaccgtgtgtcacaccaggaagctgaatcctatgaagttggcgtgtccttctcctctgcagagggtcaggcctgggcaggggactgtgcagctcatcaccgcctccacccctgaatggtgtgcacactgaggctttgggggaaaacaacgctaaggaaaatgtatttcaggttcccattgctttccgaggagagacctttccagcaactacgtagcctttgcgtcccctgaaagcagctttgtgtgactgacttccttatttcctccgtgaagtagttcaatcccacgtaatacacacgtcaacaattgaaaaattctgaaatgccttcttttttttattttttttttgagacagagtctcgtttgtcgcccaggctgaagtgcagtggcattatctgggctcactgcaaccttgcctcccaggttcaagcaattcttctgcctcagcctcctgagtagctgcgattacaggcatgtgccaccatacatggctgatttttgtatttttagtagagacggggttttgccatgttggccagtctgacctcaggtgatccacccacctcggcctctcaaagtgctaggattacagccaccaccgcgcccagcctgaaatgccttctttaggatggtttacctttttctttttttacgttttcagggaatgattctgaatggatttttagttattcactgtaatttaatagccaagcattgatgataaaatttaagataacatgtctttccggaaagttgtggggttgggtgaaaagggatggtggtttagagaacactagtgaataacttttgaaaaggtagtgaagagcagccttgctggggtcttgctgggtttagtctgtctggatgtgtcctttgtgtttgcatatcacgtagtatttcttaaatttagaaatagcccctgcaaagggacttgagaagcactaagcagcatggctctcactgggaggcttggactccactaaacctgatgacacacccagctgccctgcgagccctggcatcagtgtcctgggggagggacaggacaggagctgccacttgccggcagggccaccttggtatccctggaggtcccgtagcccttgcagcaggcatgtagccccgcctggcagcaggaacagcaggctgcctcaggcggatgccgagttccaaagagtcccccaccagggcctccaagagctggtgtggttacttcctttgtcatttcacccggtcagatgcccttgagcgggtcagggtcatttttatcctgagcagcattgtttagtttagtgtttaccccactcaggttaccagaggaacagatattcacagagcaggacagagggttcgttagatccttttgcccacaaaaccatggaaaaatgttaaacgacctaaaccaacaatttatatatatctcgatgaacgcatgcagaaggaaaaaatgtacttcactaggttgcattgtaaatcaagatacagatgccaattaaagcaagatcatctatcaaaatggattcttttaatcaaaacatacagggttggtgaagtgggcatcctccactcgctggcagggattagccagatcttttcagaaaggggttttgacaatatgcataaggactttttaaaatgtttacgccatctttgtgcataaaatcagtgctcgaagagaccttaaaacgatgtcaaccctaaggacaattgtttttctcacaactcaggctgtctttggaaatatgtggaggctcccagaaccgtggcagccttcctcagcacactggtggccctctctcccctcccaccgtgctgttcagaccaaaacccacttttctagggcctgtggcccccaggaacaattgtgtggtagccactctggggaagggcttgctctttgaaacctgccacacaggactcctgacgtttcctgtgtcgacctgattttcatagaaaattgcctccaaattatggttcctatagtcccaaagcaccagctcacggcccccagcctcagctggaaggggcccagttagcgagccagctctggggcaccagggcagaacgcctgggctggcgggcacagggcgcagttgtctccatcacttactcaatagccctctctccctcctctcttcttcctcttcccctctgctgtttcttcctccaattatcttcagactggtatctttcaggcctgggagcactgcccctccacgcacagtccttggttggtgcagaccgggtgtccccctccatccacaagctgcggcagcaccgcccactggggcggacccagtcggccccgctgccccagaacgcccaggctctgcagcacctggtcatccagcagcagcatcagcagtttctggagaaacacaagcagcagttccagcagcagcaactgcagatgaacaaggtgggtttgccggctcagcgctcccaggccccagggcggctgtgtgctgtgcgcttcagcctcaggcttcagcactggcccctttctgaccttaagggaggccaggaggcagaaagagggaaccgaggaggcacatgctctggcccacagcacagagctgggcaggggcaggggcagaagggatgctgctgggagcttgggctcaggaacagttcacctgcagggagtgggacgcgcagggccagtgccctctcccaccagcccgtgtgagttccgttggaccagtgccctctcccaccagcccatgtgagttccactggaccacgtcctgcctgtggtgcatcagtgccagcgaatggaatagtctacttgggcaacacttttttcttgggtttcctaaggccatttagtaaacatacctttaaataaactagcaacccacagtgcccatctcccaggccatccggcacttgcagcctgcctgagtgcatgagcagcgtacagggtaagcagcgtacagggccggggggcccgggtgcagttgtacaggtgcagaactccagcaggaagtcgaagggacactgtcagagctggttctgggccccggccagcccacagaggtctgcataacctacagacatcttgaaagtcactcagataagtccattttcaggaggaggtagtaggcaaggctagcactgtgatgctcgtgaagaggaaaactaacatgctgattacgtgttgatcaaatgctggcatttgacatagagcatctttaaggtaagagatgagatgagctgctatgaacatagtccagcagttcctcaaaaggttggacacagccaccacatggccccacagctctgcggccagagatgaaagcacacatctacacgtaaactcactcaggcattcacagcaacctgagtccctgtttcaggccattcctgcactgctgtagagaaatacctcagactgcgtgattcataagaaaagaggtctgattggcttctggttctgcaggctgtagaggaagcgtggtgttggcctctgcttctggggagtcctcgaggaaacattcaactgtggtaggcgaagggggagcgggcacatcacttggcaagagcaggagcaaggggtggggagaggggccacacacttctaaccgaccagacctcaccagaacccactcattacagtgaggacagcaccaacagacggtgttcagccgttcatgccaaatccacccacatgatccagccacctcctgccaggtcccacctccagtattgggggctaggcttcagcaggagatgtgggcagggacacagatccaaaccgtatcagtcgtaataaccgtatcagtcgtgatagccacattacatgggaacagcccaggtgtccatcctgtgatgcgcggccacacgccggcacaccggaatgtcacataacatggaatgtcatataacgcggccacacgccagcacaccagaatgtcacataacgtggaatgtcatataacgcagccacacgccagcacaccggaatgtcacataacatggaatgtcatataacgcggccacacgccagcacaccagaatgtcatataacgcggccgcacgccagcacaccggaatgtcacataacgtggaatgtcatataacgcggccacacgccagcacaccagaatgtcacataacatggaatgtcatataacgcagccacacgccagcacaccagaatgtcacataacatggaatgtcatataacgcggccacacgccggcacaccggaatgtcatataacgtggaatgatgtgcggccacatgccggcacgccggaatgtcatataacgtggaatgacgtgcggccacatgccggcacactggaatgtcatataacgtggaatgacgcacggccacacgccggcacgccggaatgtcatataacgtggccacacgccggaatgtcattcagccataaagtggaatgacactgacaagcggcagcacgggaagccttggaagcaggatgccaggcacgagaggccgcgtgtggtatgatttcatgcacataaaacgtccccaacagacagactcacagagacaggacacagactcgtgggagccaggcctgggctgctgcgggcagatggggagcatttctggggaacagcgcctcttcttagggatggtgaaaatattccaaaattagatatggtgatgactgcacagctctgtaaatatactaaaaacaacaaatgatatcatttaaaagcgtgaattggatggtatgtgaattatatcccagtaaagctgttacaaggaagaaagaggatgagttgatgggaggggaacgtggagaaacctttggcagatttggcgacagacggaatcatttctccgtttattgtctctcctgtgaaagtgcccccctcactccaccccacccccgttgcttccctggatttcaggaccggtcctgggttgtccacctgtccggaggctcagggtcttctgtggttttcctgagggtgaaaaattggggttaggactggggaggagatagactttcctagcacacgtagacaggagttggaaagtgaaataccaggatcccagcaagagcagaggtaaagccgtggggagagacccctacaccaccaacactgctgcctcttcccgcagccctgacctcctgataccattagcccctcctgcctgcctggtcccaatttccttctctcaagccccacagttccagcccagaagaggagtcagctcagccctggcgcagtggtcaaaggctttgattgcgtggtgtccggtccagtggggctgagtcggggaaggcccctgggagatggcagccggctgtggcccaaatccatcctagtgtgtgagccatcatggggctgcaggctcaggattgaggagatgggccccttggggccttgctccagggtggcagccacgtcagaccagatgcccagcacaggccacagcctggcccctgctgcccactggacaccacaaaataggctcaccacccccaccccacatgcccctccacccccaagccctcatcagcggacagcagggaacgcatcagaaatggatggggcacccagcaaatcccctcattgggacgggaagggcacaggctgtgggcgtgtcgggcgcctgccaggcatctttactcccaggtgtcaaaagcactttcacatccgtcttcctaatgccaacttaggtttgttaattttattatgtcattatctgagtgatggggtaggaggtttgaggaagacaggaaacacctattcacatgccgtatactcttgaaggatttagaaaccgggtactctcactggagtttgttctctgattgatttacgggagtgaatgacagttgattgaaacgtttagacagtgttttcccaggatgcccaggaagacaagaatcttgcccagggccgcctaacactgacgtcccggcccttcctcttggaggatgacgtccccaggggcttgttccctgagggcatctgcccagctctggcagctgtgaaccctcctgtcccactgcgctgctccagcctacattggggttgcagctggggccggcttggtctgcccctccttcagcctgtaccttagagggcagttgttttggaaacatcactgtgaataaaaaagaaagagaggcggcccgtgcctagccctggtgttccctgcagccatatgtagccactctagttttcccgaggcctgcagcctgcagagctgccccttttggctgagaaaactccaccaggtggacaggatcgaccccgagctggctctgctctcctctccccagcctgtggtcgggatggtggcagatgttttccaactgtgtcagcttctgttgcccgtgccttgtatgcagtggtgtttataagggtttgctgcatgaaggaactttctggagaacgcacaccatcagagggcgagtggaccttggaactctgcaggtgaaactggccctccgtgttcgctggccacgtccggacttggcctcagttatgtctggtttgcgagcagtgggtgatgtgtgtccaggcgaaatacctctttctattaaaagaggacgttcgttggaaggtgtcctccacccctacagcaagaagccttgcttctcaaggtggttcttcccatggtttctggactctgcacaagaacctgcctcctgcagagcggagggcctcgggtgtgtttccctttaacttgacatcctcggttttgaatatgaaaacttggactcatattttgggtggtctaattacgagtgtgtccgattgttttaaaatactggcagtttaccagttcggttttggccgtgaactccagcctgactttttaaaaatgtaattattccaaatatggaggtgcatttgttcttcctgaattgatgaaaggggctctcagtgtccccaaggccttcgggctgcacagagctgcttcaattgtttgcccgcgtccggctcgcctcccaaagccagctctgcagtgcagccccagcccacagcccagccagtgagactcagaactgaatgtcaaaggagagagagagagagaagcaggctttgtttgcagccatggcccagggaggtgacccacaggcgcctgcgtcagtgccaaggcaaggggcctggcctgcgtcacagagggctctgacgtggcaccactgccaaagtgacatcctcctcaggccctgcctgagagccctcgccggaggcccacggtgtggagatgatccctcctccaggccgaggggcgtgcggcagcgggggacacttcagaggcttcatcctcgtgaaagggagaaaaaagacctgggaatgttgtcactaaaggacactaaagagatgcggcccctggcagcacacgccatccgcagccagccggggaagggccatccaagagcccttggaacagtggggaggtctcctgatgcacagcacggtagacgcggctgccgaaagcctcaggcaggcaggttgcagtggccttggggcccctgaaacagccccccaggaagagaggctgacccccgctatgacccccactacctccaccgccattcatctgtgcataggggaaggacgtttgagattttcttacagagttcttgaagtttttctttaagtttgaaatttaaagctgggcatggtggctcacacctgtaatcccagcactctgggaggccaaggtgggtggatcgttttggctcaagagttcgagaccagcctgggcaacctggtgaaatcccgtctctacaaaaattagccaggcaaggtggtgcatgcttgtactccccagctactcaggaggctgaggtgggaggactgcctaatgcatgactgcactccagcctgggcaacagagcaagaccctgtctcaaaaaaaaaaaaaaagaaatttaaaggaaagcatcagaagaaaagtcttggagcttctgtgtccaccgagtcctccctgggccgtctcctttaaaaggcaaacagacaaacccttttcctcgatcagcctggcttcctgggagtggccatttgctgcaggaacccctcccctccaccctcagctgccttgtcctccaccccaccctagagaagggacctgcctctgtgtcctctatggggttgctgccctccatcacttttatccacttcagaatggcccctgggctgctaaagaaaggcaggcacaccacttcggtcattgctgggatggggcagccccacagggtcccctctaaggtcctagccttcctcccccacccctccccctatttcccttccccgcccccccatttccctcccccaccttcctccttctccccttgccctttcctggcattgtacccacccttctgctggccctctggtctcctctccttgtctgtgtgtgcctgtgcctatgtgtatttgtgtatctgtgtatctgtctcttcatgtgtatatgtatctgcatgtctgtctatttgtgcatctgtctgtgtctgtgtgtgtgtgtctgtgtgcgtctgtgtgtgcctctgcgggtatatgtatctgtgtgtgtatgtatctgtatgtgagcctctgtggcctccctgcttcccgacaccctaccactggtccctgaggcctcatccctgtttcttcagctccccagctctgcgtagctcctctgtgctcccagctttgactttattccacctgcgtactgctccagtcctgatctgtctcccaaatcccagactcgaatctgcactttcttgctggatttctcagggccccaccggatgctgggattcagcctctctgagctgccctctacccacctccccgtcccggggccagcacctcctctgtggtggcccttctctggcacttggccaggagtcctggtgcctcctgctcactctcctgtccacgggtggtccccactgccttctctggcacttggccaggagtcctggtgcctcctgctcactctcctgtccacgggtggtccccactgccgctggacccagcctctgtgccagcctctgcccggccctgctgcctctgtgcagtcgcttctctgcaggcattcccctgccctcgcgctgactcattagcaccttcctgtggcacaggcaggaccatgcacccctcggagagacccgcagcctctcctgcccatccactgatgagcaaagcccacattgtgaggagccctctgaggccctgaacacctcctcagccctgagctcccatctccgtgtcctcagcccttaggtctggtccccgcaccctcagccctgagctctgagctcccatctctgcgttctcagccctgagctccgttccccttagctccagttcccgcgccctcagcccttagctctggtccccacaccctcagctctgagctctggtccccgcgccctcagccctgagctctggtccccgcacccttagccctgagctcctgtccccatgtcctcagcctgtggtctgagccctgtctcctcatccttagcctgttgcttttccttccacacctgcagcctccaggacattcttgcttcctgaaggcccgtcctggctgctgctctccctcctcccgaatccctcctgctcctcatccagggcattgtcctcagcgctctgtgccaccttcttagggaattgttctgctttcagattctttgttctttgctctccctccggtgcaccgagtgataagggccccgctctcaagaaacctcccatacaccactcagtcagtcacatcccgttacacatcagactgcaccgggccctgggggagctgcaggaactgagcgtatgggtgccctcttgatgagtgtcctgaaagccaagacttggatgccatcttcgaggtcccctgtgaaacagcgctgcttcacccggcgcccctgctgcacctggcacccctgctcacagcgacagcggtaccgccaggctccctgttctccctgccccccacagggcctctcaggctctcagtgtgcaggaagaagatgggactgagaaaccagaagcaatcacagacctcaaaatcatcaagtgaaactagtgttgaaacacatgctttttttggtcaaccactgagaaacctgtcagagcaaatggggacaatgttgctagattccttagttgaacttgtttctccccggctttgtgaaagtctaaccggaaacagtcgcatgtatttacagcgtacggcgtgatgatttgatacttgtatgcgttgtgaaatgatcgccacaagggacctcatccatgcccccttggcctcacggggctctcattgtgtctgtggtaaggtccgtgaatatcggggccaccaaactgtgcatcaggtcccggaacttattcctctcccaacggcacgctcacccgtggacagcacgttcctgttcccgacgcgcggccacccaccgctgcactctcctccctgcgagtttggctttctgaagctgagttccttacgtgccacgccgcctactggttcccacactgccgatggccggcccgccccgacacccacgctgcctgcacccggctggacctggctccatttccctgtgccaggttgaaagcttttctgaagaaaagctgccttcggtttagagataaacaatggatctgcgttttcttcactcggcttttactgccgtactttaaactgctcttagaaagaaagttaagggatgatcaatcataaaacaaaccccccgcccaatctgaagtctctgatgttccacagtgaggcacagcagggctctggaggctgaaaactcaccatgttgtgtgtgtgtgagtctgcgtctcagccctgctgcgtggggaccggtgtcgtctgatacggctgacccctgggagcaagcggacactgagtgcccaccaacccgtgccccgtagttcaggctgctggagaggccgcctcgcgtgagtgtggagcagcatgcagtgctctaagggtgttgaaatgcaagggctcgggggatttcaggtgtcagtcttccttgcacacctcagtttccttctggaaacagtcggatgcggtgccgagatccatcctccacgcgctgtagctcctctctctgccaggaactcggcttgtcccaccgtccctcgaatctgcccttcaggccgttccccacggggacagatgaatcgagcatccggagagacccctcgatctgggactttgggattgtgggacgttctttcacagtctgcagaggaatgcagctcagtcagtgccttcttctgagaaactccctgtgcgcccttcctagtctaactccagacccccgccctctctcctgagcttttttttttttttttttttttgccacttcccgcatccctctctcccctcttgttctcaactccagcctttgctctgctcacattcatcccttttctggctcccagatgtgatggggcagctccattgcccaaaacgaaggagttgtcctggccaccctctcttgcctctccatatgcagtctgtccctgggcctagagctgcttcctttttggtgtcatggaaacctgttctttctcccatgccttagccagacgtggggctggcctcaccctttcaacctctggcctgtctgcagcagggcatgcttctagaacgtgcacctgcttgttttcagcccagagtgcccttcccacagccccacctcgtctccggcaccctgtgttcctgttctctggccttccacgctgcagccctgctggcttcccacagctcccagagcgcattgaggtcagccatacaccctgttccactttgccccactacgcggacaccccttgcatttgccccatccttttagtgaatgtgcgatgagcaatgcctgtgccacgtggatgagtcagaagtggtccctaccctcctgggaactgcagactgcaggaaagatggatacatgaatggcaaccacagaaaagccagaggactggggtcggggggtgctggaggagggcacattgccctatcaggaagatcagctgaccctggaaaaggtgacatgcacgggaggctcacaaagcctcttggagtggctggaggccgaggaaggaaggcaagcagcgggctggaggcgagtgtggcatgagggatgcagagccagcggcgtggtcgggagcagggtggcagggaggctgcaggggcaacatggccacacgatggaggggctcttcagcagaggcaggatggcagaagagcacttgggggacattcagcaggggagtgaccaggtccactggcccgtttgaaagcgtgccctcactgctacatgaagaagattgcaaagcgttgacgctggaggtgggggcctcccaggagccatgctgtcatccaggcaggagaggccaggtggggcaaagcaggaaaggcaggaggtcgaggctggagagaagcagcaccgtccagaggcgtttctcgtgagcaatgcatgggcagtgcttggcggacagaattgggagcttggggtgtgactggacagctggccagagagaggtcccaatagccaagaacaggtcctagagaagggagaggcttggaagaagctgccctgcgttcggcattggacctgctgtgctggggctcatgggcactctaggctaagctgaggcgtctggcaggccattaggtctggaggtaaagagcgagtttgggctcagcaccacctttgggagtcgctgatacttggaatccagaatggggaaatgagccgaggagcaggcccaggacaaaccaagacggaggagcaggcggggagcaggagaggagcacctgccgcctgttccgcactgagaggccggggagggagaccgagaagcgtccgtgagatccaacaggaaaagaggtcgggggcatctagggagtcccacaggagggaggatgttgcggttcttggggccccatagcggggcaggtcatggagcacccatggaatcctgcaagaaaggaggtcatggtgtccctgagatcctgcagaaggggaggccgtggcatccctgggattcagcaggaagggaggtcctggagtgttcccaggatccggcaggagggaggtcatggcacatcggtgggatcctgcaggaggggaggccgtggcgtgttggtgggattgggcagtgagcattgtggacgtggttgtcttccgctgagtgggtggtgggctgtttctcttagcagttgtggctgtgaggtcagcattggcctctccccttcacactcaagctctcctctgcagactctgttgacacctgcagcttcttttctgtttctcggtgcctgacacagaagaggtgcttagtaaaccccaaatgttagtcagcctccttccctgggccaggtcaccttgaccctgggctggggtcctactgggcattattttcttaggcactcaggcaccccagtgcctgttgggagataaaggtgcctgctggcctgtggcagggtgataaggtgccctgagtccctgattgtctgccccagagggtggggtttgcagcatcccttctcctgtcagatgagctcagaggacccagctctctgtgcttcatgtgttacctccgccttgcagatcatccccaagccaagcgagccagcccggcagccggagagccacccggaggagacggaggaggagctccgtgagcaccaggctctgctggacgagccctacctggaccggctgccggggcagaaggaggcgcacgcacaggccggcgtgcaggtgaagcaggagcccattgagagcgatgaggaagaggcagagcccccacgggaggtggagccgggccagcgccagcccagtgagcaggagctgctcttcagacaggtgaccgcaggcggggagggcaccagaaggctggcacgcacagccaccctcggtccccaggtggcatcttctgtggtgatcacgggggctgcagggcatccttgcgcggtcactgtccagtgtctcacctgtcttgtcctggccagtgagggaggttgatgtggcttccattttgtcccagccgttcctagggatacgagatgtttgccccctgtgggtggttacgtaactgctttccagccatgcgcaggccccagagaatggatttccttcctgtctgtaggctgtaaatgaacacagaatccatgtgttagtgagatacagcatgctttttaaagaagtgaaggaactagaggtattaattgatcaaaaaggcaggcagggcctgatcagaagtcaagaccttttgtgacccagaggtgctaatgagcagccctgcagatccagacagacgggtgcgattgtggcacccagagccagtaaggcttcagggcactgacacccagtaaccaaactcacaggagactgatgaagaaggccagtgaatgactggttaatttccattgaaacattaaacttctgagtcagcagaaatacctaaggcatttgggcagccagctggagccccgtatctgcagctagagtgccctcaggaaagtggcttcctccctgtaggcaggaagccagtccgaggaaccacagctctgtaggatttgattctatcctccagcagcagagctgctgcctcggctgcaggagccactggctcgttccctcccttctctctggactccatgccggccgtgccgttgagcacctccccagcttcctgactgccagctgtgtggccagacgctgcatctccacccccagcagcaccttggaagccaggagcaggacgccctgcagtaaactgttccccttaattctcagctacagttcttaaatgcttgccactgaatgaatcagtgtggggccttgtacctggagcacctagacccaagcctgccacacacgggatcagtgctcagtggtctccagaggcttctgggtcaggagcccttctccaccgagcttcccccagtggctggcattgggtgctatttctccttcttgttcagaggggggcctgtctctaatttctgggccttcttaattagcaccccgggcactaaacactacaaagcccagcagaactaacgcttggcaaagacagagagagaaagccccgggcctctctggcacacacacggtgcttcatggtgaacactcgtccacaggtcctgtccgacaggcccagggtgggggcctcttcctgtggtcgggccttgtaagttgatgaagatctgaaattcagtgtgctattattaggctgataagaaatgggaaactatttacattaataatttttagggctagtttctcatagatcagcctttactttgagaaaaagaggcttgttatattccaagcatgagatgattattagaaacacttattttctgttctctctggagagtaataggcagaaccccttatcagggaaacgtcgtagtacacggagcaatttgccgaggtaaacataaggcggggcacctccagcccgcgtcggggaggattgcttattaaccacttaaccgcgtggggcccacggcaatcccagctgaatttggtcagcagcagactgggggcctgtgggtgctggctcctgctccagctcctgctgcagctcctcccactgtctcagggcttccttcttctctgctccctcctggctctgattccttttgtgtgtgtgtgtgtgagacagagtctcactctgttgcccaggctagagtgcagtggtgccatctcagctcactacagcctccgcctcctgggctcaagcaattattctgcctcagcctcccaagtagctgggattacaggcacccaccatcacgcctggctaattttttgtttgtttgtttgttttgtttgtttgtttttttggagagatggggtttcaccattttggccaggctggtctcgaactccttacctcaggtgatccacccgcctcagcctccccaagtgctgggattacaggcatgagccaccacgcccagcctgattcctaaaggcaggacagatcggagcctggccgggtagctctggtttcccccagtgctggcagcacagggctgggctctgccttcatacaggagctgggatgtaggtacctggttttccatgttcacaggatttgttcatcaaaactaagacaggattggcgcagagctcccagcaaggaggcgcccggctttctttgtgcctcggcctgggtggcaggttgctgtgctctccctcagctgctgtctggggagaggcttggcagctgtgacctcatctctgccctgctccctccactccactctgcctcgtatgggggtttgcacctcagcctgttcccagaatccctcagggtgtcccaggcccctggctgagtgccccccccacacacagagcccagcccagctccatctcatcagagaggcacatccccaccagcaggcctgctctaggccccaaaggtcctgggtgcccagaagctgatgggctgttactgcttttagcctgcacgagggtgtgtgggatgtgagaccagggaggggagcggctgcagatgaagcccagttggcactttcaagtctgagagccgatggtgctttctcgcccaagtttggcatgcagattcaatgctgttggtcagaactaagacccacaaacccaacaagggggttgggcttcgtgcccactcaccgtatgtgtgtggtatggcagagtggacgctgtggtccccacatctacatggccttcgcatatcccccagtgaaaccagcgagggccaggctgccgccccagcaagagcttctctccacacctgccaggccctactcccctgcacctgctccaggctgctcctggctcagcacctcctcagagaagccctccttgataccccatactgggccaggcctccctgggaccccctgactcaacctgtgttatcctgttaacgtaacccatggcaggatcccacgtggacagcctgccttccctagagagaccgtcctgggaggcagagcctgtgctggcctcgttcttggctctgggcccactcaggcttcagggcactcacagggaaggcctctccacgcagctggcctcccggcatccttgtggcccatgtatggcctgtgcgtggacgggagacttgcaagagagggcaacccctagccctgcagcccaggggcgggagacatccgcaaccgccaacacggccgtttcttccccgcagcaagccctcctgctggagcagcagcggatccaccagctgaggaactaccaggcgtccatggaggccgccggcatccccgtgtccttcggcggccacaggcctctgtcccgggcgcagtcctcacccgcgtctgccaccttccccgtgtctgtgcaggagccccccaccaagccgaggttcacgacaggtaacacgtggcctttgtgcagcctgagggtgcaacgcgggccacagtgggcacagcgcggggggctcttcccggcccagctctgcagaggctgaggaggggctgggcaggcacgagggccacgctggatggtggggaccacacaggtctgtcacagaggccctctccccgccctacaccccacaccttcagttctgtcatgctggggacctgtcacgggctcacttgcccactttcctgtcccagagacccatggtctcctccaagaacagtccacagcccatgcccgtggggccatgagaacctacagcttctggtccggctcaggaatcatgagcccacgcttctccgcttactccctcacacttcgcccacgtccacagcgttgacgctgaggctccagtgacagggctgtgaatggctggcggggggctgtgattacacgagagcagagcccgggacccctgggacacgctgtgggagccacacgtcctctgtctgtgccatccctcataccatcctcaccccggggaggcgatctgccagcaggggtccttggttttccctcacaagaaggaggcaagtaaggcgtccaccacggctgaggaggcaggaggggccgggccctggacttgtctgcctggagctagccagagccggggaggagactgctgtcctgggccgccccgccacccagccacccctgcaggggagaggagggaaggagggctggcttctggcagggcttgcctctgagacaagcacagaggcaggagcgctcttcatgttgttatgatctaatatttcttgttaatgacgcactaagaaaaatgttctgtaaatacagcacggcttcattcttcagatgattctcatcacgtggcttagtgttctgcagtctgcgaggttctcactctcaggtcttagaaggatgctattcatattcagagacaaatttccagagtaggtatccagcaagtaaaatgctgcttctcagaaagaaaaccatggaaggtcacaggagcagccagatgacccactccacaagtcctgggcagctgactgcaataagtgtgttcttgaaagaatgcagctcagacaagggagaccccagtcaccgccaccaaggagaatcctcccactaagctggcccaccctggctggtcccaggagacttgcagggagtcccgcttcgttggtgtcctttcttagtttgtcttgattactttttaaacaaatttataaaacagtacatgttcattgtaaagaaaaacatgatagaaacccacaggaaatgccgtttgcccgtaatgccactccccagtggtggcaggttgttagtatttgctttaaaccttccagatctatttctgtgcatagccagatggacagatagacacaaacataatttgtttcacagagacgggactctgttgtgtctgatgctttctgttagtacctcacactctcagccatcttcccgtgtccgtgcacagcgacgcagtgcgttcctttagccacgtggtctcctggctggctctgccaccctcagctgtgtgggctttgccgcttctccatctctctacgctccagcttttctgtctgtaaaggcagtaaagcaggtgtctgcctcgtaagttccagccgtgtgcttagtaaatattagcgcacgtgaccttatcatgatgattccactgtaggggcagtccccattccttgtatccgtgagcaactggttgtttctgcacacacacttacgtatttcacggggcagtgtccgtcattgcctatgtgtctgtgttgccattacaaactcccaagcacagccatgcccacacacagtgtactgattgtgagtcctagtttcattgactcctgtaagcctgcacctaccctgatgctttttttttttttttaccagaagtcccatcccacagcactgttgtgcaagtacctccagaattcctcaagtgcaggagactgactcctgttagcctgactcacaagaggctgagccaggaagtatgggaactaatatgcaccaagtgtatcctgtagctggaccctgcaaacactggaccaccttgaatctcagctccccttggctggggatgctgcctgtgttcccagtaataggaacacaagtggggagggccgcatcctgggccagcacactgaagcaatagagcaggtctgtctgggcagcttgcccaggctcttcaccgtgcgccccgcccttatcagcctggatgaacccacattagcacaggtgcccctggccagtgacctgcctgcggaaggcgtctgttcacccagcctggccttccctttgttaagtcctggaagaccaggtgtgtgcagcacagacatgtcccggcagggcctcggggcagccctcctgccaggtgtcaccaggggccaaggcctggtgagaaggggccggggcagagctgtgccccggagggccacctggccttccctcgcatctctagcctctgcagacaggtcagatactctccccttcacagcggtcccacgtatgctgactgagacagggtggcatccaacacgggttcaggcacattgcctttcctgctgcagagccccaggctgccggcccagttggttctggggcccccaccaggagcctcttctgtggctgccgcaccctgggggcccgtccatgctgagctcagtgctgtggtgagcacatggctggcctcttttcacagtcagaggttaagtagacctgtgtacatgggttttgcgtgtgttttctagcatatgtgttccagtccctctggaagtttctaaaggcagagctcgaatctggtgtttctttggaatctcaagtaccttggacagttctccgtccagcagaactggagttactattggtccaggaccaggcagactttgagggtagggggctagagtcgcctccttctagaagtcagcaccgtcctccccagcacaagtcccacatagagctcacccctgcaaggtccagccacccagggcagacctcctcatcactgttttctcctcagcctgctgcagcagggcagctgcgcacgtccctgcctgggtcctggggcgttactgtgagcatgagtgacaggcaggccctcccacccgcctggcctctgcattcgtccacgttctctgggcctggccagtcaaggagtcttggcaaacgtggtatttttctaaagaaccgtcccagcttccgtctccttctagggaagtggtggttccgccaccacccgggggcagcctgccagtgggtggtcggctcgcccctggatgtgcgctgatcttggcccctctgccccgccccaggcctcgtgtatgacacgctgatgctgaagcaccagtgcacctgcgggagtagcagcagccaccccgagcacgccgggaggatccagagcatctggtcccgcctgcaggagacgggcctccggggcaaatgcgaggtaacgccgaccggggcaggtgggcagctgcggctttgggcaccattagaggggaccctcgtgggcccgcgtgattcagggtgttggttttgcaggtggttctttgggcttacagccccgggggaagggccacaagcatcttcactgtctgcatttgggcgggcagctatctgctgagaagcccggggctgtctccctggagtcccgtaccctccctgcaggaagctgctgcctctgtctgtgacctttcctgatgtttcgctcccacctcccacctagcaggctcttctcaaggtccagggctgttgctttctgcctccgggtcacttccccaaggaaaccagttcccaccatgctcccccagggctgccaggaaggagccacggggagatccgattatatctcagatcaggcctgttggctttttgttaaaataattttctctttttttaagattttgaaaagcttcttcgagaacacagggagacctcaggcccttggggccctcctcagagttaaggtgctggcgaggcagtgggtcgtgaagggaatggagctgcaggcagggccctggcctggtttgaattcagctcccttatgtggctgagtcacacgaggaggcttcggggatgctgcagctctggctgtgcctcagtttccctggccgccaggcgatggcagcggcctcacttgttctcatacaaggagggcccggccccgcctcctgataggaaccagagccctgccccgaatctggctgcagtggactcccaggcccaaggaggcaagaaggatcagccgattaacacctgagggcaggacgggggccgcactttggtgaggctgtcccagctggtgctcttcaccctggaggcagctgtcacaggggatcttgagctcttgacagggaggagggtgtggccaggccctgctgatagcgagggcaggaagagaagagactcccgtctgggagctggtgaccttggacaaatttccatttctttgtctgtagagaggggctggcaacactgtgcagggtcgcacaaggccccacccatgccagggcccaccagtagagacctgctatgtccactccccacaccaggaatcccaccatcctacagatagcgcacagggtggacaggaacatccacacccacccctccaacagtcctggacacccgacagcccagggcccaagtggctgtggcagagatgagtgagcacgtggagctggcgtggcacggagggcctctggtctcctggcttagtttctgcagggtcccgccctgcaggttcgcctgccctcctttagaagctgggatatttgtgaacttttaatctgtgcctcatcttaccccccgtttcctttaccagttttattggtgatacataattttcaggggggaattctctaaaagtcaggcccaggaccctctcctgcagtgccctctgggaggagggaggaggaaggcggggaggagccactgtagaggctcttggcacctgcttcagggatctggtcaggacggctgtgccactggagggcagcattgcccagcagacactggctgcaggaaactccttccccacgtcccttccctccacaggaccagacagctgtcctgctgccccttctggggactgcccaaggcctcctgaggcttccagagctccataacctgcttccttgtccctcccctacatgtgcccccacccccaggaggttccgctgaggccaggggattgggagagggtctctcagccagaaaagcaaagcaaatgcaagcaagggagggaggagtgagaaagcaaagaccctggaagaaacagcccgctcctccgcccgccctcagctcctccgcccgccctcggctcctctgcctgtcctcagcaccatgggtgaaggtgccagccacgactgggccaggggctggcagagggtccccaggtgttggggctgtgggacaagacctgagcctggcaggatctcagggagaggagagctggagaaagacaggtggctgggagacagccacagaggcggtggaggccatactccctggacagcagtgccttgctcccacacgtggggcagctctccagtgcgggtgcccctccaggttcagagcgagcagtgtgctaactcagcccagggggacgtgacgtcacccaccagacttccagtgccagcctgccaggggtcactggcctcctgagatggccgagcagaggggccatgggtacggggcatggttagagtgggtacccgataggagaagatggggtggatggggctgtgacttccccagtccgcggaccacttggaggccacagcaagaccgaagcccaggcccgagggcagggcctcagagtcagcaccccttctctgggtagacgactgcctggaggcctggggggtgaggccctcccctcacactgctgagttggcttcgcgtggtgaggaaggatgagagtgggctgggagatactttctgcaagcttgggaccctgtcgatactggcaggccggcccagcaagacgtggctcccagtgcagctgtctcgctccctgcctcactccagagcaggccttgggaagctgcctcacacgttctgagcagtcgggggtcctctgagtatagccatgtgtgtgtgcgggccccgccctcctgcagaggcttcccgggagccagaacagctcctggccaatttgcttgcccagcttggtttgtcctgcctccaggcacggtgtccaggaaggagaggagaagtgggtgggctggaagtcagatgccacagagaccagggccaccactgggatttgcaccctgccccaagcctgtgtttgctgtaaggagcaaagactccttctgtcttatcctaggaattaaagggagacagaaataacgaggtcagcctcccaagaaagcaggaaggggccaccatcaccaccgctcccagagtggctctggaaaagcctctcaggtgctcagtctgagccgtcacaatattgcacgctacagcctgagccatcgcggtgtcccgcacgcacagcccgagcccttgcggtgtcgcgcacctgcagccccagccgtcgcggtgtcgcagagcttttggggctttgatcctgtgtcttttctgtgtccatttcatgtgtttgtaaggagagggtttttctacttttcttctttgccttattctaacatcaactttaatttgtgaatttcatttgtggtctaacgtcagatctctctttctgcaattcagtctcttatccagtgggtcgcttttgagtggggaggacacacatggctaccctgccgttctttcacccaaagtccacactacatgacctgcctcttggcaccgcagggcacagcctgtggtcccctacggggaccttcccaagcgtgggctgcctaggcccgtctgtccagagggaacttggccctggccacagctgcctgtgcctgtacacacatgtgggcttcctgaagtcattagaaatgagaagccctggccaggtgcggtggctcactcctgtaataccagcactttgggaggccgtggcgggtggatcacatgaggtcaggagttcaagaccagcctggaacaacatggcaaaactccatgtctgataaaaatacaaaaattagccaggtgtgatggtgggcacctataatcccagctactcaggaggctgaggcaggagaatcacttgaacccgggagatggaggttacagtgagccaagattgcgccattgcactccagcctgggcaacgagcgaaactccgtttcaaaaaaaataaaataaaataaattagaagcccccgcagccgcccagggccccaactgcaccctgacccctacccagagagtacgtccctcctgcctggctttccagggacatgtgacttatgtccccaaagtagaagcagcactaggttatgtggatgggaccatagagtcgttttttaccaccggaagccgtgtcacatcttttctttgttaaacaagagaccttcatagaggaagcccggttttgtggaattgttgttcatgagaagagaacccgcagagcatccgtccctgcccagcgcacctgccctctggaggtctctcccctgtgggcggggactgagttcttggctccgccccttcttcctccaccctgcatggacaggacccccaggtgcaatgcgtcctgcaggaaggctgtgtgctacggctcctggtggtctgagaggagccccaggtgctgggctggcatagagagccctcgagcttcgcccaccacaggtctcacatacagggtggacaccgaggcctgcaggagctcagcggatgctggggcagggctgcagtcgggagggagagagcagatcctgctcaggcctgggggaagcaggtaacagccacaaccggggccacctgagtggcgtctgactcatcctgtggtggcctaaccctctgagagccatttccatgtgaaatgttaactcgaatctcatgtccaaagccatcgtcccctttaaaaggctaaataaatgtagctcaactaaagaacactaattttcctgtgaatttctggagaaaatctgaattagcccagggatctcaatctgaagaatttccaaacctcagagagacgcagccggatgccagctagccatccaggacagatgccagaccctggcagctgtggccccgggcggtccaaggaaggctgcttcatcctggggctcagagactccgggagcgcggctggggtttcccttgaacgtgagggagctcagcagctcacctctattttaagaccagaccctggcagctggaaagcaaagtaataatttgatgccaagtcattcgtgcgacagtgaagggtaatgcattgaaggctggaattatcttttaaagtgttttttcaaagctataattaagtgtaagccctctaaaatatttcttaaatattttaaaatatcacgttgggtgatgttgcttcttcttttgcagtaaccaaataacatgcttgtttttgtatcaaattaagtttccttttgggcaatggtttcagttggagtttctgtctgtggagctgaagcagcagcttctgcagaacgtgtgagtgtcctctcgcctgtccccacagtgcatccgcggacgcaaggccaccctggaggagctacagacggtgcactcggaagcccacaccctcctgtatggcacgaaccccctcaaccggcagaaactggacagtaagaaacttctaggtatttcaggaccttcctttcctcccatattgggtttgaagtcccctgaggttgtgtttccagctctcaaccccttgtgtctggggcacctgtgggtgtcgcctgccaggttataaggtaaagggcctgaaagggaacctttcaccctctgttcacaagccactggttgttgatgaacgtgccaggtagcaggtgtgtttgtgtaaaaactgggctgagaaccgttggtttagaagcatcttgaatcagagtttaggtttgagaggctgattaggaacacagccagcatgctgcccgccctgccctgcagggagcctgaagttgttttgagctccgctttaaggcccatcagagcaagaccaggaggaggcctagggagtgtccactgcttaggggtgaaaggctgctggtgtcttggctctggctgaaagcacctgcacaggtggtggaggggaattttagcctcatggagagaactttctaatgggcatcctctgcccggggagctggtgagaggctttccacagggatcttcagcagaggcaggtgaactcccagccagctccatggggcttccagtgttcccaggccacagaacccagacgtggggccgggggcttccagggcgcagaacccagaccccgggccgggggcttccagggcacagaacgtggaccccgggccgggggcttccagggcacagaacgtggacccggggccgggggcttccagggcacagaacgtggacccggggccgggggcttccagggcacagaacgtggacccagggctgggggctcccaggacacagaacccagaccctgggcggggagcgtccagggcacagaacacagacccggggccgggggctcccagggcacagaacccagacccggggccgggggtgtccagggcacagaacccggacccggggccgggggctcccaggacacagaacccagacccagggtcgggggcttccagggcacagaacccagaccgagggccaggggatcccagggcacagaacacggacctggggatgggggatcccagggctccctttgttcctcgataacgtctttccctgcctcccagccaccctgaaccaggacagtcactgcccactggttttcttccccatcttctgtgcctttgccctgggaagagcatattggctcttccctgagcaggaccctaggaaggcagagagggagaactaggaaccatgaacgcaggggttgcaggggcaaggagagggtgggccgtgcctggctcgttgactgcatttggcagggcacacgttgcaggaggtgtcctccgtgccaggcctgtgcccggcagactcagcctcacagagacctgcactcctagtccttcatgcgttcactcactcactcgctcacgccttcatccactcgccgagggcaccttctgtactggatgccctgtaggtacagacggggtcacagaccatggagccagtagggctgtgaggacacgcatgggctctggcctggggtggcggtcacgctgcttccggagtcccccctgccctgtggtatggaggcttctaaaaggacagaagcctcaagtttggggaaagtgagaagggagtgaacagcagtaggaagcaggtgggccggggtgtggctgagcaggttcacgaggtggatcctgagctagtgccggggacaagggccaccgacccaccccacagactccgacagctcaggctcagcaactgcagaggctatggactcagggaggcactcagtcaagggcctgggccaaagctggtggaaaggcctctgggccccgactccctacacagcggcttcgcctgctgctgctctagaaggggtacagcacccttccaccgtccctctggaagggacggtggaagacaggggcttcctggactggagacagctgctctagatgagggcatggatgccaagcccctacccctccccactgggctgccagcatgctgacctttaccgtccaagcagacaggagacccctctgtggatttgaccagccccaaagaagctgacatcaggggttcccaacaaatagcccctgagatcccttatgctggcactcacggctaatcaccccctgtgggcccagagcttccacccagccgttggcacttcccccttaggagcggacaaccaaggaggacccagggcccgaggaacggctggacagggacctggagctggagccacacaggggaaggaggctgggggcagacagtgtgaggcactaacccagctgccattagcaccctcagagaggatgccacatccacgtaacgtggacaagttcagtggaaaaggggaaagcacagaacgttcagagaagacaaaaattaaacacctgaccgcagaaaaagaaaatcctcctcagactggaagatacggtgatgtcatctcccagaaactggagcaaaacgtgacagctctgggaaactgggaagtgagatgatggagaagaaggccaaagctcactgcagtgtgcagggtccaaacagcaggagttcccagggaaggcagaggccaggaggaggtgtctggaattcagaaggccccaggccaaaggcagagtctctgggctgcagggacccaccaggggtaagaaagaccctcttagggagaaacagcagagcctcagaatgcagggacaggtgagagccagggcacctgcagactccatggggcctgcggccatgccagttttaagggcgcctcattgccctcctgaagtttgtgtcccgccaaactgccgggtgagtaggaaggtggcacagaggcattccaggcatgcaagggccagagctttcaccctccagctgttcttcctcaggaagccaccggaggacacgctgtcccagggcaaaagaacattgggaggcccatcatggaggccggcctctactgggtggtctgtgagagggtggcggccaggaagtctgagatcgccctgcagggagaagctgatgcagctacccctaggaagggggcacgcgctccttggggagaagatggcgcatggattgtggagtacctagcggaggcggggagcaccgctggggctggggaagggagccctagagggcaagggcggcagagagggcaggcggctttctgtccgggagctgggtggacaaaggccatgcatcgaggcactgaggctagagtgtgctgtccctcaggattctccagtccttaccaggaaacgtcactgcctccccatgtaacacctcagcttctggccgggttctccagcatgggaggggctgcctgtgggccccatgaggggacaagatctttgcctcgatgtcaccggggctgccacagcaggggcttcagcaggcgtgggagttgctgagcagcctcaaagcatcagctcatcaggccgtgtcctgcacacacgcagttctgtgcgcccacctccacgcctttcagaatggcggctgctcctgacaccttcatccattttcaaaggaccggctgttggtccatcccctaccaccttcagtctttcaaacctgtggaattcagtgggcggaggatggaggcaggaccagctccaccagcagaaggatgaaggcaggcttagctccaccaccttgcttaggtttctaagctagtttcaaacaaagtttaagagagatgatcaaaaaggaagacccctttcttgtttttggtttctttattgaagtgtctctgcagcatccctttgcaccattcctgttctccgaaggcaaccattctagtcagtttcttttgtttacaggaaggttgatcattctatttcttgttctttcctggaaagctttgtgctttaaaatctgttcacattcctgtgaggatgcctctcccattaccttctcacaactcaagatcgatttttgaatttccgacaattgtcctaacccagaaacttcattatcatcagtctaagtatttcagacatggtaatagctgatgattatcttgagttttgtgaacataaccctaatgaggtgtttaaacactactgtgtgattttttttctttcctcttttaatggaatccacaagccgctaagccgtgtgcaagggccttcatatttcctttctgatgtggtgagatgccacacataaggcgtggctgaattggctcgtgggcctgaggcaggctggccgctgccctaggcgtcactgaaagtcacgtggctcatctgctcatgtcagctggcagggtgctgcatccgggcagagctgggcccctggcgagtgggtgccggtgatgctcagggtagggtgcggcaggaaaatgacttggcacagcgagggcctcctcccagccagggagcaggagcagcagcgagaggatggctggagccgagccttccctgccccaggcacagaacgcctgtctgccagcccgcggcaaacagacaagtagtaaggctggtcgtttgcagagcttcaggccctgtcaccaggctggaacgtttcgtggcctgggcttggtgattgtggctccaaaccacaggaggccgctgggctcctcacaactgtcaccaaaactctgcctataactccattcctatacgcatgcatttggatgcataatcgtgtactttttctttgttgttttggtctttgctagataatgagcaaactcaaaacagtcggatgacttgtggttttaatgtagacatggttggctatgatttcaaagagattcagtctcttgcagatacctggacacgtgtgtctactgtgaattcatatagctgagcgcgtgcattatttggaaaacgagctccctagtttctggcagtgtctttcccgtgcgttggagtagtcagtgatggaaggacgtggcccacggagccactcccagccccagctactcagccactcaccaaggccatgaccgcccttccaaggcagcacccgcccactgtggtgaggttggcattaggtgaccccactacagacgacgggcagcaagcaggacagcaggtggcttggcaccttggcacccacgccctcctcctttttcagtctcgttccacctgcgcactagctctcttgcccaccacatcccgccagctcctgcccagccccagcacctcccaaaggggtccggcgtgcaggccgcttccccgcatggtcagccccacgtccactacttgctgtcaccaaggcacagaggagagcagggccaacatgcctgcggggatgagggctgaccaccatgaggttcaggcgagaagtgttagctgatgttgtcccatgtgccacgctgacatgtggacacgggaaccagggtcaggagccacgactccaggcagtggcgggtccgtgagccatggacacggaggaagtaggcccaggacagcgcccaggaaggggaggcatgctggtgctgctgccctcagtgggcgtgagggccaggacccagaggccgaggcatgcctgctgagcgctgcagggagagccagggccgactgaagcccctgctggctcaatgccttgtacagcccaggcagggaggagggacaaggcgggcacagaccctgcccttggagccaggccaggtggagaggagcgcgggctccctccgacacaggctggctcctccgagcacgtaggcctttgtctggaaaacgtcacagcatctgcatggcgcctgcgcccctcagctggccgggccctcctagcagatgggggccgggcctatcctccctttgcctggggggcctgggagcccctgagccccttctgaaagtggctgcagctgctgccccctgcctcctgcctcctgccctgctccctgttggcatggcagctccccagccccgggccgtggacgtggccattctacaagcctccggccttgatgcagatctgtgacctccacagagtgagaagagcctgagtcagctctgtgcatcgggcctcacactagggcctggctgtggctgtctgtgggacatgtgggtgtctgtggggggtgctggtgtccgtgtggatgtccgtggggggtgctggtgtccgtggggtggggtgggtgtctgtggggggtgctggcgtccatggggggggtgggcatcagtgggggatgctggcatccatgggaggtgctggcatccgtggggggtgcaggtgttcgtggggggtgcaggtgttcgtggggggtgtaggcgtctgtggggggcgtgggcatccgtggggggtactggcgtccatggggggtgtgggtgtccatgggggcggggcggggggcgggcatccatggggagggtgcagtcatccgtggtggggtgatgggggtgcagtcgtccgtggtggggtgatggtgcaggcgtctgtggggaggttgcaggtgtcggggggggttgcaggcatctgtcggtggggtgtgggcgtccgtaggggtgcgggcatccgtgggctaaggcaagcaggcctctgtttagcttctcgtctgtgccagccactctcctgcagcttggggccatcgcagttgctcttcccagccaggcacgctgttccctgaggaagggttcctctcgtgctaaccgggccggcaagccctccaggcaagaggcagacaggccctaatggacctatggccaactccttcctatggcccccggcagccagccctaggagcgtggaccagagcacacagagtggaggctactgttctggagcaggctgagaatgggagaggagccccacagcggggggtacagcccagctgaggccagaaagtggggtcccacgttggataaaggagcctgttacatcaagccagtctccctggagcatgtgagatgtcactccagctccagcccaggaaggggccgggggctgcggagagtgagggattggggcccaggcagccgctaggaatggtaggtcccgcccctggttagtgggggtctcttgtcctccacagatgggttttaagctggtgacgtgcattcagccagcactgggtcaaacaggaaaaagacagcacccctgtcctgggagcactttcactgccggagcaggcgcgggtgccagagcagtggggtgggggtttcgagggccccgatttccatgggaggaggcctggcgtgcagctgcagcgtccttggagccctcagtcagctgtacacgctccgcctgtgtcgcagggaggggctgtcgctgcatacattcccgaggatctcagggtctaagaggcctcaggacccatgtttaatcccgggacttgccccttgtttgccatgggagggggctgctagacaagccctaggagctcactgaggagccaggctcggggtcctggagcaggatttgctgttagatacagcccctcaggggcacgggctgcaggcagacgcccaccaggggtacctcgtgctccccagtggcttggtgcctctcctgggcccctgacaggctgatgccacaacaatttgaggtgtccccaccagggtctgtgacccagctcagccctcacaggagtcaaggcacctctaagggccagacactgaccctgcagcagggccacagggtgtcacaagggggagcagtggcccctcgttgtcccacaaatgcccaagtgccactgaagaccccggagtgcgcccagggcctgtcgagcaccttggccgcgtgcccttggcctctctgaccgtctccctcccccccacaggctcgctcgcctccgtgttcgtccggctcccttgcggtggtgttggggtaagtgttcctttaatgtgtaaataatgtcctgtttcttctcgagtcccagtggtcacagaaatcgcagccttgcttccctcaaagtgaataattgctgccaggtgttttccatacgcaggggctgcccatgtgcggcttcaaaggccgtgtgagccgagagcgttttgatcgccgactcgggcacctttctctggggaaggttgtctggcgcaggtggctggggctctggggtgcagtggctctcgctttaagaaacaggatcctgtatgcagccagcatctcatccccttcgaagtctgtggcagtaatctgctcacatcaggccacgagtatggtgcgggtaggatgcgtgcttctgtattctgtacctagtttccacccgaagctacaggtggggctcccagtgcagtgaccgtgatactcatgggccacgtggagtctgtagggctactcgctgggctgtgctggcttctgtgagctgatgatatggacctggcctgggcatatgaatcactggtctgtgccagcttctacgaactgatgatatggacctggcctgggcatatgaatcactgggctgtgctggcttctacgagctgatgatatggacctggcctgggcgcataagttcacaaggactttccagtctgggcatctgcccatccgtccacacaggaagggtcaggtcttgcaatcaaacttctcaataacaaaagagttctcccctggcccctgacctccttgatgcagcctgggcaggggtggcaatagcgagggcggccatgagaagctgaggcggagcgtccgagcagatccgggccatcatggtcctgcagtgccgcgaatcaccacagacggttacaggcagggaggacgggagccggtggacagcaggagccgctgcagccgaaacggtgcagtgtgtgtgtaatcactgatcgcagggtgaagctcaaggtctggattctgttatggaaatgaaacaaaattgttttcttcctgagtttttataaaaatcactgctttgaaaattatcccgtcagaaagagaataaacggcatttattcataccaccaccaagccctcctagagttattttattttgtattgtaaataggctgcaatctcttaatttggggcatgtttttggccagacttgaaaaggattgaatttgcactgccctgcagccagcacgcctgtgcaaggcagaatttatcatttgcaaatgaaagctaagtgcagactcagagctgagggggtgagcccagcagcccctcccaagtgttaaatccagatctgaggcacagcagatgagagctgcaccctcacgtctgggtgtgcagatgctgatggaaaagctccccacgtggacgcgggcagagagggtagcctgttggcatgggcagggaacagtgcaggccgtggggcttcctgaggtacagccaccggcaggatgtgttttcttcccattgttttccaaaaggaagaagacagacaggaggccggtgcagacccctgccctggtgtgggatgcacctgctgtcgctggcacagatgcagctctcctgagcctcatgtctcctccagagccaggaggggccagcctcctggggtgtcaggaggagcaaagtagacctcgggagccgaagtgtgggcacacagcaggtgctcttgtcagggagggcagagcaggtgagcagagccagccaccttccccgaaagcagctgcaaactctcccggaggcagaacagtggggcttggaacacggaaaactcaccactcctcggcgctgggaaatgggagctgtaaagtgctttgacctctttttcaaaccagatcagctcctgcgttgctcctctccagtgaccgcaagtttcaactgggtgaggagctggtgtccctgctcggcctcgcccagcggagtcctggcctgctctcgtacgcccggctccccgcggctcctctgagcttcccaaaggcctcccagccctgccagccctcggcatgtcccttttagactccatgggattatccgtgggaagctttctccatgtttccccccgcctttttcctgtctttattgcgaaagagagagaaaaggagaggagagaagcgagagagagagaaagaaaggaaaagaaaacaaaaaaaaaaagaaacgaaacacagagtgagccatttgctccttcctgcattagcagttgcggccgcctgccctgagccaggctattgctcagtggtggcgctgcacgcctgagccaggctccctgcaagaggcctggagctccaggctggtccctgggagctggagccgtggtcctgaagcaggcgaaggagggtctcttgagttctctggggactggggtcctgcagtttggctggggctttgtccttcactctgtgcaagactccagaagcttctgaaccccagggtcccatgggagggggcacagacacaggcacctggtagaccgagcagctccttggcaccccaggtgtgcagaatccccagaagacccttcagaacacgggtgtagtacaccctccgctccctgcagtgttggcctaatcccaaagcctagttcattgtatgttggagagaaaccatctctgggtgctgtccccacaggggcagcctcggggcctggcctgtctgggaccccgcctctgctggctgacacagagcaggtggcagaatcttgccctgcccagctctcactcctgcgatgtcaccttggatttttttttttttttttttcctctttggagacagagcttcagtctgttacccagactggagtgcagcggtgcattcatggctaactgcagcctcgacctcctgggctcaagtgatcttcccgcctcagcgtcctgagttgtggggactacaggcccaggccaccacatctggctaatttttgtttgtttgtttttgagacggagtctggctctgtcgcccaggctggagtgcagtggcgcgatctcggctcactgcaagctccgcctcccgggttcacgccattctcctgccctagcctcccgtgtagctgggactacaggcgcccaccacggcacctggctaatttttttttttttttttgtatttttagtagagacggggtttcaccgtgttagccaggatggtctcgatctcctgaccttgtgatccgcccacctcagcctcccaaagtgctgggattacaggcatgagccactgcgcccggcccacatctggctaattttttgaaaagaaaaccatcaccgaatacacttcaggaaatgtcttcagccccttgaaaatgcattttaactcaccttgctttgatgatgaagcttcaagaccgcctggaaagaaatcctccctccccacataatgagcggtgtctatcaagtggcaagtctgcctggtggtggacaggagccctcgagggcctggtctggggaagggagaggcagggtggacacgcctggctcctgcttaggagccccaaagcactcggcgctcagaggggctcagtttgagaaggaggcgtcctgcaatggacctgcaatcgccctggtcagcaccgtgtggaagctgagcaacctatgacacggcttctaagacctccaccgggctgggcacccccaagtccccggtgtgttaccccacagcagcttgcaggcaagggacacacttggggacagatgctcaggttccctggggccagcccaagggctgtgtatttcatcttaacacctccctcccctggccagactcccataggagactgctctgtgcagaactggctgtccaggtctctgtctgtcgactttcctcctgaattgagccagggctgtaagaaatttctggtgtgcctaaataaataaatgagccaacacacaatcggggattgttgacgtgtttgtgtgaaacacgttttctgtctgaagtggaaaaggccagcgggctgacttgctggtgtccaggcagagccgtgtaccgtcactagggcagagcagggcagctctcctcacccgcccacacggccagtcccgcttagctacgctggtcaacatgtggagcttccagttaaactcggcacaggagaaagtcactattggaagagactggtcgtgattccccttacatttcattttgctgctaattatttgacaggtcgactatcccttatccgaaatgcttggggccagaagtatttcagagtttggtgtttttcagattttggaatatttgcattgtacttaccagttcagcatccctaatccaaaaatctgaaatccagaatgctccagagtgcatttcctttgagcgtcacgtaagcgctcaaaaagtttccagttttttttttttcctttttggagacagagcctcactgtgttacccagactggagtgcagaggtgcattcatggctcactgcggcctcgacctcctgggctcaagtgatcttcccgcctcagcctacaaaatgcttttgtagtatttcggatttcagattctcagatcagagatactcaagctgaataactctcttaactacagttccagttaaaaaaaaaaaaaaaaaaaaggaaatagatcaccttgacatcattacttttagatggaagtatactgaagcaattgagggaaaggaggatgcctcagaacaggtcaggacacatgcatctttcttctggtaaattctcttgtattttcctgtttaaactttttggcatgtcttaaaaagattgaaggctgaacgtgggctgcagctgccctggctctggtaggccctggggtttcagaagcagagcccacggaacctgagctgctctgcccagccagggctggtgatgacggtggcctgggagggtgacctcactgtggggtgttgtttccacaggtggacagtgacaccatatggaacgaggtgcactcggcgggggcagcccgcctggctgtgggctgcgtggtagagctggtcttcaaggtggccacaggggagctgaaggtcagtcggggcctggacagtggtggccctccaggaggcctgccatagattcccagtgtggggaggggccgcccactccgtctccctctcatcaggctgggaggcggctgtgatggggaggcgtggaccccactctgtcagcacagcctcgctattgaatcaaagagacattgcccacatttgtgatagggtatgtgcatagtacagagattctcaatgatttgggtcttaagaaccctttatactcttaaaaatttatactcttaaaaaaaaaaaaaaagctccaaagagcttctgtttacatgagttatatccacaatattgactctattagagattacaactgagaaattttcaaaatgtttattaatttaaaaatagcgaccgggcacagtggctcacacctgtaatcccagcactttgggaggccaaggcagggggatcacctgaggtcaggagttcaagagcagcttggctaacttggcgaaactccttctctactgaaatacaaaaattagctgggcatggtggcgcatgcctataatcccagctacttgggaggctgaggctggcgaatcgcttgaacctgggaggtggaggttgcggcgagccgagtcacgccattgcactccagcctgggtgacagagtgagactccgtctcaaaaaaaactaaaaaattaaaaagtaataaaaaaataaaaatagcactaatgtcttgcctgtggacagcagctggttctcacacctgcccggcgtcattcttgggacatgttgaagtacatgaaggaatcctggccccacacagatacgtaattggaaatgggagcaggattttaatagacttttcagaggtattctaattgtgggtattctttgacagtataccaaaaattcagcaagtggtagtgtcttgaaaattagctgcagtgtggatctgaaatcaaatcgtggcctcctccccctccgttttgtttaactgaaccattagcccttcttggagatcaaatcgatccttcgttcatgggtgattggtagcaccgtgcgttggtcatttggaaacttagcttcacggagttacatggatcttccatattctgacccatacagtatcaaaaaagtcattaatttttgaaaccattaatatcacccccatctcaccagaagtcttataagtagtgagagagccagcaggctcacaggggcagagccgtgtgttccaaacttgtaattttcactggaaagctcacagtttctcacgcttccttcccgtctctttactcgggatgttaaaaggacgtgtttgagggcggagatctactaaaatgtctgaatactgcttcatcgagcacattgttaagagaagctgctcacacacacacacacgccctggtgctgttccctgcccgccgtctaccctccggtgcttcagcaccatcggcgcaggtgtcagggcagtgaaaagagtacatagagcctcaggactacgtggactacagaccctcagcaggggtcgggaccgaggggtctgcagcctacactcggaagcactgagtgcagaaacgcagggaggccagggcctcttgagagcgtttgccgccacctcatgggctgccctcgccccttcctgagcctggtccctgcggcgtccggctcaccccgtccatggcattgtcactcatggttggccggcactttttttgaggcttcattacagaccttgaccacacagtgtcctgttgctggtgagaccaggagaggactggaatccatttttatggcagcaactacagagtggtttgcagatggatttttgacgcagaagtgatggggcagaggacagcgtttctgcccagtgtgagaggagctgtttcgtgggctgcccacttgcccgccatcctgagagctgaactgcagtaaggacagaggcagtcacgtgaaggccaagctgggacacaacgtctctgccccgcggccaagtccttgagtggggccccttctgcttcatcttcctccagtggccacctagcgggtcctggtcccgagccgacggggagtgagcacatcctttccacatcaccccgacccctgagccaagggcaccacgcctcaccgacagttctgagagtgggcagggcacccacctgttatcctagtgactgcgtttcgggggaaccattagtagcccccagacctctttaggagaagggcccaggcttcccggaaaggctcccagctggccctgcatcctgtccccatcactgtggccagggtgcagcaagaaactgtcctcctgtgtagcccaactctgctaaaagttgagtgtgcaaccattttcccgtggctacaaagtgtgtcttttgttgctctctcctggctgtctggtgtcacctgcagaatggctttgctgtggtccgcccccctggacaccatgcggaggagagcacgcccatgtgagtacacgccgcagccccgcacagcaggggaacccaggtcttccttccctcccttagggctgggtgggtgtgtgagtgactgcggggagctgggctgctgtttgctggccacccaggatgtgccgcatgccggcttggctccagctcctgggtgtggagtgcagatgccaaagtctgcgagcatcactgctcggttatgacggagacagatcagaggaaaggatgggaaagggtctgtggaggttagtccagagaagcctctggttgttgagtagttgtcaacacttgggagaggaaacaccactcaccctcaagtgagtcactgcagcacttgcttgtctagaggactcaggtcattttgcgcatggccttttagctgcctgccgaatgcctggtactgacgcagcaagccacagagccacgtccatgcaggcagctatcctgatgctgtttcgggtctttcagagactgccgacggtccatacagctgaggatctgggcagggtggcgagtgtggggtgtgggtcctcccggatccatccctgtgtgtccagagccagtggcaggacagacccgcagctgtctgtggagtgccttgcagcctgggtggtgaatgaatgatctatcccgtcaaagagcatgctgtctcctgggacggtagccgctctagtgaggaggggtggtgctagaaagagcgtctccccatgctctggagatggagaaggcgtgcctgatcttgccagcttcggtgaggaggaggtggcatagggctctgccttggagagttggagcagcagtttgtcagatggcaacgcaagaacaagtgcagatacaagttcactatcaggctgtggccaggaagcagtcagaacaagacagaaccgcaggggcccgggaaagggcctccctgtcacccctgggaagtcaggcgtccacggaggggccggcaggacgtgagagatagtcagatccgcgtgttagagcagaatctccttcacgtacagggaggagactgtacgtgagagatagtcagatccacatgttagagcagagtctccttcgtgtgcagggaagagattgtacgtgagagacagtcagatccgcgtgttagagcagattctccttcatgtacggggaggagactgtacgtgagagatagtcagatccgcgtgttagagcagattctccttcatgtacagggaggagactgtacgtgcgagatagtcagatccgcgtgttagagcagagtctccttcgtgtacagggaagagactacgtgcgagatagtcagatccgcgtgttagagcagagtctccttcatgtgcagggaggagactgtacgtgagagatagtcagatccgcgtgttagagcagagtctccttcgtgtacagggaagagactgtacgtgcgagatagtcagatccgcgtgttagagcagagtctccttcgtgtacagggaagagactacgtgcgagatagtcagatccgcgtgttagagcagagtctccttcatgtgcagggaggagactgtacgtgagagatagtcagatccgcgtgttagagcagagtctccttcgtgtacagggaagagactgtacgtgcgagatagtcagatccgcgtgttagagcagagtctccttcgtgtacagggaggagactgtacgtgagagatagtcagatccgcatgttagagcagagtctccttcgtgtacagggaggagattgtacgtgagagatagtcagatccgcgtgttagagcagagtctccttcatgtacagggaggagattgtacgtgagagatagtcagatccgcgtgttagagcagagtgtccttcgtgtacagggaggagattgtaaccgccagggagggatgcttgttggaatctttgtagctttacctgaaaaccacgtgtttgctccacatcccagaacagtcacttgggcaccaggcttcctgtttgtttcatttctctgaagtttcttttctaatttgaacctgagttgttggatattccaaataataaacctcagaggagacaaacgaattgtgttttgttgcagctcttcgctgtgctccccgtgagccgctgcaggagctcagcgtctaggatgtcctggggcgtgtgggcttccccatgccagcccggattctgaaaacaaaacaactagtgtttctccgtttctgtggtcattcggacaaagggaatttgagatcaagaaggttttcgttgttatttgaatcactttcatagcttgttttcttggtctcttgagtaagactctctaaaattaaaggtaatttatgtattggaatataggaaggtcagcaggaagcaactgagatgaacggctgccatgtctcctggggcgtggcggcagctcctgagaggaagggttccaggtgaagatgagggaaatgttggtaacatgtgaaatagggttccctaccagaggagcgtgggggacctccaagcaggagagtgtgtgtgtgtgtgtgtgtgtgtgtgtgtgtctgtctgtctcagtatggaactgtggatgtgtgtgataggtatatgcttatgtgtatatgtgtgtgtgtgcttgtatgtgtctgtggtttgtgtgtgtgtgagtgtttctgtatggggtgttcatgtgtatctgtgcatgtgtgtctacgtggggggggtgggtatgggcgtatctgtggggcatatatgtgtgtagggcgtttgcatggtgtgtgtgtctctatctgtggggtgtggggtgtgtgtggggtgtgtgtctgtgtggagtgtgtgtggggtgtgtgtctgtggtgtatgggcgtatctgtggggcatgtatgtgtgtagggcgtgttgcatggtgtgtgtgtctgtgtgggagggtgtgtctctgtggtgtgtgtgtctgtgtggggtgtacgtgtgtctctgtctgtggtgtgtgtgtctgtggggggtgtgtgtgtgtctctgtctgtggtgtgtgtgtctgtgtggggtgtgtgcatgtccgtgtcggttagccgaccctatggcattggctaagattccccagtggcttgtttgggagctgtgtgtgtgtgtgtgtgtgtgtgcgcgcgcacgcgtgtgagtgtgtctgcatgtggggtgtgtacgtgtctgtctgttaaccgattctccggcatcactgagggttccctgcgacgtattcaggagctctgcactcacagagacctcttaggtctgcgtggaccccgagtggctctctggcgggccgtggagaaactggccaccgcccacctgcgcttcgtctccagcgtcagttctctcccgcaggggcttttgctacttcaactccgtggccgtggcagccaagcttctgcagcagaggttgagcgtgagcaagatcctcatcgtggactgggtaagcagagccgccttggccagcgcagctcaggttgctcctttgccgtccccgagcggacagcagcgtgtggacagaggagctgggctcttggatgtgggaagcttaggtttctggaaacggtctcaaagatgcggagaagtaaagccccaaacctgctacaagtcattgtacagcttccgtcagccgaccctggcgaatggggtcctggcgtgtctaaaaatgtgcctgtgggtgacggcagcggccagggccaccctcgacgagatcttcttggaagacaggtgttggggaggaggctgtgtccacatctactttgcgtgtgtggcctgggagcctgggaggaccctcaccctggtcgaaggcggcagtctgcttctcagtcaccccagtgaagcccgtgccttcctgctgctgtgtgggcacctggtcctgctggaatggggggtgccactgcccccaaaagagtcatctctttttaaataatgctatatgatgtccgaatctgaattccacgaataggtatactcattcttataccggaaattaatattcaagatattcatcttattactctttttaaagccagatatatacatatttagtgttctctttggtatttatgatttatttcataatttttaagggaaaaaagcaggccctgtcaggtagggttatgatttgaattggagaagtccttctgagtttgggtaaagaaacaatatggcacagccaggacagccatgctgtttcggagaggcaggtcaggggatgcggcagagcagcgggtcccccacacccaaggacctgcgagccgggagccctccctcagctcctcctaagggagcaggtaggagtgcctgggaagagagcagtgtgaggtcgctgatggctaaagactggggacccatccccaaaagagtgaagcgctaggacacgcagacaggctgcgtagaccctgtgtggcgtgctccctgcgcgctgagctgtgatattgcccatgtacacaccatgcggacagggtcatctcagtgtgaagccacatgtcgggaaagcctccatgtgcgtcttcacagcgattacctactctgtggggtggaaggttcttgtccatcgctcctcacctgtagctgcccttccgccttttctgtgatgagcacagataacggagcagcaagttctcgtgctgggaacatcagggctgcatgctgtcttctcaggcacacagctgttctcagcggggccaccccctcgcccgcccatcctggtgaccacctgccctgtggcccggggcagaacagccacggtcagtaaagccccaggctgcctgtgctctctgctgcatctgacctgtgggttttgtgattaagaaacggtgcttgccatttgggcacaggggcctggaccccgtactgtgtgtgcctgtcactcacggacacctgggacttgtctcctgccgaacgccctgcctggcatggaattggcacctcccacgtgcctgcaagcgggcaggccacagccagtgacctccttcctgacagaggctgaggaagtggctcacttgtcagagacacggcaggtgtaggaaattgatcagatggcttcgtctgggaaatggtggcctctaggcctggctgaactccagccccatcggctgctggagtcaggattgtgccatggcgctaagggcgagggaaacagtgctgcagacgcgaacattggcccttagaacccctgcgaccctgcaccacgtagccctgacccacacagccccagaatcgcgcctgccgggtacgggcccagctggagggtaatgtcattcctgagcaggagccgttgtcactaagcacaactggggttggggacggccctcaggggaggccaccctccaatacctgcctcagccctgaagtagttgtccctgctctttaaggacgtgcaccatggaaacgggacccagcaggctttctacagcgaccccagcgtcctgtacatgtccctccaccgctacgacgatgggaacttcttcccaggcagcggggctcctgatgaggtaggtggggtatataagggcctctggggggaaagggggactgcggggagccgctgtgggggcacggggcagacggtccacagctgcccggcagcagtgagtgcggccttcgtgctcacttaagcccagacagtaacttcagtcagacgtcagcctgcatcgtatcgcgtgtgcacaggtggcctgtgttttgtctgaagtacaaatgagaggctggatattgtttctggttcccatccaggcagacagaggtgtttgtgaaggaggaggtgtgtggtgcccgttttcctccgggcagggcccaggccactgtcttccacaggacaccctccggcaaggggctctgtccactgtcctttgcccggcgcggggctgcatggcggccccaggaacggcaggcccagcggctccttgacaacgccccaggtccccgttcagagcctgcccactctgaacagaggctccaacagcagggctttcatccaggaagacgctccgtctgcctctggatattatttttttagaggaagtaggaaatgacaggctcatcggagacactttctgcccagagagacccaggtctgattccctgatgtaacacacggcacacaacacagggcggcgggtccgcagaaatgtcagtgcagggccttggtgtgccaagggcagggtcggcgagagcctacagcagccaggaaaagggcccccttgctgatgtcagtgtgcccctgtcagtggggccccttcacacgcgtcttaatgaatatgcaccaggagatcaggacacgtgggctctccccaggggcccaccaaggccgagcccatcccggtgccacctgcatcaggcgttcctgtcagacaggtcccgctcggggtccatgacgtgtgtttctctccttctggccacaggtgggcacagggcccggcgtgggtttcaacgtcaacatggctttcaccggcggcctggacccccccatgggagacgctgagtacttggcggccttcaggtgagcctcccggcttcacatgacacctgaagtagcagcttttcctctgtgcacacattccaggaagcacttgttggagatgagcgtgtctgaaactggtctgtggctgaacggggctgtggggtccggaggagctgtctcagttcattcttcagtgccaagcgtggaatcttggcgactatcttcttaccatcagctcttagtgctcccttttgtgcatgaaataaaaccaggagctcactttgggtcgatggtgagagagtgatggagacagaggcagggacttttgtgcagagtgttatgttcatgagaaacgaaggcaaagacctgcagggtctcatgatctcctaattcttcttccgcaaacctcctgtgatgtgatgtccaatggaaataagtatttcttctttatttattcctaaaaatcaaaggcagttgtcgccctccctcccatttccttcgtgtggctgtgacccttcagcatttagccgcagggcgccgtttaaagacgcagtgtttgcttttgtcatcaagcggttccttctcctttggtctaggccagattggggtcattcctgtgacccaaaatgggatgctgagcagcgcaggttttcttgtcatcgttttaaaatggcagcttcacctgccgtggtggagtgacgggcgtccagggcagcagcccacagcccacatcggttcccagagccacgtgaggagaagggttttattagcgtggctgagcctgacatgccgtgtctctgttagaaaacgctgtcagtatggtgtcaaagccccatacagtcttcagcgcttttctctttctctgtctccatggtcttgttctgatttacatacatataaaacgcacgtgtgcagacgtgtctttgtgacgtgtgtgcatgtgtctgtgtatggatgtgagtgcacgtctgcatatgtgtgtgtccacgtgcgtgtgtgtgtttgtgtgggtcggtgttcatctgtgtgtgtgtgtctgtgtgggtgggtgttcgttcatctgtgtgtgtgtctgtgtgggtgggtgttcatctgtgtgcatgtctctcagtgcttgtgcaggtgtctacagccatgtgcatgtctgcaggtgtgtgtccatgcctatgtgtgttacacacatctgtgtgggtgtggatgcatgtctgtgtgcatgcagtatacgtgtgtgtgcatatctctgaggacacacccatgtgcttgtctttgcatgcacatgtctttgtgtgtatatcgctgtgtgtgcacatctgtatatgagtacacacgtgtgcttgtgtgtctttgcatgcacgtctttgtgtgtatatctctgtgtgtgtgtgcacatctgtatatgagtacacacacgtgtgcttgtgtgtctttgcatgcacatgtcttcgtgtgcacctgagtatgcacgtctccggcaggtgaggcccttcacaaggacatgtgtaaacgtcttgtgtggactctaccacatgctttctggggacggtgaataagtcacgagacccctctcagtgtctgctcactcttctctaactggggtccgttgccctccttggaaaggttgttgagatctggtaacataaaggccctggcccaggacacgtgggcccccctccccaggcactcagtggttcccagagggaacagaccccatctgacggagcccaggctgcttggctgctccggcagtgagcccgggctgtgccggtgggagttcatctgctcctcagtggacctgccctgatctgtacctgaaccacttttcccctgatctcatcggtttgattttgatgtttcttcttactcttgatcagatttaatgtaatgttgacagatgccctgcctaatttaagagagaaggacgtcccccaatgtgtaccacttccgaaaatgagctcatatgaaatcggacccctggcgtgggcgtgtcaccatctgctcatggaatgtgctcccgttgcccctcacttagttgtcaccccagagaactggccccccttggaggcttctctgaaagcaaagtctctggccaccataagaggtgtgcatgctgcctgatggacttcctgcctgagtgaacactggtgccacccgggggacccagggcccactgtggccaaattcccgtgcagagagagaaggcagggctttcctggtggacggggagaaagggggtgctgccctctttcaggtcagtggtcccaggccaggttttgatggagccaccctcaccccataggcgtttctcagtggtgccttcggctcttgggtcctggggtgaaaccctcaccccgtggcatccctgctggcgggcaagcccaggcccaaagcagcaatgggcgtctgccgtcagggtcactccccctccccaggccccggccggcccagccagcctttaggatgaacgtgcctttctgagttgctcttggcgtgtgctttaatctcctgccaagtgtgtccgtgataataccttatcaagtgaactttttaaagcttaaatagcatctttgaaaaggaaaattgtttcagggttttttttttattgattttaatgtaaaatagcactttgaagtttacaatttatggttccctgggcatccgatgatggggaagaagggtcagaaattggttttcccctttcttctgctcttctcccccacgggggccccccggggacaatgcatgccttccaggcagcaccttgttattcagacccgttgcctgccacattgcattttcaggggatcaagcctaagacgaagaaaagataagaaaattgcccctaatgaaatccagaagcagccggcactttctcctcaggcccggagactcgtaggagaaaagggaaccttaattcaaaccagtcccggtgccagacgcggctttgaagttgctgagtaaagtctgagccgctgggggtgggggcttgtagggagatgacgatgacgatgaagatggtgctctgtaacccatccctcacctgtgcgcggggacatggggactcttccgtcagggatgagcgccacatccagatgcccgtggttcgtagcttagattccactgtgatattacgaagtttatcaaagatgtctctgaaactggatcttctcaagcaataactgtgatagcttcacgaattggcattagccttgaaattgagcaactgggcaaagctatttcactttccccaaactttcaagtaagacgggaaggctgaggctcttgaatgttcgttccttccgtaagctgtgttgctgtgttgctgctgttgctgccttttgtagacaggtgtgttttaggagtcgcagcgcctgatgtctgctgttttcaccattgctgagtggcacccgctgcacacaccacgctggtccctgggtttcttgcctgaggaagtcagggttatgaagttttcatacagaccgtgccaccttcttttctaaaagcaattatgtctctttaagtgcatccaagtattttcctatgtagaaatttatctgagaagcaaaaagaagcaaaagcatataagctacagcctcagagctgagagagctcgtcctgcgccagccttcgctcgcctgtggggccggccctgtaagaagcgaacagtggagccggcacagtgcctgccctggaggatagcgggggactgggaggacaagctctaggcaggcccggtaagacctcaggggacctgcccacttggtggggccaaggaagtttctggaggaggcaagcccccagctgagtcctggaagaacgagcctggcacgggacattatgggagaagggccgtcccgaaggaacagagcccgatggtgcaaacccgctcacctgggctgcatccacagagccagaccttggccctgatggcaggggctctatcggggcctctgactgtggaatgaagaagcatcacggccagctctgcatgttggacaggcccgtcttgtggcagcttaggtgacagacttggacctggcaaagagcattccagggtaggatctgggggccagtggacaagcccagaaaacagcggcagagattgggacagggccacaggctggtgaggtggggccatctcaaagaggttgaagtgagatgggattgaggggagtaggggctgattttgggggagagggcacttggtgaggtctcgaggtgctggcttagaggaggctgaagggtgctgggcagagatccagcgggagaaggttcaggtgggggtggatgagggttcagtggggacgcttttgcttcagtctgttttcaggaaaaagtgagaaagtgtccatccaagtgggtggttgggagcatctccacctggaggccccttagtagggagagccagtgaggagccagtttgtgtggacgatgccccagggcatttattggggcagaacggcagccagaaactcaagcatggcgtgccagccctgagcccagttcccacggagtccccagaggcttgccggctgtgggtggccacaggactgcagcctcttggccccataagctcggtttgctctgaggcttgtgttgacggaaggtgtggtgagttttgtttagggtcctactaggggaatgaactggaaggtcatttctttccagatgttgaaacccagctgttaagtgaattattgcatttagatgcagttgtggcttttgaggatggtatgtacaggccataatttgatggtatgtggtggtttagagctagacgtgccccgtgacacagccccttgcgcagagcacagctgggaggctgcacgagcgatggcctttcgaggaagcagagtggccggcaccctgcctgctgtcccggtccagctctgttccccctgggaagccgaggggcgtggccaacacccgcctgctgttccaacccaacccagctctgttcccctgggaagcccaggagagtggcccggcacccgcctgctactgctatcccggcccagctttgtttccccggaagctgaggggagtggctggcacccgcctgctactgctatcctggcccagctttgtctcccaggaagccaaggagagttcgctggcacgcgcctgctactgctatcccagcccagctctgtttcccaggaagctgaggggagtggctggcacccgcctgctgtcccaacccagctctgtctccctgggaagccgaggaaagtggccagcacccacctgctatcccggcccagctttgtttcccgggaaaccaaggggagtggctggcacctgtctgctgtcccagcccagctctattccctgggaagctgaggggagatgtcgtcttcaggctgcaggtgcaggttggctgatgaccgagtgaagggtgcagtgctgtgtcggtaacgaaggtgccagagaagccacattgaggccacgggaaggggatgcgtggcaccccacggcttcacacgggacctccctaaatgcagaggccaccgcgaggagaagccgctctctccccttagcaccacgtttccctctgtacgtgcctcacgggcacaggcaccctctgggcaccacagtcatggcttccctgggcttgccggccccaggggtgcaccttacaggcatttgtccaccttctctaaagatcccctctttccacccatttctcctgcctcttgagctgacgatcagtggacgatcagtgggcctactgccttgggaaactgcgagcccacccctctctcccctcaggttgccccaagaaaggccaaaagtgacctcatggaaatactctccttaaagtgatggcttgagaggcccacggcaaacatctcaatcttatttttttagagactgagttctttttttttttttttttttttttttttttgagacggagtctcattctgtcgcccaggctggagtgcagtggcgcgatctcggctcactgcaagctcctcctcccaggttcatgccattctcctgcctcagcttcctgagtagctgggactacaggcacccgccaccacgcccagctaactttttgtattttttagtagagaccgggtttcaccgtgttagccaggatggtctcgatctcctgacctcatgatccgcctgcctcggcctcccaaagtgctgggattacatgtgtgagccaccgtgcccggccgagactgagttctttattaaaagtttaattctgggaataaaatgtgagtccagtttcccattttttgcagcatctattaaacagggacattccttcagcttcctcttgtaggaaagtcgtggagggtaagcacagtcctgaagacacagggagtgccatgctcagcttcctttttacaggcaaagaagtcatgtcccatggaggagaagggacgtttcttagtcgcgccacaaacgggtgctgaaggtgcactcatgcacctcacgttctgaccttcttatgtctagcaggtgtttgggatcacaacctagagggtgttgagcccagtaaaatgaaaatgagtgtgtgggcacgtgcatccgactgtgccccacgcagcctcacgtgtggccgacgtgccagtgcccacgagcctgggctcatctttcccattttgttttgactggctttgaggcaacaccacacaccaagcctagacagcagagactctcttggtatgaacttcatttaacggcgattttcacaggacttctttttggagggggattagaagtaaaatagctcagcagcacttcaaagtggggaagtaaagcctccacgtgcgctcgctgcaaagcagcagtcagagtgcctcgccaaggacacagcgtccacacaaaacgcctgtggttctcattgaaaaaggtcttggctttaaaatccacaccaaaagcatggctggaaatgtgtttttctgtccaaagaaaaaggttttatgacaagaactttattaaaataattagaagcgagtctccttgggatgatgtggacagttgaaagcagagggcggccccctcagtcctgcggcccccctcagtcctgtggccccctcagtcctgcttccccactcagtcctgctgcccccctcagtcctgctgctcccctcagtcctgctgcccccctcagtcctgcggccccctcagtcctgcggcccccctcagtcctgctgcccattaggttggtcagagccatggaggaagcctcggaatgtcggtcagaaaggactgtggggccagtgccttccagtgtccagggcagggccctgggtccagcaagagtcaaaggactcctggattccaaggcattctctccatcctgccactgactagactgatttctcccctcccagccctgcggcgggagtgccgacaccaactccacgcacgctctgaggccagtgcggtgtttcctgtgttgtacaccatgtttgcgaaatcgccatgctttgtggtggggtcccagtaggtgagaagaaacctctcactctgggaccagaatcatgcatggaagaatgttacagaagttgtatggacaggaccagagcagaggtttgggcaactccagctggtgggccaagtcctgccgcctgtgctcttggcacagtgttatcagagcacagggacgctcgcacgccgatgcactgtctgtcctgtcttgggcaccacaagggcagcatcacgtggtcctggcagagaccgtgtggcccacagactgaggtcaggtgcctcctatctgacccgtggcaggaagctcgctgcccctgtctagattcaccttgtttcctcagcccctaacgatggccctcggggcacagctcctgtgtccttggaaagcactttctacagctgccgcagaggcaggtctaggggaaattgtgtggactggctctcttcagaaaaaagaacagaagcagactgctcagaagccacccagggtctcctgtgactcccatctaagttccagaagtgagtttcttggcgggcaaggtgcctaggtgtggatttgacgcatgtttggagggcagagtttgtcagcactgacttgaacaggctgaagccacacagtcccacgcatcactcttctcccgtctgagcttgctcatgggacgcggggcaccaggatcaggcaccgcgtgctcccagcattgagatgggccctcccgttgcctcagcgtccctgatgggactcatgactgctggccctctagagagtagcccgcgggatcttcacctggtgtttaagcccttgggggttgtgtccctccaccaccagaaatcagaggaacttttcaataagattctgatctgcggtcatccccgaaaaggggtcacattgaattttcagcatttttgtttcttctggtcaaagttgatactttcagtgacatcagtggggaatttcatttgtaataaaagctgaatgaaaaagttttagggccagccctgctgccgtctgccgtgatgtttctggaaggtccttggtggtgggaagggacactgggcccggtgagtgcatttttggctgcccccagggaggggcctctgaaaatccatatgaagggaggcgcccatcgggtgatgcacttggcccacacgcgtgtgctggggaggccgtggggacacagaagtgtgcttcggtgcaggacaggctgggctgagcagctccaggaagtaggcggtggtgaaaccctaaaacatggacctactcacacaagggcttggtgaggggacccccagagctcacagcacaagtgggaatcgtgcaaactaggcttcatggtggaaataccaggagacttttaaaagttcgtagaaaatgcatattttgaaaaaaactgcatgggtttcaaaatgtttctgcaccaaaataaattcgcactaacgtgttatatctggacaggatctagtttgaggcaccaaggataaaacgtcagtttgaaaagagcccttctcagagcaacgtgaattctgctaaaactgaagccagaacaaacagcaagtttacagtgaagcttgggtaggaagagtggtgaaatcattgatactttatgaaaagtttatggggacaatgccccaaagaaatcagcagtttacaaatggatgactcattttaagaaggaatgtgcaatggtgttgaagatgaagcccccagctgcagaccatccacatcaatttgtgaggaaaaaattcatccagttcatgccctaattgtagaggacccacaattaacagcagaagcaacagttgacaccatgggcgtctcaaccggctcagcttacacaactctgcctgcagaattaaagttgagcagactttccagtcagtgggcaccaaaaccacagcgtccagatcagctgccgacaggagcagagctttcggtggaaatgttcaacaggtggactcagggtcctgagtgtcataacaggagatggagcacggctttcccaggaccatcctgaagacaaggcacaaccacagcaccggctaccgagagccagaggtggcccagtcacagcagtagcaggctggtcaagcaggagtaaaggtcatgacagcaggtttggggaatgcccaaggcatgttgcctgttctggaggaccaaagaatgataacacctgcttattgtgagagtgttttgagaaagttcctcagcactttcacagaaaatcactgggagagtttcccccgagagtctttttttgttttctgaggtggagttttgctcttatcagccaggccggagttcagtggcatgatcttgactcactgcaacctctgcctcctgggttcaagcgattctctcacgtcagcctcccgagtagctgggattataggtgcatgccaccacacccggatttttgtatttttagtggagatggggtttcaccatgttggccaggctggtctcaaactcctgacctcaggtgatctgcccacctcagcctcccaaagtgctgggattactggcgtgagccaccgtgcccagcacccctccctccgccgccaccaagagtcctccacaacaatgcttctgctcactccattaaactagaaaacctttgcaagagctttgaagagaaaccattaggcatccaccttccagtcctgagttggctgcttcttctttcctaatcttagaaaaacctgtaaagggcacttatttttcttcatttaatgtaaaaaaaaaaaaaaaaaacaacagagactgcattgacatggttagattcccaggacactcagtcctttcgggagggactaaatggctgcggtcaccattgcaaaagtgtcttggacttgatggagcttgagaaataaagtttatattttttatcttttaattcaatttttccacgaactttttgaagcccctttttaaaggctccacttctgttccaccgtcctcacctgcacaggccccttgcacctgggccgtcattgcaggaagacaccagaccacctgtctcatgaggtccttgctgtccgccaggaaagggaggccctgattctgctcccctcacccacagagggagtgaaggagactttgaaagtcagtggtggtgattaactcaggatcgaaggcggcagcctaaaggagacatgaaactgctgaacttccctactcacggagagcacacatatggattcatagcatacgcatggattcatagcacacactgataagatcattagactaaagactgataagttcttttgtgttaaggagtgctttttcccctttccaaatagaatactttccttatttccctaatataatttaaagaatttctcagtggttctgtcttttccagtgaattctcttacatttgtcatcagttttccctttaaagattcttaagtgtcttgtgttgtaattcccttacacctgtgtgtgttggtgttccagggtgagtaaggaacacgtgggctcccccagcagggctggcaagggctctccgccctctcggccacactcagtcccagcactaggggcagtgggtgactgcacgtgtcttcagtgggagctgtggaaagtgcattgtcgcagcaagagcagcctgatggggcgagtggagctgacccagtctcagaagagaggatgggcagggaggaccaggacagagaggacgggacagggccagggtgggtgggcacggggccaaggaggggtgttagtgggacagggagctggcttcactcccccaggttaatgcagcttgtcccatgggggttacagaaattatacagaaaacagcataccaagaaacagcaatgctctcactctcactaagcaagtgcagtggggcttgctggcttgcaccgtgactccctctcaccaagcaagtgcagtggggcttgctggcttgcaccgtgactccctctcaccaagcaagtgcagtggggcttgctggcttgcaccgtgactcactctcaccaagcaagtgcagtggggcttgctggcttgcaccgtgactccctctcaccaagcaagtgcagtggggcttgctggcttgcaccgtgactccctctcaccaagcaagtgcagtggggcttgctggcttgcaccgtgactccctctcaccaagcaagtgcagtggggcttgctggcttgcaccgtgactccctctcaccaagcaagtgcagtggggcttgctggcttgcaccgtgactccctctcaccaagcaagtgcagtggggcttgctggcttgcaccgtgactccctctcaccaagcaagtgcagtggggcttgctggcttgcaccgtgactccctctcaccaagcaagtgcagtggggcttgctggcttgcaccgtgactccctctcaccaagcaagtgcagtggggcttgctggcttgcaccgtgactccctctcaccaagcaagtgtcgtggggcttgctggcttgcactgtgaagatgtgaaatgagcctggatcacacgtgggttgattcccttctaattaagcgtggtcgccagattccagcctgctgtgtggagccctcagcccgccagtggccgagggggtgcggggcaggcattatcaatgccagagggaaccttggggttttgtgaccgtcccgtccctctttcagctgacccagtaacgccttctcctgtcctttgcagaacggtggtcatgccgatcgccagcgagtttgccccggatgtggtgctggtgtcatcaggcttcgatgccgtggagggccaccccacccctcttgggggctacaacctctccgccagatgtaagtggttctgcatatgactgaggagccggttctgctcatgtccatgatccgctgtgttccgcgtgtcaggtcccctttttaataacgagataaggaagggcacctttttactaatgaccaaggttctgaccgtactgggaaccagtccatttgggaggccccagagagcccagagcaggcagcgggagctcagacccaggcacctcgggcactctttgcccaggaagggcctagggcacacgaggctccctctctgggatgcgggtgcctagggacctgcaggccacctccaggggcaggtcctggtcccaccaagagctgagatgtgccccatgccgcttctctggcaggcggtgctccttggaactgtaaagggaagttgctgggggcacagttgagttcagagttggatgagggagcccaggatgtgtgtgtcctctcaggatcagcgttaggggccatgctgtcaggatgggaggagggactgcccagcagtgctcctgctgtgcctcagcaactcacaaggagatgaaaacctggcgcacacaaaggcctggccgcctcccccaccctggagtccccgaggatcctggagagcctcccgaggcccaagcatcctgtggccttggtcctagccctggtgatgccctcaaggccccagcgtccacagtgtatggccctccccactcctgtcggcacaggcggccaaggaggggcccgtctctcaggtccttgcgtggggagggtgtggctcacccaggagacctgaggcagccctcggtggctgtgctcccctggggcctcccacagtccaccaggccgtgcagcctagtggccagcaaagtgaccagacagagggcaaagagcttccactgtgcccaacgccccacagcacccggcccggagcaccgcggccaccacatcctcagcttcctcctcagtccgcacagctgcctcgaagcccctgtcactgtttccatcagatgggatgaaccgaggctttgggaagttacggcctcgccagcccatgatcggggccactaattagcggcgcgtggttccgggctctctaatcagcaccggcctggcctggctgagggtggtgattaccctcatccaccaggcattccctcctggggtgagtgatgtgggtgcagtggcgggactgtggctcttgatcaaagccaaacgctcagacctggacgtgggagaacgcttcaggagcacatgcagcctgtgcacatgtgtacacatacatgtttggagcatgtcagataaccagagcccgctgggccacggccacaagagcatggccatagcccctctgcgggggccgaagggcaggtggcctgcagcctctgggtggggctggctgccctcgtcccctaaagcagatgatttgctgattaaaaatcaaagcattgaagccataattcctcctctcaaacagatcaaagaggaaatccaaagccgaaactcttcagcgaatttattaaacgaaacccggcctggccatgtgtctcgacaccccagcccccagtcttcttacgatgccatgagacgcgtttctgggctgtgctggctgcggtcctcccccgttcacactgcagtctcccgtttcccgttgcaggcttcgggtacctgacgaagcagctgatgggcctggctggcggccggattgtcctggccctcgagggaggccacgacctgaccgccatttgcgacgcctcggaagcatgtgtttctgccttgctgggaaacgaggtaggaagaccccagagaccccacaggatgctccacactgacaggctcggggttgtggcctggctgcccgagagccccagagcatgaaaaagccagtgggtctctgaccacgtggatgcttgcagctccgccttgcacctgccccccacccccgcatagctctaaatgtggcagaaccgtgacgatggctggaagaggtgcagggggcaggactggaaggagccctcttgtcgtgagaagatggctcagggtcctctgcggtgcgactgcaccctttcagttcagggtccctctctccattacgtggagcacactgtgaccagaggttttctttttctttctctcttcgtttcctctgtggacagtcagcttctctagggagtcctcatgtgggtttcggtcagtggccccaaggcaggctggggctcttctgcccagcaggcctgtctgctgctctgagcccccagggacagggctccctgctgtgtccctaccaacaccgccggagggagtcagagacgctgtggtctgtacagctggcctctgagacctgggcagagaaaaagaatgttccacgggctcggggtgagagcgccacctgcagcgttccattccagcatgacgctggggcccgggcctccctgctcccagcagggcctccaccaggcgtgggccagtgagatgggaggaggaggcagtgccacagctaccaatgtcatatccacctccaagagtgtctgaagtgtgtgacacaaagtggaggggtacctttcattctgagtttcccacacctgctcttcctgagcctctgaacccgtctacagggttttgggtgtgagtccagatccccaagacacgactcagtcggtggcttccccacgcagagctctgcctggctgcctgcgctgggtgtccagtgcaggtccggagaacagccagctggcacgtgggggactcaagggccatgtgtccagatcacttgaccacaggaagcggagggcagggcagtgcctgaggctccagcacaccagatgcagaggccttgccagggggcagggtgggagtctgcctcctgtgccctctgggactgccctccccagcccggcagtcctgaggacagtctcagtagagtcggggtgacagggcactttagtgggggtgtcctggtgctcagcggtttgcaggaaacctgcattttcacccccatttgatgctcagcccccactctgggggacttctctggaagcagcatcctcattttcagctcaaggaaaaggcagcactctaccatccgacctcacctgtctttacaaaaaaatctccccagtcccttatgtttggggaaccagtgggacagcagctcagatgccctcgggtcagtgctggcttttgcctgcctgtgggtgctccagaccaaggtgctggtcccaggccctctgttcaccagacaggcggtcacacacttacaggtgccttgcacgcccctgggttctggtgtctgatggctcttactgacaggcgctctggcctggcattgtggggcgggcagagggatggcagggactgcagccatcccaggacactctgtgcaagcctcccccgatggaaagctggccctgctcactccaggacggtccgggtgccgtgcaactaagggcagcgcccagaggcactcgaggtcacgagcggtggggaaacgtcaggccgcacaggaggccacggacccctgtagttaagcacggcgctcgcggggtctggtgtgcaggcatcgttcgcattgttctggaaaatgcagagggagggtccactctctggcccactgtctgtgagtggcctcagcatgcgcagtgggcctcgaggtggccagcacacagggcacctcgcagaggacgcctcctgcacatgggcgtgggtgctggaattctcattgtgagcgttagaacaaaagggtgtcttcttcccagtgcaaaccccattatgagaggaaccccactggtcacagccagttcccacctccaccacctctgccgtctgtccctgggaagcaggttgctttccaaacggttggtaactcgctgctaactgggtgctgctttagccgaggaagccgtacgttcctgacctgggtctgctcttgagagcagggtcttattgtgagcagtcaagacccccacctttctagggccccaggccgccacagcaccagaaccttcctccctccccttctgttgaggccgatgtgaggggcagcatcagagacggcggaggtgggacctgggactgcaggtcccgcctccagccaggggcactccagtcaggggtctccccctgcgccagaagtgggagcagcacagggcatcctccgggcccctcccccgcccccagcagggctgctgccatggctttcccagaaaggccagcactgtaatcctaaattttgaaagattcactctgagacaaacctgctttattttccaggaaaggtctcattcagacacaggcctgaaggccaagcacaccagcaatatctccaggtgacacaaactgcccggcacagcaaggggagcttttccaggccagggaagccagggcggtgcgcgtcagctgtgtgttcctccagcccttgccattagagggagaggggcagcttccttagaacctacgaggctccgtctctctgcagtgactcctgatctaagggccgtgggtgaggcctgcagatgatcggcagggctcagtgccttgccccggtgaccatgcgcagccgctgagggaggcccaggaccggcagcgctgagcctcggctcacccaaaggctgccatggggcccatggggccttgacccagacttgggaagccagggagctggcggtcagggaagtgggcactggccagtggtctcccagacaggagggaggttcggtggcttgaagaagtagaggacgccaagggcagggtgaccctgggggtcagtgagagcccagaagtgcaggcacctcacgggaggacagttgggctctcgcaggtgtgggggaggctgggctggccaagccaagagcacgaggcagaaggggaaaggggagagagggacgcatggccaggcctgaggtggtctgttgggccccactgaaacccctggatcttctgaggggtgggcgcatacgtccccttgcacacctccgccgacagctgacagtgctgccttaaagaccagggctggccgggcgcagtggctcacgcctgtaatcccagcactttgggaggccgaggcgggcggatcacgaggtcaggagatcgagaccatcctggctaacatggtgaaaccccgtctctactaaaaatacaaaaaaaaaattagtcgggggcagtggcgggcgcctgtagtcccagctactcgggaggctgaggcaggagaatggcgtgaacccgggaggcggagcctgcagtgagccgagatcgcgccaccacactccagcctgggcgagagagcgagactccgcctaaaaaaaaaaacaaaaaaagactgcagggccacggcccggcttgggaggatgggggatgggaacggttccatgacccactacagagcaagacccctgggtgcgtgaccccgggacagcagacctggagtatgcgagaccccatgtgtgccaagccccaagggcacaagacttagccggaggagcgacagcaggcaatggccaaggtcagggccttggcggggtcaggaccttgcatcgccaaggggagccccttgggacctgcagcctgggccatcgcaggggcctgcgccagccagaggggtgccgagaggggacatgggcagtggctgcaggtaccaggacacgccctgccttctggccatctttgctggtcagggatggtgttcatgttaacataaatcacaagtagatcaaagatccaggtggcatccctgcagcgggtgagctggccagcgacaggctggataaaagaccgggctgctgtttaaaatgtccaaagcactttacaggtcctttcttcacatcaaacagtcttttccccctttttgctccagttaaaaggcaactgacgtatatattctaccatcccgaagccttatggttcttctggctagttattttaaataacaatagggaacttcgctttcagccgtggcctgttcttgcttcctgatgcgtgtttgcgcttctaacaagaaaatgttcttttacttaaacacgtcaaaaaggaggaagcactagttttatcaaggtctctttaaaagtctctttaatgcacaagagttggcctgggccccgcccctctgcccggcagcctttgatgaaggttgatatacagtgtgccaggcgatctggcacacacaggcggggccgccagctgtgacggcagtggcctgcggggaccctgttgctgcagaagtggctgagttatagggtgtgcgggacaggaagcgcagaggggccttggcgtccccgctatcagagcgacccctctgtcttcagcgcgtaggtctggaggcctgtgctgttcccagcaaccattttatttaatagtttccatgttcagttatctgcaactgccagtgactatgggcagtgaaaagttccctacgagtgttgcatgttgcagtgtagatgggccgtggagtcgtgtgggcgcagcaccgagtcgggcctccagccaacttccatcaaagaccctgcaccagacggccacggggatctgtggcccaggcccgtgcccccgggaggttaggaaaggaccgtctctcctgtctgagaccatgcccaaagcaggtttttgcttgggccaattttctactttagtcatggggcatttcagggttaaaatgccaccatctcatttaacccactccaggattcgtggaagacattcgtggagcaggagggtggtgtcgtgtggaaaaggttttcccccgggagtttagcttattagttatgtcctgatgctttgtgaaaggtgtggttgtgaaacagctctaacaaagtaacgaaaaccaagtgtgtgtgagggactgagttggattaacctgagagctggctgcctgcttccagtcactcttcctctcacactgacaccccacatggccaccctcttgtacacacacaccacacataggcaccacagtctcacatgcacgtgcatccttgctcatgcacaccacacatgcacacccacgcaagcaccagtcacacgtgcacacacgtgcaccctctcatgcacgcacacaccacacatacgcacacccacacaggcaccagtcacacgtgcacacaccacacaccctcttgtgcatgcacacaccacacacacgcacacccacacaggtaccacagtctcacacatcacatgcaccacacaggtatgccctcttgtgcatgcacacaccacacatctgcacacccacagaagcaccagtctcacatctgcacgtgcatactcatgaatgcaccacacagtctcacgtgcacacacacaccacacacgcacacataccccacaagcacatgctgtcacgcacattcatacacatgaatgcttacacacaccacacactcacactcagtcacactccccccgtgccaacggtgaatgttttatctgcatgcagccgattgtggcgcgcacagggtccacgtcgtgtgtcccgcttgctcctctttccatccgggctgccaaagccttcctggccgactttcagcaagacagagcccagcctcgtggccttcagagttgaaggagctgtggccacacacagcggggccgtccctctgggccctgttacctgggtgttgggatgtaagggacatctcagcgctcccccttccctggggccccctctgtaaaggagcctgcgtgcatcccacacgggcccgggccggggcaggtgcgggctgctccgggtttgcttgtgacagacagagttacgctgaacttccgggcaagtccccaatacacctaggtggccgtgtctccggtaaacgtccaggaggggagatggcccaggatgtgtttgttcacctttaggagataacatcaagcggctttttaagggttaaaactgtcttcagcagtggcgtgaccagacctcagcagcacttggcattgttgcccttgacctttgccagctggacgggggtaaaactggcccctctgcagggctccagggtcccttcctcatgaccgccacggcagagcagccccgcatctgcctattggccacctgggctttccctccttgtgaagttcatgtcaacccgtttttctattggattgtcttttccctatttgttcttagtggggtgaattagacagatggacagagggagagaaggagagagcggtggtgtgaagcaggttctccacacattggtgaccagcctgtgtgagtccagggagacaacacccacacacacattctgtgcagcagatttactacttacagacaggcagcaggggacggcagaagcccagggcaccatgagccagtcccccaaggctcagaaatgccccagtggatggagtcccatcagtgcgctcctctaggaaacagcctgtcctgaattttgtaccccgagtgccatgtgacacactgagctgaagcactgaagggtgccctgtttccaccggcggaggactgggacagagccaggctggccagcccgtgtccttcacatctcaggctgtgttgcccagcacagtccacggtcactctcgagaactacgagtgtgacggacgtgggtggatccaagggcccccggagagctctcctgcaggctggtgggtgggtccaaggtcccccagaggactgtcctgcaggctggtaggtgggtccaaggccccccagaggactgtcctgcaggctggtggatgggtccaaggcccccaggagagctgtgctccaggctggtgggtggtagctggctccctaggagtgttctccctgtcctctggaggagtggaggtaggatcaggataatctgttccttgactgggagaactctcctaggccgcaggtttactttgggtgaaaattttaaattacagattcagtgactttaatggttataggtctattgaagtttcctattccttcttaattttgagaagttacattttaccagaaatgtctccatttcaaccagaatttcttcagatttcttggcaagagttaagtgtccccagtttcctgcctttcacgtctctgctctgcctgtagccggggccccctttcatccctggggttgtccctgtgtacccccccgaacttgggtttcctccgtcagtcctgccggagcctgtcagtttactcaagcacttccgagaatcagttttcaactgcagcatccttttttcttttcagaatttgtctgctttcccatctatcttctttccttcttgctttaggaccactgtgttctctggctaacttcttacattggatatttatttttagtctttcctgatgtgtgcagttagggctgtaaatggctccaacatggcatccagccgcatctcacatcgtgataggtagcacttttcattactttttaattctcagcatttcctgatgtctgttatgatttcttctttgagccatgagttggtgtgttttctaatttccaaacataaggactcatggttctctttttgctatcaatttctaacaaattgcactgtggtaagaaaaggaagtgtggttggcatttatttttttgtggcgacttgctttacgggccagtgcgtggtcagcctgcagagacattccacatgtgtttgggataatgtgtcctctccgtctgtttcccagagttctgtttgtgttcattaaacagaacttgctaattgtattgttcacgctttggttttcctgaccgacgattgtctgctggatctgagaaagacatggcaaagtctcccacgatggtgggacacacatattcttgtcttctttccattgcacccatttttacttagacattttaaagctgctttactaaatatagacatttgacatcattatgccctttcgtgatgaattgaagtcttatcacaataacctgtatatccagtaatggcctttcccttacatcttttgtgccagatattggagctgtgaccccagctgccctttggccaggtttgcctgcctagcgtcagttttcctttgggacttttagccttcccctgaagtttcagatgtgtctcctataaacagcaaaagcctgggcaatatattattttcacgtcctatcctgtggtctgtgctttaagtggaaacgtgggtcatttgctgttagtttgatcccttttttcagatgccttcttagcatcttattcattgtttgtccccagtttctgtggctctttcctttttctcttttctcgccttctcttggggtaattgagggtttcctgcattccatttgttccctctactgagtccaaagatatgcaacctattttcttgtttttcattcgtcatctttaacaattggagcatgtattgtcaacacagtcagcatcctcactcccacctccatgcaaaccaaagcccggactgggccagccccaattagggtgccagagtagacacagagcacccaggtgggtatccttccactgcaaaactacttgtttatcagacactgaaatttaaccagggccgtgaatggttttgtttgtttttgttttactaaatctggcagccctagcctcagtgccccatcccaggttatatcactgactggtgtttcatttccttctttcttttgtttgatttcactgataagacaccattattattgctctatgtcatccctgttcatccaggctttcctgtacttatgtcattttcttggctcatcattccttctcatttctcacactgtcttctaggattattttcatactgccttaagtataatacatccactagagtgtcccttgggaaaacactcatgtggtcaacttccccagctcgcgtttgtgaggaggcaggtctttatctcacccttgttcttggatgatagtttcactggataaacaattctgggttgacaaggatttgctcttgacacattgattggcttaagattttaagccactgtctgcttgcctccattgctgttaaggagttggtgtgtggctaatggctacctctttgaagattctgttttctctagcagcttttagaattttctttttgtttttgatgttctgcagttttactctgatgtacctaggtgtgcattcctgggtttttttgcccctggcttgggtctcacatcttccatgtcacgttcataaatctctggttgtttcatcatacagaaatgtcatttatttttaatacatactcactatatttactttttataatttataactgatcatttcagtaactgcgatctttaaggatctaatcaattaaaacttattaaaagttaataaactttttatttttggatagtctgagatttacagaaacattgtagagatcgtgtacaagttcctcatatcccccctcagaaaacgtcttctactgtgaacatcttacttcgatatgagtcgtttgtcacaacttagaaaccaatgctggtccatgactattaactccagaatgtatttggatgtcaccagctttaccacaactgccctttctccattttagggtcccgtccaggatcacacgtcacatttagtcatttcgtgtcttttttctcagtctttcatggtttttcaaggagcactggccagagattttgcagactgcccttcagttcatgtttgagtttcttctcctggttctgtgctttggggaggaagatcataggatcgaaatgccattcgcttgtcagatgtgctgccagcacggctcactgaccttgatcatttgctgagagtgatgtttgccgggtccttccaccatcgggttacgcttttaccgcctttccaaatgtattatttggaagaaagtcacagtgcagtgcacactcagggggacagagttggagaggccttaagccccacctcctggagaggggagtagatacgtgcattatttgaaatgctcaaggagttgtctctgctcccctgtgtgtgtatttcgttatttattcatatcccggtgaactcctgtgtatctgtctttcttacactttgggtcatgcttcaataccacggtgttgattttgctgcccagctggttcctgctctggccctggggcacctttcagactggccctgcatgtcctgtgatggccccgtcccttgaccttcaggcacgtcctgatttcccagcaccacgaggtgctccaggctctcgtgtcttgtattttccccgccccagccttggaccgagctgttctccaaggagcctgcttcccttcattggagaatgggattgggaacctcgctcatcatccctcctgacccaggctcgtgctgactcacttccgtgttgtttggggtttttgtgtttgggaactcatgcttcctggaagttaaccggctgtgctcatttgaagcctgctgtgggtatgtgtgcctccaaagaggccctgctgtggtttctgcctggcgccctggcctggcggagctgccactgtcgatagtagctgtccactcccagtgtctagaagcaggcaaattctcagggtcactttgtcttttcacctctacccagaagccagagttaaaacccaaacgctccttcccatggcctctgtttgacacgtcgtcgtgcgtctgtcctcgctcacccgtcctgtcctgacagtggtctttccagccccagcaaggctggctccaggacacctggggacatgggtgctttggccttctgactcaggtccagctttgttccagacccagcaggtttcccctggttttgtgggctcttccagttatttaaaggttcttgaactgttgtatttctatatttttataatccatttcaacctttttttttttttttttgagacagggtctcactctgttgcccaggctggagtgcggtggcacaatcttggctcactacagcctccgcctcctggattcaagtgattctcatgcctcagcctcccgagtagctgggactacaggtgcccaccgccatacctggctaagttttgtatttttagtagagacagagtttcaccacgttgcccaggctggtctggaacgcctgacctcaagtgatccacccgcctcggcctcccaaagtactgggattacaggcgtgagccaccacgcccggccagtcaaccatttttaattgttgtgttgcaaatgctttgccctgttgccctgtcattgacttgtaaacttcttccctgcttttatctgctgccagtacttagggaaaaactcggtgtgaaggattccctctgagagatctgactacttcttccatttcatctcccccgaccccaccttccgctgccctggaagaaaaccaagatcaggggatattcagacattcttacttattaataaaagacaaaggaaagaaaagtgatgaagtaagcgtcactccccctcatggaaccctgtggcgtcgatggcagataccaagttcacgtgcaggtgccagccccactcctggggactgtctttcttcctgctacttgtaggaacccacaaatatcttatagcgtcctaaaaaaaaatccacttttacaaaaaaattataaataccacggcacatttggctttttaaagttatttttttctactctgtgggcaaatgcaccccacaagggtctctgtgctcaggaaacagttgcagtctcggaacacccgtctaacgcacgtgtggattatattggcagtctttatattcttatgcattttcttccagcttgatcctctcccagaaaaggttttacagcaaagacccaatgcaaacgctgtccgttccatggagaaagtcatggagatccacagtaagttgcctggctgggtgctcacaggggacacgcccctgggggtgggactgcaccacaccccatccctgtccccctatacccccagctcttctccatcccactgccggctgcttccccaggcctgcagcagaaggccttgctttcagctgcatttcttgagctggtagagactcacatttaaccccgactggatttcccccggcctgctgggatggttccatcagcccaatttgtaagtctagagaatcaaggcccagacagtctcagtgtggagtcacttgctctaggtccccagctagcagcgggggccatggctgtgagcctgtaccctggggactccggcctcttccctggaccagagaagcccacgtcctgacctcaaagaacccttggccctgcagagaggcagggtgtaggccctctgagttctggcaccgaccctcaagcagcaggtcctgggtgcaagggcgtggcacgcagcctatctcagaggcgcctcccacaccctgtcattgtcgcaagcccagcttgtcttgcctttgagatgacccagatggttgagactgtccacagaagcaggggtagtccagagctcagctccccgtttccctgtgtgagggagtcctggcttcagagccctgaagctgaccctgggccaggcccagccctccacatacacccccttgcgcctgacgcagtacccctccacccccagcctctgtgagggcccaggcagaagacccctcagccccagcgacaatcccccagctcacctgctcccagagataggaaggctcaacccagcaggctggcagccccctgccctggccacccagggcagaaaggggcccgtgagcgtggaaagccaggcctacaggagcctccctctgcagtcctaggtgggcctgctcctggagggactcgagccactcacaatggggaaacatttccagagattttttgggtctttgtgagtttgtagccatgcagtcttctgcttcgtgtctcttcaaagacgggtgcttttaaaatcataagggatcaatctggtttgaggctcagggtcccgcaggaccttcccgggcctcagtgcatcctgctaagttgtagtcactgagcgactttcctcaccccaccaccccaggcaagtactggcgctgcctgcagcgcacaacctccacagcggggcgttctctgatcgaggctcagacttgcgagaacgaagaagccgagacggtcaccgccatggcctcgctgtccgtgggcgtgaagcccgccgaaaagaggtgagcacctgccctgccgcccgcctgcaggctcacccagccccactgtgcccactgacacactattcagggtcagaacctttatggcacatgccctgcccaacagactagagacaggccagtgtggccccctccttccagtgccaaagccccttagagacgcatgaggagcattagatcctgaacagatggacccggggctgccaggccagggctaggctggcgggtggggcagcacacagcctttaacccacgttctgttctctcctctctgtggtgcacctgccccacgcccccatctccttctcttgcgggatccacagaccagatgaggagcccatggaagaggagccgcccctgtagcactccctcgaagctgctgttctcttgtctgtctgtctctgtcttgaagctcagccaagaaactttcccgtgtcacgcctgcgtcccaccgtggggctctcttggagcacccagggacacccagcgtgcaacagccacgggaagcctttctgccgcccaggcccacaggtctcgagacgcacatgcacgcctgggcgtggcagcctcacagggaacacgggacagacgccggcgacgcgcagacacacggacacgcggaagccaagcacactctggcgggtcccgcaagggacgccgtggaagaaaggagcctgtggcaacaggcggccgagctgccgaattcagttgacacgaggcacagaaaacaaatatcaaagatctaataatacaaaacaaacttgattaaaactggtgcttaaagtttattacccacaactccacagtctctgtgtaaaccactcgactcatcttgtagcttatttttttttaaagaggacgttttctacggctgtggcccgcctctgtgaaccatagcggtgtgcggcggggggtctgcacccgggtgggggacagagggacctttaaagaaaacaaaactggacagaaacaggaatgtgagctgggggagctggcttgagtttctcaaaagccatcggaagatgcgagtttgtgcctttttttttattgctctggtggatttttgtggctgggttttctgaagtctgaggaacaatgccttaagaaaaaacaaacagcaggaatcggtgggacagtttcctgtggccagccgagcctggcagtgctggcaccgcgagctggcctgacgcctcaagcacgggcaccagccgtcatctccggggccaggggctgcagcccggcggtccctgttttgctttattgctgtttaagaaaaatggaggtagttccaaaaaagtggcaaatcccgttggaggttttgaagtccaacaaattttaaacgaatccaaagtgttctcacacgtcacatacgattgagcatctccatctggtcgtgaagcatgtggtaggcacacttgcagtgttacgatcggaatgctttttattaaaagcaagtagcatgaagtattgcttaaattttaggtataaataaatatatatatgtataatatatattccaatgtattccaagctaagaaacttacttgattcttatgaaatcttgataaaatatttataatgcatttatagaaaaagtatatatatatatataaaatgaatgcagattgcgaaggtccctgcaaatggatggcttgtgaatttgctctcaaggtgcttatggaaagggatcctgattgattgaaattcatgttttctcaagctccagattggctagatttcagatcgccaacacattcgccactgggcaactaccctacaagtttgtactttcattttaattattttctaacagaaccgctcccgtctccaagccttcatgcacatatgtacctaatgagtttttatagcaaagaatataaatttgctgttgatttttgtatgaattttttcacaaaaagatcctgaataagcattgttttatgaattttacatttttcctcaccatttagcaattttctgaatggtaataatgtctaaatctttttcctttctgaattcttgcttgtacatttttttttacctttcaaaggtttttaattatttttgtttttatttttgtacgatgagttttctgcagcgtacagaattgttgctgtcagattctattttcagaaagtgagaggagggaccgtaggtcttttcggagtgacaccaacgattgtgtctttcctggtctgtcctaggagctgtataaagaagcccaggggctctttttaactttcaacactagtagtattacgaggggtggtgtgtttttcccctccgtggcaagggcagggagggttgcttaggatgcccggccaccctgggaggcttgccagatgccgggggcagtcagcattaatgaaactcatgtttaaacttctctgaccacatcgtcaggatagaattctaacttgagttttccaaagaccttttgagcatgtcagcaatgcatggggcacacgtggggctctttacccacttgggtttttccactgcagccacgtggccagccctggattttggagcctgtggctgcaaggaacccagggacccttgttgcctggtgaacctgcagggagggtatgattgcctgaccaggacagccagtctttactctttttctcttcaacagtaactgacagtcacgttttactggtaacttattttccagcacatgaagccaccagtttcattccaaagtgtatattgggttcagacttgggggcagaagttcagacacaccgtgctcaggagggacccagagccgagtttcggagtttggtaaagtttacagggtagcttctgaaattaactcaaacttttgaccaaatgagtgcagattcttggattcacttggtcactgggctgctgatggtcagctctgagacagtggtttgagagcaggcagaacggtcttgggacttgtttgactttcccctccctggtggccactctttgctctgaagcccagattggcaagaggagctggtccattccccattcatggcacagagcagtggcagggcccagctagcaggctcttctggcctccttggcctcattctctgcatagccctctggggatcctgccacctgccctcttaccccgccgtggcttatggggaggaatgcatcatctcactttttttttttaagcagatgatgggataacatggactgctcagtggccaggttatcagtggggggacttaattctaatctcattcaaatggagacgccctctgcaaaggcctggcagggggaggcacgtttcatctgtcagctcactccagcttcacaaatgtgctgagagcattactgtgtagccttttctttgaagacacactcggctcttctccacagcaagcgtccagggcagatggcagaggatctgcctcggcgtctgcaggcgggaccacgtcagggagggttccttcatgtgttctccctgtgggtccttggacctttagcctttttcttcctttgcaaaggccttgggggcactggctgggagtcagcaagcgagcactttatatccctttgagggaaaccctgatgacgccactgggcctcttggcgtctgccctgccctcgcggcttcccgccgtgccgcagcgtgcccacgtgcccacgccccaccagcaggcggctgtcccggaggccgtggcccgctgggactggccgcccctccccagcgtcccagggctctggttctggagggccactttgtcaaggtgtttcagtttttctttacttcttttgaaaatctgtttgcaaggggaaggaccatttcgtaatggtctgacacaaaagcaagtttgatttttgcagcactagcaatggactttgttgtttttctttttgatcagaacattccttctttactggtcacagccacgtgctcattccattcttctttttgtagactttgggcccacgtgttttatgggcattgatacatatataaatatatagatataaatatatatgaatatatttttttaagtttcctacacctggaggttgcatggactgtacgaccggcatgactttatattgtatacagattttgcacgccaaactcggcagctttggggaagaagaaaaatgcctttctgttcccctctcatgacatttgcagatacaaaagatggaaatttttctgtaaaacaaaaccttgaaggagaggagggcggggaagtttgcgtcttattgaacttattcttaagaaattgtactttttattgtaagaaaaataaaaaggactacttaaacatttgtcatattaagaaaaaaagtttatctagcacttgtgacataccaataatagagtttattgtatttatgtggaaacagtgttttagggaaactactcagaattcacagtgaactgcctgtctctctcgagttgatttggaggaattttgttttgttttgttttgtttgtttccttttatctccttccacgggccaggcgagcgccgcccgccctcactggccttgtgacggtttattctgattgagaactgggcggactcgaaagagtccccttttccgcacagctgtgttgactttttaattacttttaggtgatgtatggctaagatttcactttaagcagtcgtgaactgtgcgagcactgtggtttacaattatactttgcatcgaaaggaaaccatttcttcattgtaacgaagctgagcgtgttcttagctcggcctcactttgtctctggcattgattaaaagtctgctattgaaagaaaaagaaagcgaacagtttttgtttgttttttttgccgtgtgtgctccatagtggaggcgctattttccaattgatgagaatgacaaacatatataatctatctatctatctatctatctatctatctatacagggggcttgaaccttactcacccaagagcttcttacggaatgtggtagaaaaccaagttgtaacgacactgtaacctacctgatgcctgttcgcgcccgccgtgagctgcgcactggccgtggccaccattcacctctgtaatttaatccgtttctcttggattgtctggacgtgcccgatggttctttcttttgctcagtggagttggaggttttgtgtttggttttctcattcttgtcttgttttgtgtgggtggattttcaccgaccaatgatatcctcttctgacggtcaccttctttccacttcactggagtccagtattctgtaccacatcacgcaacgtgttatcttgtggtgtaaataaagactgcgttacttgccctcccagctctggtttctgcccgtgcgctctcttcctcattggctctcgcatgtctgggaccctgtgggccgaatggccagtgccctgggtcccatccggatggctgcatgggaatcactggaccccatggggacggcccctagacccagaccagcggcaggcccgtccccctctgcctgcataatcaggtcccataggagtgtcttcattttaaatgtccagtaatttaaatctttacattatcttctcccccaaaacacttaccaagccatagagagctggaaataatcttggagagaacaaggccaaagagagaggcccagggcccaggcttagccacctgcccacagccgggcaaacacacctctgagactggagtccaaacaccagccacagctcctgaccctcagcagcgccccttcccaggctcccgcatccagtgactaatcagttgggtgccgggcagcgtaagcaccaggccaccttggcccaacttaggacaactcaaggcctgctggcttcccggaaagtgcctgagcccctccctaggctgactgccttccctcctcccctgtcacagctgccaacccaaggacacctcaaccaccttgcacactgaagcccacccagtctgcatcccagaaacccagcccacggcacccaggttgcccttgagcccccgaaagaggcctctggagcagagggccctgctggccccaaggcatagccctgtggcaaggggggctcagtcggccccagtataagaagaggtacttggagcctgaagccactgaggctggagtggttttgttattgttactgattcagttggcatgtttactggttatagtatattagttatctattgcttgcaacagattccctcaaaacttagcagcttcaaatagcagacatttattaccttggagtttctgaaggtccggagtctgggtgcatctcagcagggtccctgtctcgtcttccctgggggtccagtcaaatgctcagccagggttcctctgggggcccagctgctgggggaccaggctgggggttggcctccaggcacatgcctgtggctgtaggtggccaccttccctcgcctgatgggcctctccacagggccgcctcgaggccttgccgtcagcgtctcccacagcacgtgatctaggagcaagtggagaatgcaccaggagacacagccagtctttttatagcctcatctccatgggcatagaagccagtgcaggaggccagcccacactcacgggagaggcttcctctgctcaaggcccaaggaccctcaggctcagatcctgcagcgcctccctgggtttgtccatctcatgtgctagagtagaaagttggaagctggtctactcctctagcccaagagatgaagacatcattgctccccaataagcagatggaatgaaggattcctgggttgtcttctccgcccatttgttctccgcccatttgtttcattactggggctgtgaactagaaagctttaaaatctattttgggatgctaatcctttatccaccataaatttctagtatcttctggtctttagattctcctctctctgtctctgaaaaagtcagacacatacaaaaggggactagttctgaggccctgtgtgctcatcaacctgcctcaacagctgtaaacactcccaaatgtgtttagtctaccccctcctcaccacaaacaggagtgttaggaggcagaagcaaatcccagacatcttatcatttcatctgtaaatatctcagtagatttctctcaaagatagactcttttcttagacaacacagtatcttatcatgctgtcaaagtgagcagtttcgtatcatgatcaaatattcagccaatgttgagatttccccattgtttcagattgtcttcaggttttttttgttgctgttttggttttttttgttttgttttgttttggtttggtttttttcttgcaatgtatttgcagaagaaatccggccatttatgcatttgtacatccgctgtgtcctagccctttcctctgacaagtaaaggagggacaggagggtgggcctagagcactggccagttcaggctcacacccctagcaggagcccctcagaggtggggcccactcttcttccacgaggccactgggcccattatttcactgggggtttgaaggcggcaatgctttcttgccatcccattttgacaaatgcaatacttcaacgcgttcacattcaccacaagcaagcaactgttaccaagtttctaggcccaacacctttgtttagaaaaaagtaaacacgtaaaggttagaattacagattgaaaagggtttccactcagcgtcccattgatacgagatcctttagccaataatttatggatggtattattattattattattattttagacagagtctcaccctgtcgcccaggctggagcgcaatggcacagtctcggctcactgcaacctccacctcctgggttcaagtgattctcctgcctcagcctcccgagtagctgggactacaggcgcacgccaccatgctcggcttttttgtatttttagtagagatggtgtttcaccatgttggccaggctggtctcaaactcctgatctcaggtgatctgcccatcttggccccccaaagtgctgggattacaggcatgagccactgcacccagccaaggatggtaatattatatggtactatatatatatgagactttaatataaatatatactatacttatactatatatatgagacttgaataatatatgagacttgaaggtttatttttaaatgcactcaaaatttctatttaaaaggaactctctggccaattaaacttgttgatttgatttcaaatgcaagaacatttctctgatagtgatggaaaataaattcatatgaaaatgtgggaaaaaagaagtgtggcattgtaattcgtgcaagtcttgggatttatgtacaaaaactaaaatgctgcggtgttctcagtttcttaaaagtttttgtctgatatctgagtgtacaaaaaaatggaaattcgggtttgcaagtaaatcgtgctataatttcaacacatgctgtcttttacatcagattctcaggaagcgcaggtcataatgcagcttgggaggacccaggaagtggttccacttaaacttctggggtgcagttgtagggagttgtatgtccctgacacactcttagtttcaatctggatgcagctgctctttgaagtcacactgagtccctaatatgtacttggggcctcagactaatgtgttacagtgttgaagttattagtaaagcccctttggaaagtaaacaactcccagtaatgggcagttagatatatgacaaaatgacagatgatggcaaagctaatgtctgcgtgggtgacacacatctaccgagccaaccacagatattcgcagggccaggggccagggttcaagtggagaccgccatatgcccaagtatgtggacacagatcaagctccaaaagtgttatgcagaaatgtgggctcctcaccaccttgacaaatccacctccctaaagacgcaggaggccaggctggagccgcggctctcagcctcccaggggccctcggcagcctctgccaccgcctctctcttcctactcctgctggggggaccacagcccaccccctgcctagctgcttctcgggccttctcacctggcaccagaacccagaatggctccttaagggttctccccagatgctgcacatagcatttctgcttaagaccccctggggcttgtggccacagcagctgcaagcaaggccaggatgtgcagtcttccacaggtgcccacctgtccaagtggagacagcagctctgctgttacagaagaaagggagggtgggtactgagagacaccagagtctctgccacagaaccaagaacacctgcaaaccttaccaacacatgaggaaccactgtacccaggtacctcacaacccccagggccttcctatgaggtccacactctacctgaaagacatctgtgccagtgggaaggcggagggtcagggatggtgctgcctggactctctgggtaggcacagccaactaatgataccagcaagggtggccggcccttacaaccacattctagccaatcggaggttctcttctttcctagaagcaatcgtgggagccttccccagagaagaaggtggtacacacaggtccaaggtgagtatcatgaccagaaggaagtcaccaaacgatgccagaccaggagctggcactgtgctgtctggctagtgaattactggaggactaaggataaaatttacacaggtaccaggagaattctacaagtaatggctgcgtgcacagctgcgaagctgatgagatgctgttcaagcggaatcactagaaatacaaaaagacatttcgaagagatgttaggccaggcgcatacaggagcatacagcagaaataaaaaataatcacacggatgaacatcgtggattctcctacaagctccaggtgggaagggctgctgaagagggaacggatgaagcgtcacagtgggcagctctctaagcggcgcctctctaacttggtcccagctggcagcgacttggcaggagccaccaggtgtgccgtgcaatggagagctggccagccaaacccagaggccctcatgcctctttagaaaggcaagaagaaactgcagatattccgtatgagtccgttctcacactgctataaagaaatacctgagactgggcaactgataaagagaagatgtttaattggtttacagttccccaggctgtacaggaagcatgaggctggcatctgttcggcctccggggaggcctcaggaaacgtccagttatggcagaaggggaagcaggtacgtcttccatggctggagcaggagcaagagatgggaaaggggccacacactttgaaacagccagatccatgagagctcattcattcactccacagtaccgagcggggatggagctaagccattcacggaactcggcccccgtgatctgatcacctcccaccaggtcccagctccaacactggagatgacaattcaatgtgagatttggcaggggcacagacgcaaaccatattctattcacaaaccagttaccaggaaattcattctaaatctagacttcctctgtattgtaccatcacaaaaccgagttttagtcaaagccaagtttggtgggcaggtggaggaggttcccatgatactaggaagtttgttccagtagtcccaagaaccatgcaaatcaaaaaagctgcgacaggaaaataggtttgttatatcgtctgttttaggaagacgtgtcttcatgcaaagtgtaagctctgcgtgcactggagggtggctccccactgccagtgacagtcatgaagaaggaacatacgattcggggctaacaaactcctcacatccaaacagcaaggcacactgattttgaaaaggaacatggccaaaggcattcttttgccatgaaaagtgtatttccaaggaaaatgaggggcccattcgattctctttaaagcacacacagaagttgactttgtaaacagatttgagcccctacacctgcaacctgtttgagtgagaacgtcctcatgagcctgtcggcttcctactatcccacccagacagctttcaggaaaatgtttaaaatcaagattgatggagtgattaaaatgggatgtatttttttctagcagagagcaccctccggaatcactacacccggagatgagaggctagtgacagacccaacacagggcccatatggtgacagtggcagtcttgccactaccttcggtgagtgctcacgtgtggggcctggcgtcgacatgactcaaatgtaaaccttcccaggttgccatgacactggtgggagtgggtgccctgaggctggtggaggcggggagggtggttgacttaacattgataaatgtgactaaatagaaatgtgaaaacttctagggcgatttaataaccccagtctcaatgaatggaacgtaccaaaccaagacagccagggccagtgttgacaatctgtgcaatgatcgtagaaattttttaaaaaccatggacaaatcccaaaagatgagacacaactgtgtgataaacatacagaaaactaacaagctttgtctgtagttcttaaaattacaagtagccgggtacagtggctcacgcctataatccagtactttgggaggccaaaccgggaggattgcttcagtccaggagttcaagaccatcctgggcaacatggtgacactcttacaaaaaatttttttaaaaaatgagccgggcatggtggtgcacacccgtggtcccagctactcaggagactgaggtgggaggatcgcttgagcccagaaagtcgaggcttcagtgagctgtgatcatgccactgcactccagcctgggtgacagagtgagaccctgtctcaaaaaataaacaaaataaaaattgcaagcaaaagtaaaagagaaaaacgatttggggcctgtatatatttcaacaatctatcccgttaaatgctggggagggtgtgtggacacgaacggccctcagcaccatggctgggggaccgtcaccacgagaggctgcagagcccttcagagccttgcaaacggctgtgcccggacctgattacacttctgggcacctgtgcccaggacacaaacctagttacggaaaacctcttgtgtccaaagacgctcatttcagcattattgaatgaacaactggaaacacctgggaatatttaacagctgggaactggatggtacttaggtgctgggtgagtgggcagcgtctgcggcgggcgactgaccaaggccgccctgggaggcgagactcacagagggccggccacccgtggaccctgcctgtgttaagacagtgtgagggaaaagcaaacaaaaacccagccatgccttccgaggagtctgcggggacaggggctgaaattttcgagcatcctcttccagatctagactgtggatccctaggtttccccttttctgacgtcaggagtacacaccacccttaattcatggtattcacattcctgagaatcgactttaaagctgccctccctgcctcggccacagaacacggtttcctcaaggaatcaatagctgccccaaagaaaaaggtaaaatgcagggacagtattttctagcacattcctctgagctccctcaccccccatcccaaaggacatccggtccccattcccccatgtgcagaacacacccagaggaggccttggccttagtcaggtgggcaaagcatctctctccctgggggctgtgtctgtctggccaggccggccagggcagcccttgccaccagagagtcagtaaagccacttggagcctccagtcatttacagtaagaatgccaggccccaggcatgagggtgacgcgggctgaaccacctcacctgacctgccactcttccagatgggactgtcctgagaatggcatcaggcaatgagtataaaggcactaagttcagtttctggccacaaatggctattgtcactgttgttatggacgccacaatgcgtgctttgttctacaaagtccttgtttggaagatagttaacagcagtcttaggggagcccccgggggccgctgagatgcacccccagcgcccctgccagactgaggccactttctacttcccagctcagcctcggactcagcctccacccctttccagaaaccaccctcagctggagagagaggggtgccttcggggtagcccacactttaggagcagtccacgtgggattacagaggccaggccctcactgtcatgcagggcagggctgagtccatggggccggctgaggcctctgttgagaccgtgtcacggctcagcacctccctctgcccggctctgccacctcccttccttcgcatgggaggagctcaccggcacccccagcgaacccggggtctcagagccgcctgctggaagaccaaaactgcaccatgagagaggggagcagaggacacccccgtccttttggtgccacaaattctaagataaattttagaaaggtgaaaacatgagaagtgcacatcttggacaaaagagcagaattatgagctctcagctcagtcaagcttcttcatttgcaaggacagaaaccccctgtggctgggaccaaggaggatggggcgttgaaagactgggcatcttgtgtcactccgggcttcacctcgcccagctccccctgcctctgccagccctcccaactcctctgccctgggctcctgcattcccctacagatcctggcagaaacggtctcccacacccatatgcccactgccaccgaactgagagtcctgcctcgcgccttctgccctcaaaagagaatccgactggcatctgttcagctctcctcagcccacgcagacacagaacacatgcttcacacaagtgggcccacggctgtcttggagaccagcatcacgctgaccgccagcatgggaaagccagctccatcctgccggctgggctccttgaaggcacaaaccagttcctgcctccaggcctttgcacaggctgttcccccgcctggaacaactttccccacctggtgacctccccttcatcctgtgagcctgaaggtcaatggggcctcccttctaagcctccctcccccagacactcatctcccatcagcagcatatggggaggaggaggaaaggcttcctctgcctcaagagacacagaggtggccggggaggcctggcctgtctgcagagtctcagcacagcatgtgcctcctccagacagtgacctacagcctgagtcccgccctccgttttcctctgcaagctgcatgccagcctctctcagggtagacttgagtatggacgttcatgaggcctcatggccagttcacttctcagtagggggagatcagctatgggtccagaaggctccattaccctgaggaccagaggtggctcccagtgctctgagtctgtaagggagtaaccgggagggtgatagatgggcaggtacttcaaggcctgaggctgagcctgatggtccccgaagttagcaacatccttgtcctgccaaggcctcttcctgggctgagccaggggtgggcactgccaccgtgtgtccggagccccctctccttcctgccaaccagccccttctcactgagaagggcagtagtgggctgaatggcagcctccgtccaaaagctgtgttcacatcctaccctgggaacccggtaagtggattgattcgggaaagcacctgtgcagaggtagttataggtgaaggcctctccagatgggctcagcctgagttttccagggggaccctgaatccagtgggaggatccttactggggacagaagaggagacacacgga

SEQ ID NO: 519 - DNA, 8499 bp, Homo sapiens
atcatggttcaacgtgggtcaattttttgtgaatgaggaggggaggttgtggggccgccgccgcggagcaccgtccccgccgccgcccgagcccgagcccgagcccgcgcacccgcccgcgccgccgccgccgccgcccgaacagcctcccagcctgggcccccggcggcgccgtggccgcgtcccggctgtcgccgcccgagcccgagcccgcgcgccggcgggtggcggcgcaggctgaggagatgcggcgcggagcgccggagcagggctagagccggccgccgccgcccgccgcggtaagcgcagccccggcccggcgcccgcgggccattgtccgccgcccgccccgcgccccgcgcagcctgcaggccttggagcccgcggcaggtggacgccgccggtccacacccgccccgcgcgcggccgtgggaggcgggggccagcgctggccgcgcgccgtgggacccgccggtccccagggccgcccggccccttctggacctttccacccgcgccgcgaggcggcttcgcccgccggggcgggggcgcgggggtgggcacggcaggcagcggcgccgtctcccggtgcggggcccgcgccccccgagcaggttcatctgcagaagccagcggacgcctctgttcaacttgtgggttacctggctcatgagaccttgccggcgaggctcggcgcttgaacgtctgtgacccagccctcaccgtcccggtacttgtatgtgttggtgggagtttggagctcgttggagctatcgtttccgtggaaattttgagccatttcgaatcacttaaaggagtggacattgctagcaatgagctcccaaagccatccagatggactttctggccgagaccagccagtggagctgctgaatcctgcccgcgtgaaccacatgcccagcacggtggatgtggccacggcgctgcctctgcaagtggccccctcggcagtgcccatggacctgcgcctggaccaccagttctcactgcctgtggcagagccggccctgcgggagcagcagctgcagcaggagctcctggcgctcaagcagaagcagcagatccagaggcagatcctcatcgctgagttccagaggcagcacgagcagctctcccggcagcacgaggcgcagctccacgagcacatcaagcaacaacaggagatgctggccatgaagcaccagcaggagctgctggaacaccagcggaagctggagaggcaccgccaggagcaggagctggagaagcagcaccgggagcagaagctgcagcagctcaagaacaaggagaagggcaaagagagtgccgtggccagcacagaagtgaagatgaagttacaagaatttgtcctcaataaaaagaaggcgctggcccaccggaatctgaaccactgcatttccagcgaccctcgctactggtacgggaaaacgcagcacagttcccttgaccagagttctccaccccagagcggagtgtcgacctcctataaccacccggtcctgggaatgtacgacgccaaagatgacttccctcttaggaaaacagcttctgaaccgaatctgaaattacggtccaggctaaagcagaaagtggccgaaagacggagcagccccctgttacgcaggaaagacgggccagtggtcactgctctaaaaaagcgtccgttggatgtcacagactccgcgtgcagcagcgccccaggctccggacccagctcacccaacaacagctccgggagcgtcagcgcggagaacggtatcgcgcccgccgtccccagcatcccggcggagacgagtttggcgcacagacttgtggcacgagaaggctcggccgctccacttcccctctacacatcgccatccttgcccaacatcacgctgggcctgcctgccaccggcccctctgcgggcacggcgggccagcaggacgccgagagactcacccttcccgccctccagcagaggctctcccttttccccggcacccacctcactccctacctgagcacctcgcccttggagcgggacggaggggcagcgcacagccctcttctgcagcacatggtcttactggagcagccgccggcacaagcacccctcgtcacaggcctgggagcactgcccctccacgcacagtccttggttggtgcagaccgggtgtccccctccatccacaagctgcggcagcaccgcccactggggcggacccagtcggccccgctgccccagaacgcccaggctctgcagcacctggtcatccagcagcagcatcagcagtttctggagaaacacaagcagcagttccagcagcagcaactgcagatgaacaagatcatccccaagccaagcgagccagcccggcagccggagagccacccggaggagacggaggaggagctccgtgagcaccaggctctgctggacgagccctacctggaccggctgccggggcagaaggaggcgcacgcacaggccggcgtgcaggtgaagcaggagcccattgagagcgatgaggaagaggcagagcccccacgggaggtggagccgggccagcgccagcccagtgagcaggagctgctcttcagacagcaagccctcctgctggagcagcagcggatccaccagctgaggaactaccaggcgtccatggaggccgccggcatccccgtgtccttcggcggccacaggcctctgtcccgggcgcagtcctcacccgcgtctgccaccttccccgtgtctgtgcaggagccccccaccaagccgaggttcacgacaggcctcgtgtatgacacgctgatgctgaagcaccagtgcacctgcgggagtagcagcagccaccccgagcacgccgggaggatccagagcatctggtcccgcctgcaggagacgggcctccggggcaaatgcgagtgcatccgcggacgcaaggccaccctggaggagctacagacggtgcactcggaagcccacaccctcctgtatggcacgaaccccctcaaccggcagaaactggacagtaagaaacttctaggctcgctcgcctccgtgttcgtccggctcccttgcggtggtgttggggtggacagtgacaccatatggaacgaggtgcactcggcgggggcagcccgcctggctgtgggctgcgtggtagagctggtcttcaaggtggccacaggggagctgaagaatggctttgctgtggtccgcccccctggacaccatgcggaggagagcacgcccatgggcttttgctacttcaactccgtggccgtggcagccaagcttctgcagcagaggttgagcgtgagcaagatcctcatcgtggactgggacgtgcaccatggaaacgggacccagcaggctttctacagcgaccccagcgtcctgtacatgtccctccaccgctacgacgatgggaacttcttcccaggcagcggggctcctgatgaggtgggcacagggcccggcgtgggtttcaacgtcaacatggctttcaccggcggcctggacccccccatgggagacgctgagtacttggcggccttcagaacggtggtcatgccgatcgccagcgagtttgccccggatgtggtgctggtgtcatcaggcttcgatgccgtggagggccaccccacccctcttgggggctacaacctctccgccagatgcttcgggtacctgacgaagcagctgatgggcctggctggcggccggattgtcctggccctcgagggaggccacgacctgaccgccatttgcgacgcctcggaagcatgtgtttctgccttgctgggaaacgagcttgatcctctcccagaaaaggttttacagcaaagacccaatgcaaacgctgtccgttccatggagaaagtcatggagatccacagcaagtactggcgctgcctgcagcgcacaacctccacagcggggcgttctctgatcgaggctcagacttgcgagaacgaagaagccgagacggtcaccgccatggcctcgctgtccgtgggcgtgaagcccgccgaaaagagaccagatgaggagcccatggaagaggagccgcccctgtagcactccctcgaagctgctgttctcttgtctgtctgtctctgtcttgaagctcagccaagaaactttcccgtgtcacgcctgcgtcccaccgtggggctctcttggagcacccagggacacccagcgtgcaacagccacgggaagcctttctgccgcccaggcccacaggtctcgagacgcacatgcacgcctgggcgtggcagcctcacagggaacacgggacagacgccggcgacgcgcagacacacggacacgcggaagccaagcacactctggcgggtcccgcaagggacgccgtggaagaaaggagcctgtggcaacaggcggccgagctgccgaattcagttgacacgaggcacagaaaacaaatatcaaagatctaataatacaaaacaaacttgattaaaactggtgcttaaagtttattacccacaactccacagtctctgtgtaaaccactcgactcatcttgtagcttatttttttttaaagaggacgttttctacggctgtggcccgcctctgtgaaccatagcggtgtgcggcggggggtctgcacccgggtgggggacagagggacctttaaagaaaacaaaactggacagaaacaggaatgtgagctgggggagctggcttgagtttctcaaaagccatcggaagatgcgagtttgtgcctttttttttattgctctggtggatttttgtggctgggttttctgaagtctgaggaacaatgccttaagaaaaaacaaacagcaggaatcggtgggacagtttcctgtggccagccgagcctggcagtgctggcaccgcgagctggcctgacgcctcaagcacgggcaccagccgtcatctccggggccaggggctgcagcccggcggtccctgttttgctttattgctgtttaagaaaaatggaggtagttccaaaaaagtggcaaatcccgttggaggttttgaagtccaacaaattttaaacgaatccaaagtgttctcacacgtcacatacgattgagcatctccatctggtcgtgaagcatgtggtaggcacacttgcagtgttacgatcggaatgctttttattaaaagcaagtagcatgaagtattgcttaaattttaggtataaataaatatatatatgtataatatatattccaatgtattccaagctaagaaacttacttgattcttatgaaatcttgataaaatatttataatgcatttatagaaaaagtatatatatatatataaaatgaatgcagattgcgaaggtccctgcaaatggatggcttgtgaatttgctctcaaggtgcttatggaaagggatcctgattgattgaaattcatgttttctcaagctccagattggctagatttcagatcgccaacacattcgccactgggcaactaccctacaagtttgtactttcattttaattattttctaacagaaccgctcccgtctccaagccttcatgcacatatgtacctaatgagtttttatagcaaagaatataaatttgctgttgatttttgtatgaattttttcacaaaaagatcctgaataagcattgttttatgaattttacatttttcctcaccatttagcaattttctgaatggtaataatgtctaaatctttttcctttctgaattcttgcttgtacatttttttttacctttcaaaggtttttaattatttttgtttttatttttgtacgatgagttttctgcagcgtacagaattgttgctgtcagattctattttcagaaagtgagaggagggaccgtaggtcttttcggagtgacaccaacgattgtgtctttcctggtctgtcctaggagctgtataaagaagcccaggggctctttttaactttcaacactagtagtattacgaggggtggtgtgtttttcccctccgtggcaagggcagggagggttgcttaggatgcccggccaccctgggaggcttgccagatgccgggggcagtcagcattaatgaaactcatgtttaaacttctctgaccacatcgtcaggatagaattctaacttgagttttccaaagaccttttgagcatgtcagcaatgcatggggcacacgtggggctctttacccacttgggtttttccactgcagccacgtggccagccctggattttggagcctgtggctgcaaggaacccagggacccttgttgcctggtgaacctgcagggagggtatgattgcctgaccaggacagccagtctttactctttttctcttcaacagtaactgacagtcacgttttactggtaacttattttccagcacatgaagccaccagtttcattccaaagtgtatattgggttcagacttgggggcagaagttcagacacaccgtgctcaggagggacccagagccgagtttcggagtttggtaaagtttacagggtagcttctgaaattaactcaaacttttgaccaaatgagtgcagattcttggattcacttggtcactgggctgctgatggtcagctctgagacagtggtttgagagcaggcagaacggtcttgggacttgtttgactttcccctccctggtggccactctttgctctgaagcccagattggcaagaggagctggtccattccccattcatggcacagagcagtggcagggcccagctagcaggctcttctggcctccttggcctcattctctgcatagccctctggggatcctgccacctgccctcttaccccgccgtggcttatggggaggaatgcatcatctcactttttttttttaagcagatgatgggataacatggactgctcagtggccaggttatcagtggggggacttaattctaatctcattcaaatggagacgccctctgcaaaggcctggcagggggaggcacgtttcatctgtcagctcactccagcttcacaaatgtgctgagagcattactgtgtagccttttctttgaagacacactcggctcttctccacagcaagcgtccagggcagatggcagaggatctgcctcggcgtctgcaggcgggaccacgtcagggagggttccttcatgtgttctccctgtgggtccttggacctttagcctttttcttcctttgcaaaggccttgggggcactggctgggagtcagcaagcgagcactttatatccctttgagggaaaccctgatgacgccactgggcctcttggcgtctgccctgccctcgcggcttcccgccgtgccgcagcgtgcccacgtgcccacgccccaccagcaggcggctgtcccggaggccgtggcccgctgggactggccgcccctccccagcgtcccagggctctggttctggagggccactttgtcaaggtgtttcagtttttctttacttcttttgaaaatctgtttgcaaggggaaggaccatttcgtaatggtctgacacaaaagcaagtttgatttttgcagcactagcaatggactttgttgtttttctttttgatcagaacattccttctttactggtcacagccacgtgctcattccattcttctttttgtagactttgggcccacgtgttttatgggcattgatacatatataaatatatagatataaatatatatgaatatatttttttaagtttcctacacctggaggttgcatggactgtacgaccggcatgactttatattgtatacagattttgcacgccaaactcggcagctttggggaagaagaaaaatgcctttctgttcccctctcatgacatttgcagatacaaaagatggaaatttttctgtaaaacaaaaccttgaaggagaggagggcggggaagtttgcgtcttattgaacttattcttaagaaattgtactttttattgtaagaaaaataaaaaggactacttaaacatttgtcatattaagaaaaaaagtttatctagcacttgtgacataccaataatagagtttattgtatttatgtggaaacagtgttttagggaaactactcagaattcacagtgaactgcctgtctctctcgagttgatttggaggaattttgttttgttttgttttgtttgtttccttttatctccttccacgggccaggcgagcgccgcccgccctcactggccttgtgacggtttattctgattgagaactgggcggactcgaaagagtccccttttccgcacagctgtgttgactttttaattacttttaggtgatgtatggctaagatttcactttaagcagtcgtgaactgtgcgagcactgtggtttacaattatactttgcatcgaaaggaaaccatttcttcattgtaacgaagctgagcgtgttcttagctcggcctcactttgtctctggcattgattaaaagtctgctattgaaagaaaaag

SEQ ID NO: 520 - protein, 1082 aa, Homo sapiens
MSSQSHPDGLSGRDQPVELLNPARVNHMPSTVDVATALPLQVAPSAVPMDLRLDHQFSLPVAEPALREQQLQQELLALKQKQQIQRQILIAEFQRQHEQLSRQHEAQLHEHIKQQQEMLAMKHQQELLEHQRKLERHRQEQELEKQHREQKLQQLKNKEKGKESAVASTEVKMKLQEFVLNKKKAHRNLNHCISSDPRYWYGKTQHSSLDQSSPPQSGVSTSYNHPVLGMYDAKDDFPLRKTASEPNLKLRSRLKQKVAERRSSPLLRRKDGPVVTALKKRPLDVTDSACSSAPGSGPSSPNNSSGSVSAENGIAPAVPSIPAETSLAHRLVAREGSAAPLPLYTSPSLPNITLGLPATGPSAGTAGQQDAERLTLPALQQRLSLFPGTHLTPYLSTSPLERDGGAAHSPLLQHMVLLEQPPAQAPLVTGLGALPLHAQSLVGADRVSPSIHKLRQHRPLGRTQSAPLPQNAQALQHLVIQQQHQQFLEKHKQQFQQQQLQMNKIIPKPSEPARQPESHPEETEEELREHQALLDEPYLDRLPGQKEAHAQAGVQVKQEPIESDEEEAEPPREVEPGQRQPSEQELLFRQQALLLEQQRIHQLRNYQASMEAAGIPVSFGGHRPLSRAQSSPASATFPVSVQEPPTKPRFTTGLVYDTLMLKHQCTCGSSSSHPEHAGRIQSIWSRLQETGLRGKCECIRGRKATLEELQTVHSEAHTLLYGTNPLNRQKLDSKKLLGSLASVFVRLPCGGVGVDSDTIWNEVHSAGAARLAVGCVVELVFKVATGELKNGFAVVRPPGHHAEESTPMGFCYFNSVAVAAKLLQQRLSVSKILIVDWDVHHGNGTQQAFYSDPSVLYMSLHRYDDGNFFPGSGAPDEVGTGPGVGFNVNMAFTGGLDPPMGDAEYLAAFRTVVMPIASEFAPDVVLVSSGFDAVEGHPTPLGGYNLSARCFGYLTKQLMGLAGGRIVLALEGGHDLTAICDASEACVSALLGNELDPLPEKVLQQRPNANAVRSMEKVMEIHSKYWRCLQRTTSTAGRSLIEAQTCENEEAETVTAMASLSVGVKPAEKRPDEEPMEEEPPL

SEQ ID NO: 521 - DNA, 153022 bp, Mus musculus
  misc_feature (1)...(153022): n = A,T,C or G
acagaacagaaaaaagggaacagagagagagagagaaagagagggagagagagagagagagagagagagagagagagagagagagagagagagagagagagaaaggaaggaaggaaggaaggaaggaagaaagaaaggtaagttacaataaactaaacacgagttgtttgtggtgacactagtgtggggccaggccatttgctctaatagaaaacacttcttggggctggagagatggctcatcagttaagagcactggctgctctttctcattcctgagttcaattctcagcacccacatggtggctctcaaccatctgtaatgagatctgacaccctcttctggtgtgcaggtatacatgccagcagaactctgtatacacaataaataaattgtttaaaaaaagaaaagaaaacatttcttgccaatcagctgcttccacgacataaaaaaatcacaatgtactctttggagaaagaggaaaaaaatgttcacgctagaaatgtgctattgggaagactctctactctgggtcagactttaaactctgttaattggactgagggtgcacatagctcagtggtggaggccttgccaagcatacctgaggctctgggcttcatcctaagcatgagagagagagagagagagagagagagagagaagaaagagaagaaagagaggggagggaaagaagagaagagaagagaagagaagagaagagaagagaagagaagagaggagagaaaaaaagaaaaaagaaaagaaaaccctttcattgtcaacttgactgatttggtgtctcctagaaaacacacctctgtgcttttctatgctgatgtctccagagaggatgaactgagatggaaagacccatgttgaatgtgggcagcactttcccatgagcggacatcctggggtggtgagtgtgctggctagtgttctgtcaacttgacacaagctggagtcatcagagaggagggagcctcagttgacaggatgtctccttaagatttggctgtagggctggagagatggctcagtggttaagagcaccgactgctcttccgaaggtcctgagttcaaatcccagcaaccacatggtggctcacaaccatccgtaatgagatctgacgccctcttctggtgcatctgaagacagctacagtgtacttagatataataataaataaatcttaaaaaaaaaaaagatttggctgtagacaagcctgtagggcattttcttaattagtggttgatggggtggggggagcagcccattttggtggtcctgggttctataagaaggcatactgacccaaggagctaaagggatcttcaaccctataggtggaacaacattatgaactaaccagtacccctgagctcttgactctagctgcatatgtatcaaaagatggcctagtcggccatcactggaaagagaggcccattggacacgcagactttgtgtgccccggtacaggggaacgccagggccaaagggggggagtgggtgggtaggggagtgggggtgggtgggtaagggggacttttggtatagcattggaaatgtaaatgagctaaatacctaataaaaaatggaaaaaaaaaaaaaaaaaaagaaggcatactgaaccttcttgtagaatgatgatcaatctgtgatgtgcaagtcagtaagcagcatccctccatggccgctgcatcacctcctacctctaggtccctgcttacatggaactgctgcttggaactgtgagtgaaataaaccctctcctccccaagttgctttccatcatggtgtttcatcagaacaatagcagcactaactaaaacgatgaacaagggaaaggggaagcaaacatctgcacagcagcatgtatctctctgcttcctgactgactgcagctccaatgtgaacagcaagcatccatccccatgcttctgctgccatgccgtcccaccctgatggagtggatcccttaaactgtgagccagaatagacacttccttccttagcctgcttagcactaggagtctttctgagaaccattacaatcagtgctattaccccagtcaacacggggaggtacataagcctcagtgtcttagggctctaagtgattcaccccctttcccagagactctgatccagatgtaggaaagctcaggagaacagcatttgaacactcccttgaaagatatgcagccagctctctggccccaacaacatggatgtgcagagtgagtcgccctggcaagtacactggggttccaatcacaaaaaagaatcctctggtttccatagcaacagtccttcccttcctcggaaaatctaaggtgtctccagcccactcagactttccagaatgaattggtgtttgcggctataaggtgtttcgtctttatctgtcaaagagcaaagaagacattcctttgagagcagctctccccgcccaccagcccatccctgcacagctggaatgctgcattgcagcgttgttcttcctttgctgtacaaagtccacagcccccctccatgctgttccctttgctagcccagtgcatcactccaggaagtaggtttcaccgacagaaaacagacagatggcaactgcatcatcccaagcttggctgtgatggggctgtgaagctgttcccggggtaggctgacccgtgggttaggacgggaacgacaaagcataaggctgtctgcctacacggtgtcacagtctctgccattttgctattacagctttgctttttccaatgctttcctggcggtatccttttaaattgcacctgtgagtacattaggttactaatgtggaataatcttgggagaggtgggaggcgcagagggaggatgcaaaaggaactctgaatattgcctttgctgcacaacaaccccagcgagagttctccgatcccaggctctggtacccactgccgttacctctgaaaattaaaatgcagtgaaaattttgccaagtaggatggttcctgaatcatctgcatataagccagctggaagactttcaaaacccatacactcctatgacccttaactctgtcccccaacaccatttctctaactctgtagtttccacaaagcataagtatgtcccccttctggtagggtagaaagtatcaaattgaactggagagatggctcagcagttaagagcactgactgctcttccagaggtcctgagttcaattcccagcaaccacatggtgactcacaaccatctgtaatgagatctgatgccctcttctggtgtgtctgaagacagtgacagtgtacttccatacataaaataaataaatcttaaaaaaaaaaaagaaagaaagaaagcaagaacgtatcaaactatagcatcctgaaaaacagaaccacgcgtgtcacaatgaatcagctcaagtcctgtccttagtatcaccctcccacctccttcagacttaggagaaatgaagtcatcacaatgacaatgaccatcaacataatctatgtcaccagagccttcctcaacacaaactgaactgctctctggacaatgtgtggggtcataattggaacacaaatgtctacccatgggccgtggttgtcattacctcggtgacctgccaagaagcatgtgaatatatactctgtgtcacagggttctctctggacatgccactagctgacaagaggagggctatactctggaaaggtcctcagagaaacaggcctgaaaggatgagtgtacaggtaggaaaggttaccattgtctaatgtgattatggaggcctggtaagtcccaagtcaagcctgacaggagaggctcgaccaacacccaaggcaaagtcacagatctagtccaccagtaatctgaattatctcttggtctaaaggagatgggattgcttttgtatttttcacacagggtctcattggataaccctgctctgcttggcactaattatgtagaccatactgacctggaactcacagagatcttcctgcctctgcttaccaggtgatggattaaagatgtgggccatcatgtctaacaaggtagatcttttaaagacttagattattttatcataaataaaatcatggcctagctaaattaaggtaagtgctcggacaattagtttgggattggcgaccttttcttctgtccaggaccatcaactgattggacgaggcccatcaacactctgaacagtgatctttttattcagagtccacagatctaaatgtaaacctcatcccaaaagcactctcatagaaagcctagagaagtgtttgagaaagtatttgggtaccacggcaaaacactctcacattgggtcactagagctgactgtggccaaaccctcacactacttcttgtgcctcactatcctttactctggattttgcttttcttttcttttctttttttttctttttgatttatttatttattatatgtaagtacactgtagctgtcttcaaacactcccgaagagggcgccagattttgttacggatggttgtatgccaccatgtggttgctgggatttgaactcagggcctccggaagagccatcagtgctcttacccgctgagccatctctccagcccagattctgcttttctatgccttttgttatcatcttctttactctgctagttagttttttgttttttgttttttgtttttttaccatcttgacaagctagagtcacctgggaagaaagaacctcagttgagggattgcctctattagagtagccttgtgggcatgtctttgggggtatattcttgattaatgatttacgaaagagggtccatcccactctgggcagtgccatctcctaggcaggtggtcctagattgtctaagaaaacaagcttagcaagccatgaagaacaagcctgtaagcagccttctattgagatctctggttcagttcctgcctccaggttcctcccttgacatctttgaatgatggaccgtaatctgtaactcaaataaaccatctccttcccaatttgcttcttgttagagtgtttcctcacagcaagtacattttctctctgattgtatccttaattcttaattttagggggctcctggccccgtaaataggcctccagcctgtagaaagtgaggttagtcatttccattttagagcatgctcacacatgtgcacacacacacacacacacacacacacaccacattttgcagaaggcagaactgaggcaacctccagggagctgaacaactagctggaaaaccttgccacaatgtcatcccgacagtaaaggagccctggctctttcctcttgaggacagtcaccgcagttgtttgggagagcatctgatcggctgaacttgggttctttgctcaagctagcccagaggagggcagagcatcttgtctgagcatccttccaaggccacatgacgtgagcaagctgctaccagacagacttaccatggcaagggctgttgaagaggaaatgcagtagtattaactcctttctgtttctaagatgaccttgaacatgagccagagcaaggcacagatgggctgtagagacacatggacaacctggagcaaggtctctgagtccttcgacacttgcttaaagaacaagctatatttgcctgaggcatcactggtagatcctgcagggctgggtgcaggatctgtttagtttttaaccattcacaggcagctgggccttccaagttgataaacattggtccttgttgaaagacctggaagaaatttctgcttgcaaccctttgactgagcaaaacaagatgaacaggccagtggtagagatagggacactagccttgaaactgatgttagctctttgggctgagagttaatgttatctggacctggtaactgggcaaaatcgctgtgatttataagtttaatgaccaagccagttcagtcattcaaccaggtctaaggggagggagtgaagattgaaaagaaagagacaattagacaagattataacatgactccagccaatgctgaggctgaagcaggtttttctttttcagtctgtttttctaccatcctaagtacctgcaaagaataaggtcagttcctaggataagaaacaaggtaacatagtcccatggtgttcagggacttgtcaagatggtcaagatcttgtcctagcccaaagtcaaattcttgcctaagcttatttctctgtcttagcccaatgtcaaattcctgccaactttctagaagtgcccccctgcccccaaactctccacagtttaaattcaaaataacaataaagctgggcagggtggcacacgcctttaatcccagcactcgggaggcagaggcaggcggatttctgagttcgaggccagcctggtctacagagagagttccaggacagccagggcagagaaaccctgtctcaaaaaaacaaaaccaaccaaccaaacaaacaaaaacaaaaaacaaacaaacaaaacaaaacaaaaaaaacaataaaaaagtaggatgcaatcattaagtttatcagtctatgcacctcagggggatttacaagcagctcagttttcattagaagggccgaggctcacctagataagatacaggacaagaaagcctcctggttctttacttcctacaggttacttctctttccttctttctttctttcttttttttttttttgtttgtttctaaacagctttttccaagttaacatcagaattcaactgttttcctcaccttcctcggaacccctgcgatcacccctgacttagctatcacatccgagctgtcctacacagcaccagggactcagcttcagtgggagtttataaaatccacatgaattctctcttctgttcctggttcacggtgagctcataccttgattttatgagctctttcttggttttgtgtatctcccccgcctcccaagacagggtttcattgtgcaaccctggctttcctggaacttcctctgtagaccaggctggcctcaaactcacatagtcagcctgcctgtgtctcctgacttctggtatgaaaagaccgcaccgctatgcctgggttgattttatcagttcttaagtttaaattgctaaacatgctaaactccagttctttgcttgttttctctcagactggacaaaaattcccccttttcttaatgaattatgagtcttaggtcccaagaaaagctgggacaggtctcactcagtacctgtggctagtcctagcatctctcattgtacccactaccctgaaccactccaacccaggagctgggcttcccctccatccccccaccctcaaatgtctaaataattcagctagtgtggttgagtgcgctcatggttcctcttggcctcttgtttttttctctctcctggtcccctctcccccctctctcttcttttcctctctcattctctccttctctttctcccctctcatggcccaacctattctgttagctgtcttcagtctggactcttccagatgcctctaactatgctctccctcatagctacagtaaaaccatcctccttaacctcggagcagtcatgtcttcatttccttcaatgaggaattaaggcaaaaccccgatattccttattgtctcggataaaatgtgaaaagaaacattaacagggggactgacacacatttaatgtagaagctttcttcctgcagcctgaagttaggccttctgagattccagtgaagacgcaacacggaggttgagcttgggtttgggaagaaggcccagtggcagggtacagtgctttcagagtaggggaagacctcagtcaggatatctggtatccgtgaccatgaaaacaggtcatgcttagtgctgtagaggtggagactgaaggagacaggaggattccctggaaattgctaaccagcaaagtctactccaggttgggtgagagatcatgtccttgaagaatacggtggaccagtgattgaggaagacgtcttggtatcttctggcccaaacacacacataactcctcatacacagacggaacctagggcatactttattctcagaatactttaataatgaaacaatactagaaaaaagattaccaaagaaataaattgtgtgggctgaaaggtagttctgtggtggcttagagcactggttgctcttctaggatagccaaattcacttcccagcaccccacatggcagttcacaactgactgtaactccatttcaagaggatctggcacagacgtgcaggcaggacaccaatgcacatttcttttgttttgttttgttttggttaatttattttttttatttatttttttaaagatttatttatttattatatgtaagtacactgtagctgtcttcagacactccagaagagggcgtcagatcttgttacggatggttgtgagccaccatgtggttgctggtatttgaacttcagaccttcggaagagcagtcgggtgctcttacccactaagccatctcaccagcccccggttgaatttattttaatgtgtgttagaaaacaataaacacagaaaacagacttcaccttaagaacgcaagctcccagtttcactgttaggtatgttatatcaatgaatttaataatctttcagatgcaaaacttgagtagaatttcaatgctaagatgatataagaacgtagatcctgtacagaattcttggaaagagaggtaactcttgagcaaatataatttttgcttagttctgagtcctttcttagagacactcattacagtgaagatattgatagtgtgaatggttctgacttactgacttaccagttactaaaaactggtccctatcttgaccaccctagcataggaaatacccctgtagctcccttttatccctgtcggtgtgtacacccttttgtttgctgttccctgggcctgctgagtgcttctcaggactgattaggctgcaccccctacccctagtatctcccttttagagtatttcaaggtcttcaggtttgctcccaggaagaggtacccattccatcccagagactttcctctaagagggttcctccaactttacttttccttttagggagtaatcttattgaatatctcatgtattctcatagatatcatgtcttatttttacatgttgcatacattttaaatgacattatatatttgtaaggggacccaagagtactttagagaaaagtgctgaagaggacataagggaacggatatgaggaggctatgtcaaacattcctccttaaccctgaagtcctgctacatgctaaaagtctcactttcagccttggcaggacagggtacacctgtcttgtttcctgtgtgagacttttactgctgtgctgcttatagaactatcttctggtattttgtcttatccaaatcattttagtttttctgtggcattgtttttttttttttcctgaggactcaaaatagtagagttttgaacatgcagaggtggatggcggaataccaatgcacgttaaaacaaacgaacaaacaaacaccttaaaaaagatagaagttgtgcttataaatgaaaatatcgaactataaagctagcgcatatataattatgattcactctcaaaacaagtgtgcctgcaaagaaaagctcggattcgaatagaatccgaattcagaaccagcttttagctattgcgcgccccctccacagtcccctttgggggaaaggccagcaaccacgcggggttttctcggcgcattctgttttaagaggtctggaagcagaaagctaaaagtccattaaaaggccacgtggccagctttgtgaaaaccgggtagcagtgaggcggccagcttgtcttcagccaaaatggcggtgctcggactgcgcgctcgcacgggatggggaagggcgtcggggacgcggccgggcgcgggcgcggcctcccggcggctgcgcgcctgcgcgagggccggctgccggcgagcacgcgcgcggcggaggcgggctcagcagagtgcggagctgcaacctgggagccggacgtgtccgcgaagatggcgggccgggtgagtggcggccgggcagcccgggctcgcagcggatcgcccgaggtcgcgactgctgcgaggtccacgagggctccggggaaggggcgcgaggctgagcacccaggaacgctgaaggaagggaggtcagagcaacgctggaggcgagacagtgtagctgcggcaggggattagctctgctcagaaactctgtcctccccgagggttgtctcttcgtcccccgggtctccagtgcttcccttgtcatcccctggggctcgtttctctcgtccttcaagcatcttgagggtagtggccactggagcccccctctgacgagcgctgtgtgccctccacactcctccgagggtttctgaggtggcactgccggataaccgcggggtgtagtctgctgcagtcagggcgagggtgtgggaacccatttctagttcttcctaaatgaatgttatgaaaagaggaggggaggtctgcaaattacttttacggctaaccttagaccatctcctggggagaaacatatcagctgtgaagcagcaatgtctttcgtgcagatggacttggggtgtcacgttttgtttttctaaatgacagtcgattcgaatgcagcaggctgtgttgtagtctcagggatttacattttacttccccattaagctcgtaggacggcggggtaggattggggttggcgaggagagatggggccaggtcactgctgttattgcagtaggcatcagagctaatatcgctgatggatggatcctgcccagagattgccctgttcgaaacctggggacattaactgcgtcattacagactaacgttgtgcttgactgattcacttacacctgaatatttgaataagtttgcatacatgtatgcatatatgtaaatgtcctgtctaaagagaattgtaggtcatgagattctaaagtcccaaagagacggtagaggtcatcagactagctccatctctttctcttcctttttttataatcccccttttatctcaagctgacccttttaactatttcagggtctgtttttgcctcctcaggagcccctctcctgaatcatcagcccttctggaatgcactggtctcttaaaccctccctctgcccccacagatgtcacttttcctctaaccattttttttcccccagtggcaaagtctggtgattttctgtgtgtgttgactctcatttgcctaccacctgctacctcctgggcccaccacagtcggactgaaatgcatccctaaaattcatgcccatttcccaatccttgttacacgtgatgtctcagagcgtctgacagtgttgcccgtctcctccttaatggaagacattcttccatggcttcagtaatgctgggctaatgttttgactcatctctctttcggagtcaccttcctcctccctgtcattcaattcccacactctgttttatctcctctcctcagctaatcccttctgagccaaagctacaactgtctgtatgcctgaggtgctcaagctttcatccatcctctacagaactgccctctaaattccaaattgatgtgtggaagtgtctgtttgtaatcaagaacaaggatgggtgatcacctttgatcatcacagaggcaggaggacctctgacaatttgagcccagcctggtccatatagtgagttccaagacagccaggagtacatagacaccgtctcaaataaattaaatacatgagtaaataaataaaataactaattcaagactatttgaactctagtttaaacccaaagctgtgatctaagcccacttccctggtactttttctgtttttctctcattgaatgataccatcaccagtggaaacctggcgggtatgggatgactgtgtgtgtgtgtgtatgggtggtaggggcacatgcatacccatatgtggcagtcaaaggacaacgttgggttaggatttaccacccacgctgtttgagccagggtttctttggttgttcgcccctgcctatgccaggctagctggctttccagcttctgtggagtctctcgacccaggattacagatgtgagccatcctacctgcttttcagtggttctggggctgtgaactcaggtcctcacacttgcagaccgcgtgcttcatccaggagcccttctcttccctattgtctgtccctcttgccgcatcccctgtatagttcaccactgtcttcccacctgcacactaaagaaaataaaagtggttttttttttgttgtttttaaacgaaggatttaatcagggcccagaaaggtaggcgtgggagcattgctgctgtagatatcctaggtacccgctgcaattggtgtaccccctccctggtcagtttaccattcggcatcctcgtctccacccctttttctctctgtggtctgaatagctgcaggaagtttcctagtcttctccttttggccttctgcccctcttccatcctccatgctggttactcttccccagccccttactgcttaaacccgtcctcagtttagttttgggagaagatgagatgcttaacaaggcgttagaggctctttgtggtttgcgcctgtttccctccactcactttcactgtctgtgctcaggttatataagcctttcaatgccttgaagcttcagttgtctctcttaccacaaggtctttgctgggctcgctctttgtaatgttctgcccttaaccatttacctcctactcagagaacgcttgggaagcctgtgatctcaggctgtaagttgtgatactttgttacatcgtcttgaagacctgtgttcctctcttagagctttgcctatttctcactgtgactctatcatattagtatgctgtatcctgtgtgttggcacatgcctgtaatgccagtgcttgggagccagaggcaggaggatcactgtatgtttgaggccagcctggtgtacatactgagttctaggctggcctgagccatagaataagaccctaactcaaaaataaagtgctagtgttattatttgcctccactttatgagaccgctctagatatttatgctaggtattttactcattacctgctttatacacttgtgtttgcgcatcaatttggtagaaatttaaaaagaattgttaagtgcaatacattttagaaaatttaattctttaaagcactactaacatatggaatttattctttttttttcaagcacttaaggcgcaaaggtgaaaatatattattgcttttgcatctgtttgcttacatacgagcatgcgcgtctgtgccgtagcacatgggtggagctcgaggacaacttgtgcagtgaggtttttccttctaccatgtgggctcagggcttgggttccggatgccggacttggtgcctttacttgctaaactgtctcacctgtccaaaggtatataatgttgctatagaaagatggttaattgacagaagagtgagcccttagatacgctcgtatttgtagtacaccaaacacttgctgtaatgctggttatttttttctttgtttttgagacggtctcccagtatagcccaggctggcctggagtgcaccttggagaatacactgacctattcacagagatctgcctgcctgtgcctccgaatactggaataaatgctgtgtaccactccccacagccctgtagcacagctcctaaacacccatactctgtgttgctgacattacacttaatataaagcaaaatgatctcatcaatgtaatttctgtttttgtcctgattagcagagaggctgggcgttttttttcttgttggtcaatggagagttcctccatgcattattgcttgcgtgtgcactctttagttcgaatattcatattttctttttatttgtatagttttcccttttgaggggggcaggacttgctttagatttgttagctgcagatagtttctttcttttttctttttttttttttaaagatttatttattttatttatatgagtacactgtagctgtcttcagacagacctgaagagggcatcagatcccattacagatggttgtgagccaccatgtggttgctgggaattgaactcaggacctctggaatagcagtcagtgctcttaaccgctgagccgtctctccagccctgcagatagctttttgatgaccattttcttcatttattcataatgtcttagatttaaatgtcattgttatatttgcccattttaaggaaagcttcctttgaagtcacgaagatcttatttaagttttgtttgcttcgcctatttttttgtgattaatttatgtgtaagttagttttgtatttggtgtgaattatgaagttaattttatccttccatctgcgagaacagttgtcccgctgtgtgtttgagtccatcctttatccacactgatttgcgatgctctctctgattcaaaacccatggcctgtgtggaggtggggttctaagcctgggctttactcttccatgactcccaggtatctcccggagtgtacttcttcctccttttaaagatggcatccgtttggttttgtgtgtacatgtgtggttggacatgtgcagggcatgtttgtatgtgtggaggtgaaaagtcaaaggagtccacactctccttctactgtgtgggtctcggggatggaactctaccttggaaccatctttcccagccagccagctggctcctccttctttttccacattttacactttcagccatctccatgcttcttcttctgaagagagttccactctgtctctcttgctatcgactttgacctgcatttccgcccatgttttataaagatagctacaaagactaatcaaattcagctaaatacgtttttaaaccgattttatcttttgtggggggcgggggggttggttttcagttttaaggcaaaaagtatacagtttgtcgccacttttagctgtgcacaggaagcagatgacatggcagcagctctttagggaccatgcagggtgtctctgtcctcagctcctttagaacaaactcagtggatctcacaaaacaggggagaaaatgggaaaaccattcaggtaagaatagtgggctttgagatcactggacccatggaatgttttacagagacaccggtgggatttgcttttgttgtaaagaggtcttatgttgaagcttatgaacacataagctcatatgtgacttgacaaccaatgtcagcattgtcaccaagttctggatcttctaaagaacctcttctttggggattttttttttttttttaattagctgtcgttaccaagacatgttctcctaaggaatgatactgatgacattttgtgttaagagcgggtttagttccccctgtttagaacagagcctggaatggatgcattacactcggtaagctattgcggaacaaaccagctcctttgaagtatagttcagaattactgttatctcctcaactgagccgccagatactcctaagtaatactgttgcttcttgtattatccaaactgttcataacgtagagctaatgtaaacaaccacttggctctaatataactctttttctctacctgtagataaattgagtctttttttattattattatttagccttcaaatcagtttagagtgaattaaacaatataagtttaattcgtgtttgctaaattaagtgatgtggtatattgagtattactatatacacagtgcttgtattctaatgtgtgtgtctgtgtgtgtgtgtgtgtgtgtgtgtgtgtgtgtgtgtgtgagaaataattcaatacattttgatcatggttttccctcttccagttcccccagatcttccccacccacccaaccctatactctttctttctctatttagaaaataaacaggcaaacaaaagaaacaaatcataattaaaagaaaaaggacgccgggcagtggtggcgcaggcctttaatcccagcacttgggaggcagaggcaggtggatctctgagttcgaggccagcctgggatacagagtgagttccagaacagccagggttacacagagaaaaccctgtctccaaaaaccgaaaagaaaagaaaagaaaagaaaagaaaagaaaagaaaagaaaagaaaagaaacacacacacataaataaaacccactcaaaactcataagacacaaacaatatatatatatatatatatatatacatatatatatatatatatatatatggcaaatgggtagtagaacaaatgatgcccaaacaaggccctgtgagacaaagagtctacaaaaatactattgagttcactttgtgttggccatctgctgttgttcatagggtctacacataagtgtgcttaatatatctattaagactttttttggaggaaatatagttgttgtgttttttttgcaagtggatgtcagttgaaaatagcttcttggttagggatgggagcctgtgtccatgtccctctctcagtgctgagaacctgtctggcttgaatctgtgaaggccctgtggaggctgccatggtccctgtttgtttgtatgtgtgtcagtagcttaaaaaaaacataatgtgttgttttatgtgtatatgttttgtctgcatatgtttctgtgcactacatgtatccctggggaagccagaagaggggcctcaaaacgcctggaactggagctgtagacagttgtgcctgtggtgggaattgaactcaggacctctggaagagcagccagtgctcttagctactgagccatctctccagtttatgtatcctgagtacaacaattctcagagtgttgtgcagaccagcgtggtcagcatcacctgagaactggccaagaaagagctcctcgggcttgcttcaggccgagtcccagactccgccctccccttcagcagatgctccaggtagctctgcttcctgagaaggtggagaactgttgactctgcatcttacttctctccaaggtggtcccttgggaattgttgaaggtcctttctttttttgttgtttaatggatctgcaatcttgatatttataaacttcaaggtcgtcttttctcctctctaaattctctgctggcattcagtttttcagatagctgagaagttgtagttatttcttacactatattgaattagctcctcccatccatcttcccacacaaaaagttttaagtgctaggtaaagtgctcagggctggagaaatggcttagcggttatgatcacttgctgttctgttggaggacccaagtttggccagcgtccgtatcaggtagttcacaagcgcctgtgactccattccagggaatctgatgcttgcttctggccctagcagactcctgtacacatgtggcacacacatatacataaataataataagactaaatcttaaaactacttgaattcaagctgtaactggctagagnnnnnnnnnnnnnnnnnnnngtggggattagacaccgagtgcctttgcctccagagaagcttggcgaccggaggtaaacattggtggttttggtagaatcctcttagtaaagatcgtacctccaggggatacaccttataataaatgtcagctaggaattaacttgttccatccagggaaacgaaaggaaaatttcctgtcacactttggtgctgggtcaaacaaaaacaaaatcctcttaactttttttttcctcattgtatcaccttgaagtctgggcttctgatttcataccacttggttggtctgaaactcctaagctagtagttaggtgtgcccaatagtggcagcacctccatgccccgcccagtagcagtgagcagaaagctgcttggaagaactcatcttccaagagcctcaggactcagaaagttcctaaaaaggaacttgaaacataaacacacacacacacacacacacacacacacacacacacactcacagagtcacaaatgacacagtcaagactccacaaatgagaagtcagcagaagcagtaaagagatgggttggagagctgatgccatggctccatgggttaaggcgctggctgccaagcctgatggctccggagtttgatccctaggacctagacggtagaaggagagaactgaaccgagtcctacgtgactgtcctctgacctcctcaagatgaggtgcacatagtaaatagatagggagaggcaggcttcaactcttgagaatgcttgagtccaagcctggcctggtctacatagtgagttccaaaccagccaaggttacattgtgagaccctgtctcaaaatagcaaacaaaacaaaacaacaacaacaaaaaaaaaacacccccccaaaaaaaacaaaaacaaaaaaccccaaaccaccactatcacagacaaacaaacaaacaaacaaaaaaggagatgggattttcaaaggcttcagatactgaaattagctgattgtcctggaactcactctgtaatatctacagagtggttggtctcaaacacagagatctgcctgcctgtctcccaaatttttatacaatatattctaatcacactttcctcctctgtcaactcttcccagatcctctccacttctccacacatcaaattctacactctccttagaaaacaaaaccaaggaacatactgaaaaacccaaaacaaaacaaaaacccccataactgccccccagaagtcaaaatatactagcaaaaaccaaacaccaaaaaaaaaaaacaaaaaaaaaaaaaacaaaaccaaaattagacaaaaaagtcaatgaaaatacaattgagtttactttgtattgactaactacttgtggccagaaaaaataaaatatttgaaaaaaaatttatttgggattccaaggttgtggaaagcaatggaaaggtcctgagaacacagaaggcagagaagggcgctcaggctagtcaggcccctggagaggaactgtgaggaagccatcatctgaagagagaccgccaaagaacctatcgttctgcccgttccgaaagtctaaagaagccaggtgtggtggctccagtcctagctgcgggggcagaggattgctgtgactctgagaccaggctgggctacatagcaagagactgtttcaaaacaagagcaatggcagtgctagtaatcaaaagaagtcagcggggtcgtgtggacgtttagcggctagaactaagcatacgatggccgctgcacctgagtgaatggggtgagggttggcgtagactcaaaacactttatgatgctctcctcagaaaggagtgagagcttcttggatagctttaggttttatatatatatatatgtatatatgtatgtctatctatatatatagatctctctctctctctctctctctctatatatatatatatatatatagatagatagatagatatagatagatatccagagtaaccacagaagtaataaaaatatgaataataatgggaaattaaattaaaaagattttttaaagtagaaaaataaatatagaaaaaatgcaatcaagaggagtcagagtgataaaaataaaataaatagaagcagaggcaggtgtggtggtacgtgcctataatcccagcactcaggaggctaaggcaggaggattgagaatttgaggctagcttaggctctgtaccaagatcctgtgtcaaacaatactcacaaaatataaataaacaaattctacaaattcattcaaaagaaaagaattcatcttagattcttaaagagtatattgaaaaaattctaagctcggcaactatttatttgcttatttagtcattcattcattcattcattcatccattcacttcctcatctatctatctatctatctatctatctatctatctatctatctatctgtcaatctataatctgtctgtctgaaataggtttcattatgtagccctgagtgacctcaaacttgcttatgtagaacaggctggctttgaactcacagagatcagcctgctactaccacccactgctgggatgaaaggcatgcatcaactgggcctggctcccagccatcatttttaggttagtcactaaagatacagctaaaaagcaaaaatgtaaaagataaaaaaagaaaaggtctcatcagataattccggaacaaaagagaggtaaaatagctacagtaataccagacaggatgaacttaaaacagaagggatagagcggcctctggcagcagtggttcggttatccagagataaaacagttctacgtgtgtgtgcatctaattgcctccatatacaaaccagaaagcgatggaactgagcaggccaggaggacaggggaaatcacagggacaagagaggagccttctcaccttaaagtctgcttctttctcaccagcaagaatttcaacacagttgataaaatgttcagagaaggcctacatggagacaaagccttttgtatagaggtattacagatactgctaatattgtgggaaccttgcataaggcccaagagtgtgtggcctttgagtatagctctggttttttttccccacatataaacctgaaattttctgagaatctcaaacaagactatacccttgatttacgattttttataaaagatttatttattttatgtatatgggtatactgtagctgttttcagacacaccagaatagggcatcagatcccattacagatggttgtaggccaccatgtggttgctgggatttgaactcaggacctctggaagagcagtcagtgctcttaaccgctgagccatctctccagcccctgatttatgatttttaaaaagtgtctgaattcttttttatgacccttgtgacctatgctttttccttaccagctgcagttctgctcagtactcctaaggacttactaaggaggaaaaaaaaaaaaaacatgaaaaggtttctttgcaacccttcgaggtgtaacttcagatgcccctaaactgcacgtatggctgttacagagagcttacgtactttctcctgagagcccataccagtactggagtgtagtgccctttctaaagctcacccatgcttaagtgtgtcttagtaacctttcctaatactacctcatacctccttgtgtcgaagctattatttgctgctaagtgtaggctcttggctttacctgactatggagtggtctggtctgtcagagactccttgggccactccaagtggcaaggtagcaccacctctgatcaagctgctcctgacagaaatggtgatagcagggaatttcaggcttctcttcattattgatgaggaaacaaaatggttataagtataaagtgataaaaagcaagtgaaaaatccagtttctctctaggcctggtggcgtgggcctacttgggaagctgaagcaagaaggttgcagtaattaagatcctgtctgggttttagacccagtattggggttgggggagggatttattttaaagaataatgaatccagcttctcagctgaattgactgtatttcaggggctgcacgggactaatggctgctggagcagacagcacaaaaactgtttccacattactccagtttggatggctcagatcagcaccttattcagggtacacgttgagcagcacacccaaggtgcagagccctgtactgaacacagtgcaagtcaacgagaagtgagattacaaaatggccagctaaggaccagcagatttcttactcagaataaaaacagagataattatggagtaaaaatagactccattatattaaagacttcgcatcaaagggcacccttgaactttgttcagactgatgtaacaaagtcctacttacgcagtggcttaaacaacagaaacggattttctcctagttctgaaggccagaaattcaaagtcagggtaccacctaattgactgatgagttattgcttctggactggatgccgcagcatcatggggtgggaggagagggaggaagggagggatgggggtcgaggaagagaaagctgtcttttcctagaaggttagaatcctttctgagtagagccccatccccttgatcttaaccttagttacctcaaggttctcattccagagtgatcagtgggttagcagtgcaggctttaggttttagggccttggtatataaatgtgagtgggtgggagatgaagaaagttcatcaacagcacacaccgtatgagagaaggaagacaatctgcagggtgcaagaagacagagtgcatgcatttgatagaacttgcacctagactacaagccaaacaaaacttgccaactaatcataaaaagaaacaacggaaagccagtagaaaaatagagcaaaggttccaacaggcattttcagaaagatgatgactctgacattcgctctgtacttgacctcattcatcctcagagaaacaggagctgaagctcggggaggctgtgctgcactctcaccaggaagcagactgagagacccaaggtcctccctcagtgcactgctgcggtggggcagctgcaagtcctctgctggaaggaatgaagaggaaccagtacagcccccttgaaacacctgcagtgttccaaagctgcacacagaaactcgtacactgtatttgcttccactttcttgggtttgttttgttttgctttgagacagggtttctctttgtagctttggctgtcctggaactcaatctgtaaaggaggcaagcctctgagatccacctgcccctgcctctgcctccccagtgctgggattaaaggcatgtggccaacaccccccccccccccagcattccttccacgtttacagtgtgaactcatccaaggaaatcaatacccagtttaagaaaggagatcctcccagcatcccacactgccctgtctgcattatcctcccggcccaaactgctgccaccttcatcagatcagaggactagggggacgagtctttatctgtgtggccatggggtggccatcacgtcacttgcagacatcggtccctttgttttcttattttttggtgtgctaggtaaacacactagtcctgagctgtattcccagcttgctcaaaagagcctgtctaagggactgaagtaggctagtaatcccaatcgcctttcatcagccatactgacctaagtctttaaaagtaatctctaattataaaataactaagtgataccattgttatgattgtatttgttattaagctgtattaagtgagaaatctttccgtgttacaaatatgttgtgaatgtgtgtgtgtctgtgtgtgtgtgtgtctgtgtaattacaggggtgcagatcaacaccagcaattaaggtaattagagtgaggcccatcagtgtaagtcaatggattttgctgctttgaagacatggtatccattagaccttagagtccgtgatgtccttaggtgcaaaacttttttattttcatttatttattttttgtttgtttgtgaaaatttggggtcaaattgttttatttaagaaacttcagaggaaactgttcagagtaagaaaattctgttgtggaatacagtcataaacgagacggcattttagttgtgaacacaccttcacagacacacacttttcttgttaagagtctcagcaaccttatgagctggcactgtcaaaatctggctcacaaaataaaacccgaccaactaagaacccacaggtgctatcgtatttcttcacggtgaaggttaaaggcttaccccagagctcaggaccaaggctaggatgtctcctggccacttctattcaacatcattgcaagcgttaggtagggccattgtgccaggaaaggaagaaaaggcatctgtaaccatcagtctatgcagacagcacggtgcatccgtaaccatcagtctatgcagacagcacggtgcatccgtaaccatcagtctatgcagacagcatggtgcatccgtaaccatcagtctatgcagacagcacggtgctgcaccgtttcttttttgttgctgttgtgctggggattgaacctagagactcagtgcattctgggtaagtgctctaccatcggactacgtctccagtcccagatgacactcctaaagaatttatctggaggggggggagggatggagggggaggggaagatttaaagctagaaacaacgttcagcaaagctgtagcataggcaagcaatatccagcaccagttgcatttctctcccatgacaatggccagtctgaaagaggaaataagtaaaccgttttatgctctggcatcagaaagaataaacaagaacaattcaaggacccaaccctgtgacccttccaagaagggctagatttaaaaaatgcacattcttgaattaggcaatggtttttaaagatgtgatacaaaagcgtcagcaatcaggagaactaggattttaacaaaattgaaactttagtgtgtcaaaggagatgattaagaaagtgaaggcaacccccagaacgggagaaagactttgtaaattgggtatctggtgagcatgtatcagaaattgaagacgtatgttcatgtgtaaacttctacagagagccacgcatggtgctgcacactgtgatcctgccactccaaaaacggagcaagagaatcacaagttggagaccacagttagctatgtaagcaaggccctgtctcaaaaaccaaacaagcaaaaacacaaaacaacaaataacacccccaaactccacattcggttgctgcctggctgttcatagcagcattcttcttaaagcctccaagcgcaaacaatctgaatagtcactgaggttgaaatgataaggtgtggcttggggggcttgagagatggctcagcagttaagagcactgactgctcttccagaggtcccgagttcaattcccagcaaccacgtggtggctcacaaccatctgtaataggatctgatgtactcttttggtgtgtctgaagacagctacagtatactcatataaataaaataaatcttaaaaaagaaagatagagctgggcagtggtgatgcacaccttaaatcccagcactcgggaggcagaggcaggtggattcctgagttcgaggccagcctggtctacaaagtgagttccaggacagccagggctatacagagaaaccctgtctcgcaaaaccaaaaaaaaaaaaaaaaaaaaaaaaaaaagaaaaaaaagataaagtgtggcctgcccatacagtggaacatagccaggctgtagaaaataatgacattttcgtggctatgcactgcaacatgccggagcctgagaagcattgcagtgagtgaaataggccagacgcacgggacaaacaccatatgcttgcgttctcacagacagcttcttttacccagcattacattcatgtacatacatatgtacacatgcgagcacacatactcaccccgtacactcccgtcagaacacagcccaagcacgtgagtgaggacggtgctgagtacctgtgagaaaactccaagacagcgagagtcttgtgaacccgtttcctcaaaacagggaactgatctcagaatgccttgctatgctcccctcccaggtgtagcagatagcagggcgttttctccagattgctcattattgcttgctgacgttattcagttaaatgtttaagctctcctttctgtgcctctgtggaaacacggttttgccacgtacagcttgtccttgtgattgtcgacggctggagctcatgagagctctactcaggtgattgctcttggtcctcagagtataaattgcccgatgctctgactaaacttcagttcgcctcacgtattggctccgttctcccaggtcccgctgcccgtaaatggtaaatatatacactgatgattaatttttactgaatacctgagtagtattttgtcttatggccacaacactgttgtttatccattcatcatcaggaggacatttgtgacctttccagttttgtctactatgaatacagatgctacgaacctttatgtttagtgtttgtgtggacgtaggttttcggtttactgactgaccagagacctggggctatatttgctaggccatataacctttatatgaagctgctctgtactgttgccagtatttgatgttattgctgtttgatgttctcattttttccgcacggattttccccctgaaagatcaaagtgaaagcttcttaaaatagacatttataaaagaatcttgaggactcgacaggtgtcaagaggttcgctcgttatgtgcacagcattcgtctgagtcagggaatgtcaaggatgctccaagagacttgtgaaaatgactatggcacaccaagctttttgtttccccctcccccgcatcccagcctcgtatcccacatcttcagaatttttttttaattaaattacatttaattatgtgtgtgtgtgtggggggggcgtgggtacggaggtttctgcatgaatcatggcctgcatgtggggagcttgtgggagtcagttcttcttccaccgtgtggggcttggggatggaactcctcagcttggaggaaaagcacatttgcccactgaggcttctcaccagcctgtcttcaagagtttaacaagaagcccaggtgtggtagttacacatctgtaattcaagccctggggaggtagaggtgggggattagaagttcagagccatccttgattatataatgtgagttgtaggccagcctgggctgcttgaaactatctcaaaaaaaaaannnnnnnnnnnnnnnnnnnnnnnnnnnnnnnnnnnnnnnnnnnnnnnnnnnnnnnnnnnnnnnnnnnnnnnnnnnnnnnnnnnnnnnnnnnnnnnnnnnnacacacacacacacacacaaccaaccaaccaaccaaaaaccaaaaccaaaacaaccccctttttcttgtttttgtttttgtttttcgagacagggtttctctgtatagccctggctgtcctggaactcactctgtagaccagactggcctcgaactcagaactcagaaatcctcctgcctctgcctcccaagtgctgggattacaggcatgcgctgcaagtatcatcggagtttatagtgtaggaggttctgtggtcttgcaggtgaccatttatggtaacatttctatgttgctctggaccaatcgtatctactggaaccatctgcagtggtagagatcaggcacttgtgatatttgaaatgtggatagtgatactccaaaatgaaattctaagttttcattaatgctactagtcctaggtctgggagttactttgttgcaaagtgaaggtttcttttctcttcctcagagatggtcatttaaaacagccatgaacacttgtggccattcctcttcctgcctcagctttcccaatgctgggattacagatagaagtcatgggccatacgccccctcccctcccacacaccctgccccacatgaaagggcaattttaaacccttagttcttcagagtgatcccctaggagaaatatttgagtgggggcatgtcagctaggctggacctggggcaagtttctgtgtattcctctctttcctgtgggaatctgcaaacctctggagaaatggagccaaggcctgaggcgagaggcctgaggaagagacagcatgttcttcagggttatagtcagggtaggagggaatgtctggtgatgagccctttctagtctgctagcacactctgattttcttttcccctttccttttggatagggtttctggtggtcctggctggtctttagtccctttgtagctgagggtcatcttaacctcctgatcttcgtgcctccacccctcaagtgctgggattacaggagcgttcgttaccactcgctgcctcatattgaatttttctttatttgaccgtgctgttatttgatttaaaagttcactcaagtaatctattttctaaaggaaacttttacataagactgtgttatttaaattggcaaactgaaatactgtccagaaaatcctgcttaaagcctgcactttcctccccccaccccttttttctttttgaaaagaagcaaattctctgccgtttaaaggctctggaatgaccgatgtcataattacttccactggagttcccttttgtttgataaccttgacattctttaagaattgccagtggcctatagcccactacccatactgtttggcattttaaattacaatgaagacactcctatatccttaagcagttatgtgttccagtaacttgaacaactcaccttaataaaacaacccatcactgattataatttcatgtttaaaaggctatatgcctgtagtgtttggcttgtattttttttttttccctagaggcaaagtcagttttagaaaaaaaaaaaagtatggaatttttccttggcatttctatggtaaatagacaacttgactatttatagggacttacactttgttttaaaatgagataccctgcctggcttaccaccaaaacacagatgcttctgccttctaatagggaggccctttcctcgtagcatctgtttaaattggctgcccagatgatatccacagattcccacccccttcctattaaaggacattgacaggtaaacaggtttacaaatgaggttaacctaccattttgtaaagtttctattgtgttggctctgtcatggaagtaattttgttccatttattgatttatatttttccaatatgtatatgtatgtggtgtgcctttgtggatgtatgttttttgcatgtgtgtaggtgcacatatttgtgtacatacatgtcttctgtgtgtgtatataaagcaagaggattatgtcaagaatcacccctcggggctggagagatggctcagtggttaagagcattgactgttcttccgaaggtccggagttcaaatcccagcaaccacatggtagctctcaactatctgcaatgagatctgatgccctcttctggtgtgtctgaagacagctacagtgtacttacatgaaataataaataaatcttaaaaaaaaaaaaaagaatcacccctcaattactcttcatccactgagatatcagctcttggccaaactcagagctcccatacatggctaggttcctcatccagtttgctgtgtggatcccttgtccctaccttcagagctatcttcctagccccaagttgtgtagtgattaagtcatctgaatctaattctgtgatatcctaaatgaccttgaagggatactgccttggacacttgtcctttgggtggtttgaattgggtttgtaatctacgattaaccagcactcactgtaccaggcccaggagtagtcctccggaagtatggacatgagcaaaatctagtctccaaccttaagaattatcctaggtatgattcaagtgtgtaggcagacagtgaaggtcatcttcagggcttccatgcatgtcttctcagttctgtggggaggggcagctgtccagaatgtctcctagaataagtattgtctaagctgagaactgtagagtgtataagaattggccaaggaagggatgcagatttaggggaaagataatcaagggaagaaacttgaaagtaaagagactctaggaagatagaaaactttaaattgttaagtttttgatggatggctggtccaggtgtgaccctaacaaaatgctctttcatttggaaggtaaacttgtgaccttgactctgttcatgtcatgggaaattggtgctttccaaacacttgatcacgaattcacatgtcaaattatttatataatcctagtatgtccatattgcatattcactgatgtgctgagattttatacacacagtcaaacataaaaaaaaaaaaaagaagcagccagtgatcaaatgtataatctcatatctttaccagtgatcccaaagcgaagcgagagtcattgttcttcggcatcttgcttaactgttttgcgatgcatctgctcaaaggcccgttcccaaatttagcttattttgtcacttgattttagtgacaatcaaagcttggatcaaagtaaaggaatttggctgtacttttgaaattatgacattgtttttttttaatcaaactaatcaccatttatggaaatgttttactgaaacgtggctagtacatttccatctgtctactgtttttcttcaaattaattaaaatgcattacactttccgtggtgctaatacatgtgttcagaaaaacccctggaagccttcactcggataacatgaagcttaaactattctgtttctaactttaaaaacacacacacacacacacacacacacacacacacacacacacacacttaggggtttggggtttctttgtctttaggttgagtgtcctggaggtcacaggacagctttcaggagtcagttctgtggttcctgaggctggagctctggttgtcagactttggcagcaggagcctttacatgctgagccactggcttgaatatactcttttcagtgtttttgttgttgttttgttaataaaagatttagataactattcttgctttcaaccctctttgtttcagtttttgagacagggtttttcagtgacttaagtggcccataactcactgtggtgcccaggctaccctgatagttgtagtcttcctgccttagtgtcaagacggctgtgattacagatgggcacaacaccttaagctcttttaaatatttgtagttaccagtaatcatatatgatcttgagagagagagagagagagagagagagagagagagagagaaagagaaaggaagaaagaagaagacgaggaggaggtggagggagagaggaggcgaggcgaggtgaaaatggttgagagccctggatggtcttcagaggaccagtctggttcccagcacccattctgcatggctcacaaccatccgtgactccagctacagggtctgacactgtcttctgccccctcagacacccacacaggtgtgctgtctgtcacacatacataaaaataatttttaaagaagaaaatgatgctacttcctatctccatgtggagcgtgggaaagattcagtattgtaaagcccctgttaaataaaaaggcctcagggacatcctggggcatcctgcacacccctggttctgaccaacctgtgttggtaatttacctgtcaatagggcagcgactgccagtgttttctacacttcaggacttgtgtctgctcttctaggagagctgctgtggcatctgattagcattaatacggttttgtgaagataaggctagttgcattaaccagcccatgccttaaagtcagcagagagagaacttcatcttgggtaatgaaacttaaaatcctgacaggattagagggttgttggtttttgtttgtttgtttgtttgtttgttttaatgtcattagttctggaaagcttatcttcaataactataaaatgaatagaagtactaatatcagctgggtgctggaggtgtacacctttaatcccagtacttggaggcagaggcaggtagatttctgagagttcaaggccagcttggtctgcagagccagttctaggatagccagggctacacacagagaaaccccgtcttgaaaaaccaaaccagggctggtgagatggctcagtgggtaagagcacccgactgctcttccgaaggttcggagttcaaatcccagcaaccacatggtggctcacaaccatctgtaacgagatctgactccttcttctggagtgtctgaagacagctacagtgtacttacatataataaataaataaataaatgatgtaagcaccattacctagctcatttccttctttcaaaaaaaaaaaaagaaaaagaaaaaccaaaccaaccaaataaataaataccccccccaaaaacccctcaaaacccaaagtttggtgtggacatacacacctgtgatcccaacaccccaaggccaagggaagaagggtcatcattttaaggccagcttgtcttgagggtgtctcaaatagtcaaaacatgaaaataaaataaaataaaaaaaaccaaaacaccaaaacccaaccacatatacaagaaaaggttaaagtgcattatatcagtttgtatctggacaacaaatttaaggatgatcagctttggcttgcagtttgaaggataaacacttcgaactatggctattgatgtcagagctgaccccggagtctgtggagaacaaaggtgttactgaataaaaacccccatgaggctgggatacagctcacttggtggagcgcttgcctaccaagcttgaagccccaggttcaatcccagaagcacctaaaccagacacggtggcacactcccgtattgccagcactcaggaagcggcggcaagaggattagaagctcaagggcaagcctaagtttgaggctagcctgaactatataccgaggtgtaccattatttaagagaatatttggctagtagttaaccaaaaaggccattggttgctgtttttctttttgggtacaccttataattatttttgttgagaaatgtttggaagctttttgtgtttttttttttttttgagaacaggagcttgctgtgtagtctggtctagcctcagactttcagtaatcttgctgcctcaggctagaagatgatttcctttcatctataggaaatacaatttgtaatcacttggggtttcttataaaaagatgccttttcataacacctttttatcaaatttactacttgactttattgcattttatcagtcatgattctttcctatgaaagagatagaaaatcaattcaaataagcttgagcaaaagaatatatcggctctaagcagtagtctggactggcctcaaggactttaacttggttgtcgggtctgtgtttccaagtgtgtatctgatgtgtgtggcctttgctttctgtaggtttctgttgatgccatttagagtggaaagcctttatgcagttgtgtggtaaggaagggtgctttcttctagtgccgggggacacgggggataggggtgagcgtggctgcacacaggcacagaaaatgagagataggcagcttcccgagtgaaggggttgccgctaccctggaggaagaaacacgggagtcaggatggagggacatttactacagagtctgtggtgatggagagcagtgagcaggaggcatgcggtgttctttaaggttgaaaccatgacttatgtttctaatcgttgattctttcagactatgcaagctgcgagatgccctactgatgaattatctttaagcaactgtgcggttgtgaacgaaaaagatttccagtctggccagtgagtagctgtctgacttgattcttttaacttgctaggtattgttttagaatacgattccaaagaatcatcttaggaaaacttttggaaattgccttttttttttttttaaactcttgccaagctggaaaatggggatgagagttatgcatttctgtcattacactgtcaaaccttgataaatgcagcatatatacattattcataaactgttttaaaggttgattttcttaggctagacacactgggtataggtatcacataacatggttggtagtcaccttgctttgaagtcttattgtccaagtttggatcctagtgctgacagtcacaaactgatggcatttgccatttttgtgttcctgtgtcctgatctataaaatggaggagttgtgagggataagttgccctaatgaaaacatttacaacagtgcctggcatgctcgtgatcccttcagagttttactagcgtgatcactgttactatggtaatacaagaggagcggaagctgaaggtatacaaaaccctcacatttttaaaagcactttcatcataatttatcttacctgactcatgtcacctaccgaccttccaaagactgttggcaaggtcagtgccatccacatcataggtctggggacctgtggtctccgcctcagcgtgagagggaggtatactgagcattctgtgctgtcaaactgaagataaggctgatcagtgagggggttttatggcattctttcacacacgctgcactttccacttcaaatgtagcagatacacgggggcaaaccattaacacgtgcagcactgtgaaaaagctgtttgctgaaagacaaggtgtgtctggaggtgacacttagtggcagagtgtgtgcctggctccaacagctccgaggggcttgctctgcagcagttccccaccccccctctcattcacatacaaaaatagtgccagcacttaacaaaagtcaaagcttctatcccaaaggactcattggcttcctggggtagaccattaccatgagatggcatatatatatttattatggataacttctgctaacttatgaatcagttcagagttctttgaagttgggcttctgtatggaagttgatgtatttggggaaatttttcatttgtaatatctgttttaaaaaccgctatcatggggctggtgagatggctcagtgggtaagagcacccgactgcttttccaaaggtccagagttcaaatcccagcaaccacatggtggctcacaaccatctgtaatgagatctgacgccctcttctggagtgtctgaagacagctacagtgtatttacatattttattattatatttatttattattataataaataaatatttaaaaaataataaataaataaatatttaaaaaaaacccgctatcataatgttcaggctctgagagagtctgaagatttcctaagcaaccttaaaaactaacagctagctcatatacatatgttctagctctcctgcctttggttctcctacatttattttattgggatatgtgaaattaccctcagaaaaggaaattcatcttcctcgtatttaatagcaaggactttgagtcgtgctttcagtttcctgtaaactggaagcctcacgaatcagatgtgctcattggaacttggctgcattctgctcatgttgtgtgggcctagatgtctttatgtctggaagatattttgagttacaggttttgggagcccagtttgtggtcttctgtcagggctctcctatgtgttgtctgtgtctcctatgtgttgtctgtgtccgtcaaacgtgagcatgggaagaacacacatagaagccatttctcgttggcaccctgactgtgctctgtgttttaggcatgtgatggtgaggacgtcccccaatcacaagtacatatttacgctgaggacccatccgtcagtggttccaggatgcatcgcgttcagcttgcctcaggtaacaaaaatgagttctccttagcagaaaagttgcaggcgtcaattcattttaagcaaacgttgctctctaactgtattgattcatagcaaagagaaccacctagatgttgcatacagaatttaaagatatattagtttttgaaaaaagcattcattttacttactttgtttacagggagggcactcatgcaacagtggaggtcagagaaaagttggcaagagtcatgtgggtcctgggctcaagttcatgtcattaggtttgatggcagacactttagctttctgaaccatctcactgaccctaaagatacatttttaatttgtcaactatttacaatgatacttttatagtatctgtattagtcagggttctctagagtcacagaacttatggataatttctaaatagtaaaggaatttattgatgacttacagtcggcagcccaattcccaacaatggttcagtcgcagctgtgaatggaagtccaaggatctagcagttactcagtctcacgcagcaagcaggcgaaggagcaagagcaagagctagactcccttcttccaatgtccttatattgtctccagcaaaaggtgtagcccagattaaaggtgtgttccaccacacctttaatcccagatgaaaggcatagcccagattaaaggtgtgttccttaactcggagattcaatcttctggaatccatagccactatggctcaagatcttcaaaccaagatccagataaggatctccaagcctccagataagggtcactggtgagccttccaattccggattgtagttcattccaaatattgtcaagttgacaaccaggaatagccactacagtatctttagtttttttcaagttaaaaaaaaaagtctgaggtattatcagttggctgttcgaaaaagtgtgatgtgcttttaacaccgagtcccagggtaacacatcatttatattatttataaaattgacatctaataatagaggtttcataatgctgtgctgttcgacctagcctgtggagagttgttgtctagactacaatctggctttctgggcatctctggagcttggaaggcataactgtgagtggattgtgaggagtccacagtcatggtgcccagtgctcacccctagtaccaaaggtgccacctgactcccaggacccacattcctagcaatgtaaattttatatttgtttctatagattaaaaatttgggctatacgagaccctggcccagtctcaaaatataaatgaactgattaattagtttagtttaatagttaatatagtttaataaaacgtttggactgtctagctttgaacagagctccaggctagctagggccacaaattgagaccctgtctcaaaaaacaaaacagaatcctcccaagatccactccaagcctcgtggaatgtgataactgattcgattctcaggacaaacactggataccggtactatcatccaaagactgtctttgcggttaaagtgcggaatcgcagtgtaaccagttgctttgtgtcccaaagcctagactgactagcgcgttgctaagtgtcatcttggccagagagaaggtgggttttgtagaggatcttttgggggtgtggtcagaggaagaagcaggaaactggaaggggagcactcgttgctttcggtgtagcatcttttacccacccgccctagggtccactgtggtcacatgagcaggcaagcagtgggttttcagccagaacttatgtccccagaattctgtggagcactatcagtaataactgattttaaatctgataaggtagccctgaattcttacctaagtgcattctattcctgtctcctgccagtatagtcaggacaggtgactggctctaagcacccgaaaatcctttggccggattgcacagagtaatcctgaccacttcatgatttcagtgtggatcatctgaccagttttagtttaatttcatgaatttaatttgtttttgtggttacagcaaatcacacacaactaactgcagctgtgcactaatacagacccatctgccataggaagatggggaggtgtattgtgttgtacaaaactttgcacaccacggacagctttgctctagaatgggtgaaaattgaaaaatattctctcatggttctgaaagctggcagctcgcaaaggcagcatacagctagctgctcccgagggctccaggagggctggccgtgcggagccggtggggtgtcggcagtccgtggctggcatcacttcatttttacctctgtcatcacatggcgttctccttgcatctccagtcacgttggcttagggcttatcctaatgcagtctgcaaagaccctgactatagatgcagttaatcacacacccaggagctaaacactggcgttttgggtgtgggtgatcacagtttcgcacataacaacatactgtgtcttggttttacagtctttctgaagttcatagctacccatctttttttttttcatttctctgatactgacttgattttaactgtcctttttattttatagcgaaaatgggctggactttctattggacaggacatagaaggtaggtattattattattattgtagctacctaaagctgattttttgtattattctcagttactgagatctctataattattgattattggaccttacacattgattaccagtgacagctgtgcaaaccgagaggcattgtgtgttgtgtaggctttcctcctttcccagtaaagtagtcctagaataactacaattcatcagattttacctggcagctggagctggaattcagatcctcatatgtatggggcaaacatttcactatctgagctatctccatgtcccctgataatttaatttttatctttaaaaaaaaaatcttgggctggtgagatggctcagtgggtaagagcacccgacagctcttccgaaggtctggagttcaagtcccagcaaccacatggtggctcacaaccatccgtaacgagatctgactccctcttctggagtgtctgaagacagctacagtgtacttacatataatgaataaataaatctttaaaaaaaaaattggccgggcgtggtggtgcacgtctttaatcccagcacttgggaggcagaggtaggcgaatttcttgagtttgaggccagcctggtctacagagtgagttccaggacagccagggctatacagaaaaaccctgtctggaaaaacaaaaaaaaaaaaaaaaaagtttctgtgaatgaagaaaggaaaactaaggttttgggtttttttgttttgtttttgtttttgttttttttgaaacagggtttctctgtatagccctggaactcactctgtagaccaggctggccttgaactcagaaatctgcctgcttctgcctcccgagtgctgggattaaaggcttgcgccaccacacccagctcacattcacagaatcttaataaattatctgaacatattctcttttgagtagtttgctaaactcattgcttgtcttgtatttatatctgttctaagttttggtgttctgatttattcttgagggggctgggatagatatagcccagtgagagtttgcctcgtgtgttggtttgctctctattgctgtgataaagattatgaccaaaagaaatttggggaaggcagggttcgttgggcttacatgtcctgatgggagccaagactgaagagagtcaagcagaggagcagagcagaggccatagaggaaggctgcttataatgtattccacaacccaggatcagctgccggggtagtactgcccagagtgggctggaccctcccacatcaatcattaatcaagaaaatgcctcattaatttgcctccagactcatctaatggaggcacttcccagtcgaggttccctcttcccagttactctagtttatgtcaagttgacaaaaactaattggcacacctaacatgcatgtgtacacaaccctagattggatccccagatcataaaaagcaaacaagaaaaccccaaatcacgggctggaaagatggcttagtgctcacgaattcaggagaatcaggaattccgatccctggcatccacataaatgtcggctgggtgcggtagcctactaatgacctcagcatttgggaggcagagatagtatccctagatcaagctggctagggtattctgatcagcagaatcagtagttcctggtatagaaatcaatgaaagaaggtctctacatgtatgtgcatgcacatgcacccctcccccccaagacataaactgtacccagacacatacacataggcacacatacatacacatgcaaatccacaacaacaacaaaagatttgtctaaggatagataatttaaatttaaatttaaatgtggatttagtgtttgtctctgtgtgtgtgtgtgtgtattttcaatttcatggatatttgggaaggacaattagtagtattttgttatttgtttgtttctttttatagtgactttgtaagcaagtgtctttctcatggttttgtagataagattattggtctaggacgttcttttccgttactgtggagaagtgcaatctttactgtagataatttgtatgaagtagaagaggaagtagagaggttggttggcatggcctgtttctctgttgtttttgtatgatccttaattttctttcctaattgcctcccttccccccacactgccacacttctcaaagtactatcctttatttatctgagtcttcaaaaataattgatcttgggcctgagagatggctcagtggttaagggcactggctactcttccaaaggacccggggtttaattcccaatacccaggtagaggtttacagccctctgtaatcccagttccaggggatctaatgccctcttctgtcccccaaaggctctatgcactgatgcctgataaagacaatacatccatgcacattaaattaaacagtcaggttgaaaaaatgtttcagctgttcaaggctaagctcacaaccaaaacattgattagaaaaggaaaaagattgatgttgttacctctttttatttattattatacataagtaccctgtagctgacttcagacgaaccagaagagggcgccaggtctcattacggatggttgtgaaccaccatgtggttgctgggatttgaactctggaccttctgaaaagcagtcagtgctcttacccattgagccatctcaccagccctgttgttgctacctctagtcttatttattttcaagtgatttctctgttcctggagttgtagattgccacagcctatgtttgtttcctctatcttgagggagtctcactacagagctctagctagatggaattcactgtgtagaccaggctggcctccaactcagtggtctttttacgtttgtctttcaagtgctgggattaaagttgtgcaccaccatacctggctgaattccaagtctttgctttactgctgctcgatgcctggcttacctttgggaggtgattttgcctaggctttgtctgtgatcatcaccccccccccttttctgcagtgagagctctgtatgctcataccgcttttcaaatgattccgttcccatggtgttctggaaccgctgccgggggactgtgtgttgttctcgttgctgtcacggggccaccgttatctctcagcccagtgactttgaagccattctcagatgtagtagctttaagctggatcaaaggcgataatatttgagagaagttggtataaagtgccagcacattgttcactgctctcagaaaagtgacagcaaaggactaggagagaatcccagtgggagtgtctgcccagctgcccagaaacgtgccaatttacttcttccccctgagtcgagggaaggccggctcagagcttacctttagtaacttttacttttttccccctgagtcggagggaaggccggctcagagcttaccttcagttggccctttgttcattgtggaagcaaataagagtgctgagaaaagccggagtgaggatggaagtccttggtttcgaccgggacatttgatagagagggatgcacagttagagctttccagaagagcctgaaagggttacctggatggtctatctttagaaacagtttcacaggctttgggggaatctgattcatgtgagggtgtttttaacagccacctttaagccgttcttctcagtcacattttgggagacactgacataagcgattcccttatccgtctcacctggagcatagcatagcatagaggagagcagaagagttagcgccaaagtgaagtaggtcagcgcgagaggccagggttccctgtttgcacagacgaaagtgactaccttgcgaaatatttaatgaggcagtgtgtttgaatttagggcaagtttctaatttctttaaattcatttgtttaaataagagagcaagagtgtctttaaatctaacttttgaaagatttagtgtgtgtgtgtgtgtgtgtgtgtgtgcctgcctgcatgactttgtgagtttatgttcatctacatacatgccagtgcctccagaggttagggccattagatcccttggaactgggattccaagcagttgtaagctgccctgtttagatgctaggaactgaacccgggtatatgctcttaacttctgggctgtctctccagcccttaattttaacttttaatatagggttttttttttctatttgaaaaggtgtatgtggtggctcggttgccaatgcctcccactggttcatatattccagtgcttggtccccagttggtggaactgttgaggaaggattaaaaggtgtggccttgttagagaaggcatgttactgggggctaaccttgaggtttcaaaagcccaggctaatccagttaacctatctctctgcctcgtgtttatggaccagaacataagcctggtaccgtccagggtcttacctgctttcctgcttctgtgctctctgctgtgatggtcatggatgctaatcctctggaactgtgagcccccaaattaaatgctttcttctctaagttgtcttggccatagtgtcttattagagcaacaaagccgtaaccaagattgtgtactgcaaactttcatggattaaaaagtgcatcttatggctgaccatatgttacaaaaccagttttcttctactagaaatggctttcttgtctccattcagagctttagagaggtgaactctctaaaggggactttctggctcaaactataagtgaagtgactgggctggactaaggcaggtggggcagatgtctgaaggataccttggggcctggctgatgtggagagtgtggaggctggttgtcagcatcggtgtgacacagctgtgctttggagaaatggcatttcaaaaactctagagtggacgttctgtctgtgacacttgtaaaggtcatttcagtgtgagtgtcttctggaaggatcacctagtgtgtccttctgtctgacagagtcgtactttatcagacttaaattcaccttcattgacgttttctacatctcctatgattgaaaggcctaagcatatccaaaaatgttgtttataacttagttttgcctataaaagtcacttaagatatattttatgtatatgaatgttttgtctgcgtgcattggattccctggttctctgcaagaacagccagtgctctcaagtgcagagccatctctccagacttggcaaagtcacttgatgtaatatactactactataaaataatattttaaaaatttaacacgtgctttgttcttgtgtggaaccttcagccatttttgggactggccatggtcctgacctgcaggatactgtccatggtgctgaccgcagtctcggacattgtagctgcttggtttgctatttaggagcaggaccttaaactaaatgcatttaataactacagtttagtcatgctattttagtatactcactagtagatgtcaaattgaagatggcgcacatatgttatgtatgtatagcacatatgtgttatactgccttggattctttaatccacagaatagtatcataatgtacaaaaccttatgaagtatattttctcattgacttttatctatttttcactaaattagatcaagtttttattttaataaaattggtatacagtgctccatgttgtgagtttactggattttgttccctgttcctttactgatcagtgtttcttggtgcttggccattgatggtgctcgagtgggtctccctatggatctctctctagacgaatgttcaagagtgcctgggacaggtacatgtaatagaattgctgatacatccattctctccatgtttcaaactagaagcattttactacatggaaagcaatctctcttgttcataacagctactgagcttttaactatgtcctacagttgctaggcaatgtgacaagaagacagaatatcagagtgggagacaagagagtatgctaaaacctcaggcccaaacttgaattattccttcatctttactacatctcccagtcctggctgggtctctgttattttgtttttgaaatatttaaaatgcctttgccccacttaagatgccaagtaaaagtataaaaatgtgatttacacaagcaatcttactcagagaattgcaggaagtctttgtacacaaatcaagtggctgtaatctatggagtaagtttagagaacttggagttttcctgatcactaagacttacctaatccagtcgtcttgatgacgcacatgacagttgaaagcacagagagattaaatgatttatttaggttccagaaggatctgttgatacagactaagaattcctttgaagagaacatctttgtaacccgctgaaatctgacatgaataatgatgagtcattggaaagccatacagcgagttttttgttcatttcttacttgaccagtataattcgtgactggaccataccccttgtccaaaatgaattttaaaaatccatgttttgtatgtttttaagattaactttttggagctggagagatgggtcagcacttaagagcttttattgctcttgcagagaacctaagcttggtttccagaacccacttctggacactcacagctgcctaggaccccagctctagggtatctgataccgctggcctctgagggcactcacgtgcgcgcgcacacacacacacacacacacacacacacacacacacacacacgataaaataaatcttagagagtttttcttctttgatagtttcatacatgtatatatgttttcgtcatggttgccctcctagtgtcctcttgtgcccctcactattccctggcagttctgcttttatgtctttgtgtgcacgtgtgtatgcgcgcgtgcaagtgcgcatgtgtcccgagttttcttaggcctgtttgcatgagtgtgggtgggaagttatttactggagcatgggcagtttatccatggccataccactgacgaaaatgatacctttctccagatatcatgaactatccatagtccctctaggaaggggcgtggccctgtgcaccctcccctctcccatgatgaaaagctgacaggtccaatcttatgcagcccttatgtggacaacagattggtgggttaacgtcgatttggctctaaggattgaactcaggttgtcagacctagcagtgagcaccgctagcccagatgttcttctgcccctctccatcctctggctctttcattctttgtactccatcctcttggggtggggggagatcctaaagaccgtcttgtgtttagctatgagtatgtgtgtgggtgtgtacgtgtaagagaaggtgccagtagagacacatttgatcccctggagctggggttacagctagttgtgaatcacccagtatggggtagggacttgaactcgagtcatttggaaaagcagatagcttagctacttagccccttctccagccccttctccagcccctttatcgcctgtcttatgagtactatagaaacacgtacttggggaatggaaacaactcaattgcaaggttggttaaaggccttttcttggggatttggtctgtggtctagagtactgtatgtcttttgtgtatacatttcaatcatgaggtctataggagaacttagatcttttaaaacatgtgagagaacatgtttaaatattttttgtattttaaaaagttcttgttttttattttatgcatatgggtgttttgcttgcatgtatatctgtgtgcctggtgcccatggaggctggaagaggctaccagatcctctgacactggggtttcatggttgtgaaccaccatgtgggtgctgggagttgaacctagatccttttagaagagcaacaagtgctttttaaaatttgtttgttttttattttttgttttttgaaactgggtttctctgtgtatccctggctgtcctggaattcactctgtagaccaggctggcttcgaactcagaaatccactacctctgagtcccaagtgctaggattaaaggcgtgcaccaccacttcctggcacaagtgctcataatcactaagatatctcctagtccctctattggattttatggattttatccataaactttttaactttttgtttatgcttagctgatttttttttttcatctttaagtacaaactcttcctctaaagtgttttccacaattgtggaatgtctaaatttcacatttaactaattatattgtataattaattactctaccaagcacatctagtactaacagattagaatgagcacagctaacctatggcatgtagcagccccagagcatagggccctgcaggctgggagcattgggcttggcacagctgagtcagcccagtggcaactgctcacaagcacttcgctgtgttgttagaggcctcatcatgagacacaagtacgtgtatacagtagccctgctgctgggcagggtgggctcctacttactcggcatgatcaagttgccctgttggggaaagtcaaatataacagtgtctttgggatttcctgggtgctttttagctcctcctggtgcttccaggattgtatgctgcagtgtgatattgtgatatgtttcgctttaaaagtttgtttagaaagcaggccttattattaacacatacaagctgatttttaaaaatcagcctttttttttttttacccctgaaaatgcttctatacaatgtatcatcgagaaatcttttaatactcatttctatcaatatgatatgtaaacttcgtattgtacagctaagcattgggggctgaatagttattatataatataaaattatatgtagtgttttaatgtttaagtttatgacattatggcctaaacaagtagtttaaggctcttcccaaggcttaagtagggatgttcttactcggagctttgcacatgctggtcttgtgtgttgtaggcgaatggctacagctcctggatacagcgggtgctcagtaaacacacttgcagcgttacaaagacgcataagttagagcttacactacaggaaactaacccctggaaacactgtttctcaggtgccgccccctccccacccctttattacttcctcttgccgaccttcttagagtgaggaatctgcccacctctctcatgggagcaaattcttagattactcaaaagtcatctttggtaaccacatgctgtgccaaacccactgaggccacccacgctgtcacattgtcctctgttaaatcaggaggagggcggtgcaaggactgtgaagagagatgtgatttttttctttttttcttttttttttttcccatggagagatgaggggtcaaaggcgagggagagtatcatttaatattttctccttaacacaggtgagtaaggaaatctctgactatgaatttttaagtttatgcctatgtgttcctccagggaagcccgcgtggagctcagttgagctcgttgtaactagaaacgttaagtctggtatccctgtggttcctcctagttgccttgtattcgtttgacaaagccaagcagtgcatcggcacaatgaccatcgagatcgacttcctgcagaagaagaacatcgactccaacccttacgacaccgacaagatggccgccgagttcatccagcagttcaacaaccaggccttctcagtggggcagcaggtaggcccagccgctcactccttccctttgtagaccaccgagtgctgatgcccagggttctgctttggaagagccaagaggaggagcttttcctaggagaaagaagttccatgcagattgaaggagtgagtttgctgacccacctgttggagtctgttcagaaaagccctcacagctttaggaggccagagagatggctcagcagttaagatggctgctcttctgcaggatccaagttcagtgcccggcactcacaactgctgggtacctccagcttcagatccagagctctcttccggccggcccccaaggggctgcacatgacacacgtacacatagacatgaacatttttcaaaaagccattgatgtcctgtattgtcacatcaggtttcctccctgcaaatttgggaacctgatagagatgcatagtctgaaatggtttcatttttctcatcgtgggacatgcgatttgtttctgggaagccttcctatgtcactagtatgtttttgtagaaagcagaaggtggggctggggagatagttcataagtcagtaacgtgcctgccgagcgagcatgaagacctgagtttgacccccagcacccaggcagaaagccagaggtggtgcaatatttgtgcttgtagttctacagctgggaaggcagagacaggaacccttgaggccccgggccagctggtgtaacccaaactggtgagctccgggttcagtgagaaaccctggctcaaaaataagcgggctgggggatactgtgggaagccgtggaggtctcaacttttggtggagggtggtcttccagagatttttaagaaaattaagtatgtataaatcaagttcatcgcagagtctctgaaccttagtgtcactggacactaactctcagcagccagtattcaccagcgctgcctctttttacacttgagttactatcagatgatggatatcctaggaaaaacattctgtttaaacataaagtatgcttagctgttagagtgccgcccagcatgcatgaaacccgagctccaccactaggcctaacaccaaagaaaaccaggtatggtgagtgtctgtaatcccagcaccagggcagcagaggcaggaagatcaggagttgaaggttacccatgctcagttacaaaggaagtctgagaccagccagggttacaccagaccttatctccaaagaattaaaaagaaagtatgaagccacacattgtacaggcaccctgactgccagagcagatgttagcatctggctgtccccagtaaagcaatttgcagaaatgggctaccacccccttttttgccattgcattttcatcttagaaagtgattttactttaaatggatacatctaactttttgtcctctaatctctagaatggcaaatctcagtaaatgcattccatctaagctctctgggtcctcaaatgtttaaaagtaaatagcagatcctgggagcaaggtgtctggcattgccaagtgcccgcactgccatggctaaggctgcgtctgtcctgccctgaggtctctgtctcaggagattactagagagagagcagcagtggacggcaggagcatcagagtggacacagtgccacttttcagttttcctgataaatctaaaggatagcagtctaaagtatttatatattatgaaattaaacttttgcaggcagaagctgaactgctgatgtacaggaacaaaatacagtgtgttttaaaagaaagcctagcaattagcgctgagtgtagtggcacacacctttaatcccagcactgggggggcagaagcaagtggatctctgtgagttccaggccagcctggtctacataatgagaccctgtctcaaaagaaagaaagaaacaaacaaaccaacccccccccaaaaaaagcaaaacaaataaaaaagcaaacaaactaaacaaagaagaaaaaaaataaataagaaagcattagaattaaaatgaacctggcttcctccccgatgaagtttgggtccagagaagataagcagctggtgggcatcgaggagccttctggatgacctaaggcaggcagtagcggctcgagcacagccccggggtccctccacctgagagcacggggctcgcatgcttcctgccggtcaaactagaaagttctacagcaccagaaacagcatgttctctgttccctgctgatctgccaggccaaaaatagtgactgggatattctttatgctattaagtatttatttgactcttatctaagtccctagctgtgcatccacgggcacatgaccctcctgctcctgcctcccgagtgctgggattcaaggtctgcaccattattgccctgctggatctcggttttcttactagtagttttcctaagtgtttgtgagtgtcgactgagtcacctcccatcatactaacacacaagtttccttttcctgtcactgggtctgtgatggtgtgactgtggagttgacccaagaaggactttcaaaagaaaactgctttttcacctttggatgatgtagtagaaagccattgcaccatgggctaacctttcttcccttccttctctctacagcttgtctttagcttcaatgataagctctttggattactggtgaaggacattgaagccatggatcccagcatcctgaagggagagcctgcatcaggcaaaaggcagaaggtaagcctttttcctggtcttcattaggcaatctttttgacatgacttgcacaggctgatatgtttctgactattcgcctggggtagctttccatactgtgtgttctccctctgagttcctcactcctgctgtagccagtattgctgctggaatagaaaccaaagcacagctaaccgcagatctactaatctgcactagctgaacaccgccatctagaatatgtcagagactggctgtgaagacagaccttgccatgtcgggattgtgcgagatggctgtgaggaaagcagacgtaactcagatgactggttgccatgtttgctttgtactgaaaaacttcatttctccctcgagtctagccttgctttgaaatgcctatagcgtactaattatcatctctctgtacagattgaggtaggcctggttgttggaaacagtcaagttgcatttgaaaaagcagaaaattcgtcgctcaatcttatcggtaagatgcacagttttagaaaatttcaaatgaagtggcaatgcctctgatattgcgtatgagttgtgtaaatggttttcaggtgatagagaaaggagacccttccttaaggcttgttctgtcacaagcgctgattgatatacagtctcaagcctttagctggagtgcccagttcacctgtaacaatgtgaaacacatcggcacattttaatttcctgtgctcatagccagacttaaaacaattaaaaagaaataatgacatttcttggtttgaaattctaagataattttgggctcacaaagatttgtatatgtggctgggcagtgatggctcacgcctttaatcccagcactcgggaggcagaggcagatggatttctgagttcgaggccagcctggctacaaagtgagttccaggacagccagggctacacagagaaaccctgtctcaaagaaaaaaaaaaaagatttgtatatgtggctcacagaatcccagtagctgttgccagtttcccctagtgtgaacatcatacagtgcagttccccagacagattctcatgggtccattgctgctgcccagcctcctgtcttagcttggattccatcatctttcccatcaagccctttctctctcccaggtctcattcccgaccatctcaccccacacatagcttctctgtgtgagtcctctcccggctctgatggctcctcagaatttcattatcttttgtgaccttcagcactggtcagccccccagctaattgccgtgttaaacgcagaatcgtccgtcactgttctttagtgatccgttgaggactgtgatctttccaacagatgggatcttgctcaccagccttactttgatatattaaaacaatacagtttaatctctaagaatagcagctcatataaataatgatttattaactcaaatttatgttcatgtctatcccaataaaatagagaaggtttttcattggctacacagccttgtccaaaattacttaactttgtttaaatgtagtttgggagcagtttttttgttttgttctgttttttgtttatttgtttttttagtcaataatttaccagtctttgttgctatttctctcttacttttgtgtactatgtaccggtgtccttggaggccggagggacagtgtcagatcccctggaagtggtggtgtgtaagcctcgaagcctaagtgctgggaatccagctaatcctctgcaagagcagagcacgatcttaactgctgagccagctcgccagcccaggctcgcctccagcttgtagacctctggctcctgtgctctagctaaatgctaggaccaaaggcacaggccacatgcctgtggacaagcgttcactaaaacacctcatactctaaattggattttatttgtatattattcataatttattttatacaattagtgtgtgtgtgtgtgtatctgagcatgtgtggtacatatgtggaggtcagaggacaactttcgagtcatgtacactgtgtgaatggcaggaattaaactcaggctgtcagtccacaagagccttagctcaccaggccacatcagtagcccctaatttgctttttttttttgattaacatgttcaagcatcttaaatatatctctataatatgattttaatgcccccaatatcatttttatgaaggccatatcataacgttctattactgacacaatatttatgatgtgattttcttgttttttacttttgtacaccttttgttaaaataccttatcccagggcagttctataacttttgcacagtgtaggtgttttcaagtaacttacatgaagatgtgattttggttggaaaatgaacttatatagtaatttggctcacagtaagtttgaccacaagagggcagtagagtataagcaaaatatttttgatccccttctaaaggaaaagcattagtctacaaaattctaaccagaaaattattatctgaatttttttaatttattttttatttttttatattttagtgtggtgtgttcttctctggctttgtaagacccgtatttccctcttttttgtttagagcctgctgtaaggtatcttgttctttgtgtccaagacaggcgtggttctctggagttactttaggtggcagtctgacatttatattaaacagtttgtatcgtgagagaatttgtaagtctgactttttcagtcattaaagtcttcagaatgttttttgtctccgtgtgacaagccatcagattcattccacatatcttcgtaggccgaggtctaggtaaatgtgcgtatctcacacacacttcccaggagctgtgagccagcacttgctgtcagtgacacttgtggagctagcggagtttatatctggcgcacacaaggtgtttccttgcagcagctaagttaatttggttggattaaaggttaatgagagagagttctgtggactggctgcaggtagcctagatgcgggagcaccggtttggttgggtttggaagtttattactgaccatgaatggcaaccaggcaagatcggaaagctggtcttacccttcccactagacagtcctccaagagcgtgctgcccaccctgacgtcacagccgtgtgtcagcccacttaagtccgggcgtctgtccttccaatgcttacccctgctgctgccctcacaaatgtgggtctacttgtttgtcacaggcaaagctaaaaccaaggaaaatcgccagtccatcatcaatcccgactggaactttgagaaaatggggatcggcggtctggataaggagttctcggacattttccgaagagcatttgcttctcgggtgttccccccggagatcgtggaacagatgggtgagtttctgaccaagccttccgctcccggggaagcacggaggtaatgaggtgctcttctcaagagttttgaagtgacttttcaaatccacccaaaacaaaaaacaaacaaacaaaaaaaacccaaaccattaggtttcacgagaaattcaaagtatttactctcgtgggagaaataatagaaatggtatttacacttgctccattgtatctgtttaggttacattgtttttccgtgggcattttagaaatggtcccccatcctgaagacccaccctgggtcaggttcacctgacatattgtcgtcgtccatgcagctgaggacattgcacggatgctggcttacagccgcgctcagcacttccctccagtaaatggatacttggcaagggttttaattagataagtctgatccctagagacacatatgggagtctccatactgcacgtgaagaaatactctcttcatttgtcactttgctcttgacagtttatttaatttatccgtatgaagtgattttctttgcccagtagaaagaccttcaggacagttttcaaatccgtatcattggttggattggagcgtgagccgcagagtatctgagaaaggaatttataatagcttcttgcagactgagtgtgaaaacaggatccaaaaagctggagggatacacacgtactgctcccctctcccccattctctctctttaaattgctaccgggagataagagtatattcatcacggtggacaaggggtgctctccaggcacgaagcgccgggtcacagtagccggctgtgtcttagccggctctgtcggtctcttttctgcccggttgctcactctggtcaattacgagcacagcacacacctgttcactgggtaaaggtcgagtttagaattggattaagacaaaatgacagagaccctcatcacctgagttttatacaccttgaaatggcagtgacatacttcttatctggaagatacaaaggccaaatccataaaaagaaaaggaaaaaaaaaaaaaaaaccagactctaatttggaaagttggaagaaatatagcagttcactgcccaataatgtgtgttttgaggctcagtaaatccttacggtgttttgatgaagacttggaaatattatttaaatatattttaggtaatacggagtcagtgggcaggttctccgtgttggatgccgtgcgtcagtcatccttgcggaggatttgtacctgggagagggaaagggctgtgtgtcttactgtttgtggggtccagccaaccagcaggagagcagctgctgcgggaggatgctgtgctggtgctgtgcgccacctcccagctgaaactgaagcaagcaggttgttgtttgcccccggatttgatctggctttgatgtgttttagaagaaatgaacgagggctgtggatctgaagtttgtgttgtaatccaaagccttttttatggctttgtttttttttttttaatcatacttacactattttaagatacacacacacaaagttttattcttttaaaagtaccctgccatgactttcttccatcaagaagcacgtagtatcatttaatttaaatagcagcctgctgtcaagttacctggactttgagctgaattaaaaacaaaacaacaaggaacaaaaacaacgaaactctgctgctctccttaatttaaaggtttgatgtctgagaaataattctcttttatgtagatatcatttcttggggttccctttttcctttaaattttgggggggttaatagagcatcccattgccctccaagaagaatttggttaatgctgatcatttggcttggtaaaagtaaaaggctcgacataagaagcagagatacgcttgcgcttcgacaacaaccaagccaaatagaaagttacatgtgttcacggaggcgtggtttatgttccttcctcttcgaggtggaaataaaattggctgatttccttcactctttgttcattaagtagatttaataatatatcttgtgggtttaataactagacagggtaagatgagttaaatcaatcaaatgagaaaaagtatttagtaaataataattcctatagattgtaaggcatttgtaactgaaagctttattctccacagatggtctctcccgtgaactctggaatgtaattagaatgttagttagatttgttttacatgtgtgcacacaactttatatgtatatcaaggtttctaacttagaaagtgagacgataagttattttcctggccattgtgtcactgatggttacgtctttaggtaacatatctttcatttggttgtaaaatttcatattttcttctaaaaagtgaaaatagaaaaaagagattaagacaaaatgacagagaccctcagagattagactattgtggtgaccaacgggtttaagtggagacacagttatggggtaggcctgagagcaggtgaggttatattcctgcagacagctctcacggttccaggctagcatttttatcttggtgtataccttcctgctttctaaaatatttttttatagaattaaaactcaggaaatcctagctgggcttggtggcgcacgcctttaatcccagcgctctggaggcagaggcaggcagatggatctctatgagtttgaggccaacctggtctacaaagtgagttccggggcagccagggctctgatacacagagaaaacaaacaacagcagcaacaacaacaacaacaacaacacacacacacaacaacaacaacacacacacacacaacaacaacaacaacaacaacaacaccaccaccaccaccaacaacacacacacacaacaacaacaacaacaacaacacacacacacacacacacacacacacaaaggaggtccttaaagagaaaataagtcacataaagttctagagcctgagggacgacgaccatgtgtgggaatagagagggctcagctctggcaaatatcagccgtctgttactgtctgatcagcctggtcagtctgcttcctttttcttttctttctcatctgtagcaattaggctcactcaaacccaagcagggcagatctttcttggacgtggtggaaactaaagctatatctgacacccagtgaaggtcaagtagagtgtgtcccagccccaaggtgccagcctctctcaaaaaaccaaaccaaccaaacaacaccacacacaaactaaggaagtccttaatcagctgtcctttaagtccttcctacccaggataacagcgccaccatttgtaccaccatagcagcgtgtagcttagcagtgtgaacaccggaagctagccttggaaggttaggtgagtgagctcagtgctaatggctgcccatgagcattctcagatgtcctgttcagacatttactgcgcttcccccttgtatgcagttttgtggggaacagtcgggatggatagataaatgagtgatcttgtcattgcagcgcttatgctcgcacagggtgtttctacaaagaaacttcgttttcagcatccctagctcctaacctcgttaggagcactggaatatcagctagcaagtcaccagcggctctgaacagcaccctgggagaggttcacatctccccacggagaggggctgtgtcttgagagccagtgaaaggttgtaggggcccagagtcacagaggcactgcccttttctaaggactctgacccactcttagaatccattctctttgtccccctttccctatccctccctgactaagtccatttccaaccttcatgcttaagatttcttttgaaattcaagaggcaagcagctcccctctggtggaagtgagactgcagctcctctgaaggagagactgtaaggggccgtcagtcacacccagaatctctcaaatgctaagaacatcacaaataagacatgggggaagaaagggctccggagctctgtgagcgccatgttgtggagaaggggagttctcgctaagattaacataaacactgacagtctgggaatgcatttcacacccccactcaggaggagaggttgcaatttaaatgggggttaagacatctctgcgaactcctgggctctgtaaagggagccctgaggctaaagagcttatctgaaatttgaaaaaaggggaggaaaaaaaaaatgaaggtttctgacattcatctttttcccttgtattagtcataacttgcttttcagctatattttaggttttgaatgccaacctgacatctgttcaagtctgcctgtaatttattagcagaggaagagaaagcagttgcttactgtggggagacgcagacttctctcccagcctttgctctggatttaaggaatgcaagacttactaattctcacgttgggtcaggatcgctagaaaggtttttcatttgttcttttctaattaaaagagaatagtttatggtcatgcaacttcacagactctactgcagaccagaggcaaaggcacctgcctgaaacagagctcctagaggtgccgtagccttttgcaggtagaaatttggtttaccctggattttttccctccgttgtttgcctcccctcctccccactccttcccactcttccttcttccttccctttcctttatagcccaggctggcctggaaatgactgtgtagcaccagccgactggcctcacacgtgagccacctacctcagtcttgcgagtgctagaattagagacgtggcgcacaacacctaatcccacggatttttaacttttacattccatttatactggaataggaacaatgcagctgcatctgtctctccaagtcagactgtattcagagtcatccagggtttcgaagtttataaacagacttgaaaaatcaatcttttggcaaagcagtcagctggtagagtacacggtggatcagacttcctggttacagtggtgttgccactaactgagtaattacagagctgaagtgtaatctctgagggatgcagctcagtgagagggctatgctatcaagtcctaggttcaatccccaatagcaacaaacagccagacaagccagcaaacaaatgtctcaaatcttctaaaagttgacccgaatgtgccccaggaaggaaatgactaggtgggctgtggagcactgccctggaaagtactggcatgcaataataaagcaggcaagctgagcagtggtggcacacccctttaggaggcagaggctcacgaatctcttgaattggaggccagcctggtctacagatcgagttctagaacagctagggctatacagagaaaccctgtctcaataaagtaaaacaaatgaaatataaaagtccctaaggacacaacgaatgggaagaaaatgtttacctctagaagggatgaggaccgaatagagaccttgtttcttatttatttttctgtgtttattttgagcaaatactatttgtttgttttttgatacaaggtttctttctctgtgtagccctggctgtctgggaacttgctctgtggaccaggctggccttgaactctcagagctttgtctgcttcttccttcctgagagctggaattaaatgcatgcgccgccatacccagccctgctctccttattaggagtttgtgtctctagtgtacagttttaaagccagcagagagatcctggcacaggctctatcccaggatgagatactggcacaggctttctcttagaatgacccttagaacagaaaggcatctgagcacaggactgtcgcgtggcctccacaaagcacatagggttccaggcccagattccctggatcctggtggctgagtgacagagagcagactagacacctgtcctgctctgccgtcgggagaaagggttttttgatgggtaacaacttcctgtcacctgcttgttcccagtaattcccacatagtgatggatgttagccctgtgtcttttctccaaatgggtgagcaaatatttttgtggaggtctttaggtagctggctaaggaagcatgggagagaaaagactgggagaaggatggcttgggagagcagaatttctgacaactgcaaaactgtgcccaaattcatcttcaatattcagatgcctcctgagggctcggctccctgtgacccttcagtgaagcagggtctcttctgtcttgtgctgctgccgctgagaactcgtgcttgtgaagcgggagaccctgttccgagtacttcgcttgtattttgtgtattaaagtatttaatcctcataacaaccttaggaggtatctactgtagtactgttcccattttatggagcaagaaactgaggctcagagagagaagtaaataaagagttactccaagacccccagtcaacagtgggggcaggtttgagccccatgtggcctcgtggcctcccttgttgttgtttagtgaaagcccgccgctcacgggagtgggtctccctgaagccagtttggaggagtcagcctttgaattagccaaagcactttcagccctggcatggttaatctgctgggccagataatcattcagcagggaagccggctgccctgcgctctttatgcagctctctagcaaccctgtgtgctcaggatggcgccacctggacacacaaagactgcaatgtatactcaatatagactgccgatgctccatgtagactgccgctttttaacacaccagttgtagcatagtgcaggaagtgattgctacattgtgtcagagaagttgccttacttaagcagtcaacctagaggcaaagcatagtcaagttaaacaacggacccccttaaaggatgtcacagccagcttgtgattgtgtcccaaccaagtgacgaggatgtaagtcaccaaggacccgaggaaggcgacctcaaggctccatggagagtgagagcctaagtgagaggccttggatggcagagggcaggtgctgctgtccatacggggaacacggtagcaaggtagacagtgggaagctcagagcacttagcagtcctggggtgcggagcaaagatatcaagattcaaaagtcaaggtgtcccgttgaagctgggctgtgggagtctatgactctgataacctttctgtcccttacataaccttctggacagtctggcctcttcttctgtgatgtcgatgttcttaaaacctagctgctctgcccttctttttgttgttgttatttgttttttgtttttttaacttttttaactttttattttattttttttattttttatttttttgagacagggtttctctgtgtagacctggctgtcctgtaactcattctgtctaccaactgcctctgcctctcaagtgctgggactaaaggcatgcgctgccacccccagcttgctccgtcaagcttaacatactgtggttgtttgtgtcacactcctaaggcaggcttcctaacctttgccctgtgagtacttcagactgggtaattctttgctgtaaggaacctgccctatgcatcacataggcacctttccctgagagaatctttacgtcccccacccccaccccatgtcaattaaataatgtctcacctggctggcagaaccaccctctttcagtgctcaaaggctttgaaggccataggcatactgccatgagttgtctgcacccatctgtttggagtgtagtccaccactgttactgctccacaataagataatttgtttgctcatttatgtatgtgagtgctctatctacatgtatacccgcatgccggaagagggcatgaggtcacattacaagatggttgtgagccaccatgtggttgctgggaattgaactcagaacctctggaagagcagccagtgctcttaaccactgagccatctctccagccccttatttttgtattttcaagacagggtttcactgtgcagccttggctgtcttggaactcattctgtagaccaagctggtcttgaactcacagagatctgccttcctctggctcctgagtgctgggataataggcgtgtaccaccacctctgacctaagataaacattgagagaccaagaggaagcaagcatctagaaatgcttgtggcaacttaacatcaccatgatgtttcagattgtattttataaaagtattgttgaaagttttaaaagaaatgagtagaccccaggtcgtttagatgattggagaaacatggtcatgcatctaagtggacatttatcaggtgaatgagattgactggacaaatgacagcgatgggaagtcaattaaaggtagtcctctagggtaactgttatggttctcctgtgcgtccggatcattggaagggactgctgagtggcggctgctcatgtagttgtgtggtgtgcagagccttgtctggtacggtaccagcagggatgggaagagaaacagctaggaagcctggggaagcgaggctggcagaacttggtgattaggcgccctgggtgtccgtcttggaagtgacactcgggtcttgtgagaagatgtgggaataaggaagtcacaaggatctagatgtggggcagtgggaagaggccatgacacatcttctcaacactaaaaagagcaggaagctgagctgaagaagatctcctgacaacgaaatctggccagcatcagcctgcacacacttaggaattactaacacactagcactgtcatgcccttaacttggcttctcttacctccctgtatcccttcccatccccttcgtgttccctaaggggtgtgtgtgtgtgtgtgtgtgtgtgtgtgtgtgtgtgtggtggtgggagattctcaggagtctgtcttagatctctcttctcttctttatgttctccctaagacggatcctgtccacttctaaagtgttcattaatgtcttgatgctataacccttaaataagtggattctttccgtcctgctttagagcccaggttctcacagatctaatctattggttatgtcaccaccgtgcagtaaatcctagattaaacgcctttcactgcagccttccttccccaccatacttccactttggaggtgtgtttcctggaggtgtgataactcgaatctgggacctcctcttcagctcccctccctcgcctcggcccagttccagtcagtcatagaacaggccctcggtgctgcccctcagtgtcttaggtacacacttctcgcacctcaccctgctgttcttccttcaggacggtcgcctgaatcaccatgagctgccctgctcttctctaatccattctccacactggaaccagagtctttttttttttttttttttttttttttttataaaagggcaagtctgatcctgccatccactgcttcaaactccttagcagcgccccgtaactccttgcacagtttacaagccctgagtgttctggcagctgccaaactttcctgcctcatctgggccggcacccctccccctacacgctgggttccagccagagtgagctattttcagtgcgtctaatttgctgcgctaccgtctcttccctctgtatcttggggcatgttttgaccatcgtttcttgacatcagttcttgttcgtcctccaggcctcagctttgatctgactttttgcagactgctctggcccttgcgtgcttcctgtgcaccgcgagtgttcttttatgcaccgctgtgttacgttgcttattacatagccatacgttttctagaaatgagtaagtgccagtagcttgattaatctagactaagtagaacactcacagtcctgctctcccctcaagatgtttccagtccctgtgggagcaactccacatttgtatatcccggagcagccttgcagaaagcacagatacactgagccgggttcgtgaggaaggccatgtggtaaagcacacgtgcataggaagagcggcgcggaaccctgtgctttacaagtcagaggagataggatggctctggttccccactaagtctgaggaggttctcctccattccgttttcatctaggaaagacttcatggattcgttccaggtgggtccgactccagaaatgagaagggggtaagtttccttaggctcgctcaactgctgttgatttctttggcgatggctttccatgtgtgtgttggaggtggggtgtgtgtgtgtgttggaggtgagggtatgtgtgttagaagaacagagttcaagtgtcacagcatctgctcagggcggggagcagcacactagccatacgcacatccatgcatttgcagcgttatagactataaaagccatgcatccccggaaagcagtgcccatgtgcccagatctccgttgtgtcctctccagttcctatcagaaatagtccctataacatcagtgggtgctttcagaccccttcacgaatatttatacacacatgaatatttggctctatctactcgtgtaaagtattttttctttctttcttttaaataactactgttctgtgtcttctttttttaaataatgtatcttggtctttttttttcccccatgataaaacatggatagcattttatttatttattcattaaaaaaaaaaaacaataaatcccatgagaaagattgtgtgtatgcatgccctttagtggttagtccataatccttgggtaccacagaaggttggcttagagtcttccttaaccgcttgtcacttgtgtgaccctgaacctggaactgcttcagggcactagccccccacccccaaactctctgagcctcgtgtctttacccacaaaagcatttcttgttaggctcattgtcagggtagcactagtgtgaaaattttctaacctggtatcttgcttacactccatgggctctacttgctataacaacattggcaaacattgtagctctataaaaggcaaaaatgtataagccaatccctttaatcgggtgttgaggtgtttccttttcatcttaaactttccttgctgttgagaaaagttaacacccgggattatcttctcaggctgttttgtaattacccattctgaatagtgtttgttgatgggtagtcaaggggacacttggcgatcctcttctgtttgtgaactcaaacttgggctgatttgtatttgctctgtgtcacattctaccagaggactgataaatgccctaccgctgctataaatcttgtcggttccttatatgtgacacactgagctggggaacagacgctgatagatacagtagagaatacagtgctggggaaagagaagcagaagaaagagttagtagtcatggtaacaaatgtcacctggaatttagctgctagctcaaagagtaccacctcaactcaataagaatttcaaaaagtttcatacagtttgttattagagcaatctacctttgatatgtttaatatgcttctcatactttaaaaaatgcctataagggacttggttttcattttgtttcctaaagaattaacatgcgacttgtgtttgatccatgtaacccgtgtagtagagggagagaaccaactccggcaattttctgttactgccacatgtgcttgcaagtacgtgtgcatgtgcacacacacgctaaataagtgtttaaaaggagaaaggactctcacagaggagatgcaatgctaggggcgggggcagaggaggatttagggacattagacaggtaaatccctctacacaccattttataaatattgcgtaatttgaccttgaaagaagtgattaagtaatgtatcaaattctcaaagatttactgtgactcttgagttctgcagcgccacctctggctttcgttttctctccgagcaaatcatagtgtgggtcctgtttctgcttccgtgtctgaacagtggtgcatatgaaggcacacgcatctatcccttaagcttctgcgccgcttacctgtgtgcttattctagtttgccttcaatttctgtgatttttaaagtgctttgttttttaaaaaactttgtgtagaattctacagtgagaagagactcttaggtgcagagcctttgactgtcggtggtcaccgccatcccacgagctgtgtgacctctcacgtctctctccactactacaaatgacgtgccttccattgtgaatcttattcaggcaccagtcatggctgtggtgtgcttaggagaagcaagatagatggtcaggattatcacctgcatcagagattctcgacagccgctcttctttgtctggctgcagcaggctgaccacacgtgatagaaggtggccatggaagtggtgggatattgaagctctgtgtgcgcaatgggtggggatagcttcaagggggtactgtcagtctttagagtgagagatcacagtttacagctgtagttcagtgacagagcccttcccatatcgattctaaaaagaaaatcaatgttttaaaaaaaaataaaacaggttgaacttatgttgaaataattctgctctttgaaaatcatgaaagaatttggagagaaatatgatttggaaggacagacagaaattggacatgagacactgtttagattcatcattttttttttcttttaaagatttatttatttttatatgtaagtacactgtagctgtctttagacacaccagaagagggcatcaaatcttataacagatgactgttaaccaccatgtggttgctgggatttgaactcaggaccttcggaagagcagtcagtactcttaaccactgagccatctctccagccctagattcaccatttctattatcttcaccagacacagttttgccctcttgctggtaaactctggctttttgctctcaatcactattggcaagctgtgggatttttttcaagtgggttgtcacccatctggtattatttaatactcctcttcatgtctgcgacgaaaccagaagtggatgtatgtgggaaacacaggtttcggtgtatcagggagttttatcgttgactcagatctagactatgttaggatggggacctcggagagctctagtctagcatgtccttaactagcaagtgttcctataaagatgcacccacaagtggtccacagaacaccagtctgagaagggctgcttttcattcttcacactggagagcacccagctcccaggagaccgaacaccttatttagactaaagtcccaggcagggagagtctaggctgccttacccccagtctggtgccctgtaggctctgtgactcacacacgtaaatgatctgatttattgttggcttttttaaaatttcagatttcacaacttgattgagaaattcttgagagcaagcctcagagtcttcagagtctatggttgattcagagccccttcctgcctctgccaatcactgcaggttccctgtgggcccagaaggtttgggggagacgtagtcatcatagtcatcgtcccttgctcttcgtgaatggttcagatcttgactcctgagcatattaggagtgtatattcagcatattcatatattcagcatattcagtatattcagcatgggtcactaggaagaaaagtaagaggataactttaaaaaggaaaaagtaactattagtattcttgggggaatcattcggttagtttttgttatatttctctctctctctccttgtgggtgtgggggtgtgtatttacacaatttatttttaattttgtaactggttttatgcccacacaagtttactttttaaaaaatagatgatactccatttcataaaatgatcataccatcatttatttactcagttccctataatcttttgagcttttcatgattatatacctcgtgtgccgagtgcccctggagctatatattgctgcctaaccctagttctttcaaataaattcctgagagtggaaacgctgagtcagagatcattaataattatatccatttttgttatgccaaaagctagccttcctttttatgtattatcactaccaccaccaccaccatcatcactttagatgtctttttttcagtcaaaacgtcttataaatgaaagcagacactatggaagggcactagaaaagaaggaataatgttaaaagtgtcacaggaaactgacagacagtgtgggacactgggttagtttgagatttactcttgggcatcagaaccttgtggctgtggaggccacgcatacactctcttcccgggagggttctgtgtgtgctcatcccaaggacagcttggctctctttggaagaattaccacacagacgtgtcccagataggagtagttctttccctctggctcctcacagcattttaaaagtttgtttcctacagttgcatctttgatttttaatatagagttacttctaacactgactatcttgtgtcctgaaagaccttcccttagcacagttcttgatcatgtactagagcagtggttccaaaccttcctaatgctgtgaccctttaatacagttcctcatgctatggtgaccccctaaccacaaaactatttcattgctccttcataactgtaattttgctactgttaagaattgtaatatatctgatatgtgacccccatagggcttgtgacccacaggctgagagccactgtactagcgccttaaaatcaagatgccatcaagcctttggagatttctactggcagatcagcagctgtagatactgtttacttaatgccaaatttaaagcaaggcacatggcactagagtggaaactttttacacacttcagtatcagatttgtactatcatgatatctatataaacaatgtttccatttaattgtttaatatcacagtcctatactacagccaaaagaaaggcaccacctatcagtggttataatcacagtgtaaacgtggacgtatctgaatgcatctctacttcttaacaacctagtaagtattgataacacagctcagaggtggtttaacaatgccacatcccagatgtttcttttctattaactttcacaaaacaaatttgctatctgtcgagtttgctagtcccactcttaccatacattatcatctgtaaacatctaaaagctttgtgttgtgaaataagggctgataaacacaggcacgttgccacagcaaatcatgtctatagaaacaggttattatttgaaagtgtctctggatgtgaagatcctagcttgtctccttgcctgtcttctcccttctccctccattcagtgtgaaagtgcagagctgtgttagcttaagtcagttaataatggttgttcccagaaaataagccttcctaacttaacaggacatctccaagcctgtcactctactgccttttgtatttaaaatgggtacagctcagcattgaggacctgtttgtgctttatccagataccactactaatgcagtacgcttacagaacaatgcgttggtctgaatttatctaatgaaagacacatgcaccttttccactccctttctttctacttcctttaccacccagtgaccaatcagagtgcaggtcaaacaggtgaagtttaatagttcctatttgaattgacttagaaaatgcttaaaataggggtcagggagatggttcagttggtcaaatgtttgccaaacaagcatggaaacctcagttgagacccccaacactcgtgcaaaagctgggtgcagtctctgtaaccccagtgctaggggcacggggtagagtcaggttgataacgggggtttagtattcagtcactatagccacatacatcagtaagtgacaggttcagtgagagaccctgtctcagaagataaggtagtgagctagagagatggctcagtgattaagggagcttgctggtcttacagaggggttcagtcccagtccagttcggtaccagtatggcagcttacagccgcaattcagatccaggagagtctgataccctcttctggactcttcaggtcccaggcacacagggagtgctcatacatacatgtagacaaacacattcatacacataaattaaataaatctttaccaaaacaaggtagagagtgacaaaagcaaacacccactgtgacccaaaacaactcttcttccatgaagttacttgtgttgagtctttgatcactcagacgcgatcctggaataccttagatccctatggcactagctggtcccatcagactgtcagctttgagtgatccccacactgctccgggtccccaagctcagctagactacacacctgccttgggttcgagttgtctccatttttcctgagtgacttctgcctctccaggtgacagctcctaggttagggtgaggcacgtctgtgatcagctctggttttcttgatatcacagaggagaacacacctcttttttcctcatgaaacttcttgatgtgtgtgaagaaagcagttccactgacctcagctctcctcagagccattgtttctccaaggctcattttccagctgggttggttccgcagccttctggagtcttgttttagccctttaccctgcatatctgaactttaaaaaaaaaatatctgtttatagttactttaaactgggtaccccagggttcagtggagtactgcgactgtgggtctgttagccacaagcaccgtccagtcttccagtgcaagctaagactgtattaacttttagaaagcctcagtctgccttcactcctattgaacttacacctgataatttggtctccttagacttgctcaatcacctacaactgtccaaggacaagaaatgtattcttaccagtttgtgattcagtggggggtcacagacgtacacactcagtgaaataaaaactcaaggatgcttaggtaactgagtccactatcatttgtcctctggctcgcttttagagacatgtaggggcacatgttaaatattctcctaccccaggtcccctccagacgtcatgagtttccgtttcttggagtgatgcccggaaataggcatttaaataaaccctgcaggaccttgatacattgttttgagagttgctactgtaattattgaagagatagtcttaattaagggagtgatttattttttatttatttttttgtggggggggtagcctaggctggccttaaatacacttgttaagcccaggttggccttgaactcactgcagtcttcagtcccctgagtgctagggttacagacgtgcaccaccacgcccggctcgtctgtgatttctgaggagcagaagaacataaactagactagaggctccctgcgaagggaagaagccatacatcgtctgcagagcagtgtatttcagctgaagcagaagggccaacccgagactgctgaaacctgaaagcacaggatgccaggtgacagcaaggcaggacctgctacagaagccgcgtgatctttgtcatcaagaattcgtgaaataccaggcaacaccctaggagggagtggagaagggtgggggcgtcagcaaagattagctgggagcgttgctccacacatcccatctctcgttctggactatctgatgagaagatctatatgcatttcagttgactaatttggatatagaccagtcaggtggtagacagctagcacagctgctccgtgctcagggcatgggtcgttttcaggcactcaccgtggagctcagtgcatttcattcctcgcctaaacgaaaggatgtcaagagactggggtttgtacccgagtgatcttcaacttgaacgtctccttaagggtttagaaagtacacagatgggatccggcgggtgacccaccttccacgctcatcagtgaacactctttgaaacagaagttgatgaaagccatgctccaagcccttcctgcgtggctagaaaaaaagcagagtggtgctagagaggcgctcagtggtcagtctaaggcgtgggcctgggttcggtccccagcactcttaccctacagctcacaaaggcacgtaactcctgctccctggatctagaaccctctcctcccctccgccagccctgctctcacatatacaggaacaacacacacacaattgaatctcacttggtgtggtggcactggggaagtggagctctgtgagtttgaggccatcctggtctctgtgaggcgttccaggaacagccaggactacgtagatagaccctgtctcaaaatacatagtataaataagtaaatcttaaaaaaaaaaaaaaaagcctgtttgctacataagcattctgtactctgaaaagaggaatttaagcagacctagtacttgttagtttcagttaatacttttcagaaatgcaggctgaagttatgaaaacctagagagatcaagtgctagcaattgctaggaccgtaccagctattgcgtgtacaagtccatgcactttgtagtgttaggcattcataggcattcagacctggtttgcacaactgcttagagaagcatgtgagacctgtgacgatgtcccgacttgcgctggcctcgagagactcatccttggcaggcagcgttgtctgtgtctgagctggaagccgctggggttccccttctaaggatcactaatcattcctatcccccccacccccacccccgaagtgaattaggcactcctagcccaatgctaatttgatagagatcggttctaatttattgacatcttgacaatgagtttccccctttgaatacatgcaattttgctgacggtttttctcgatgcagttggcctctggtggcatctaggaaaaaacaaacaaacagttgtttaactcacattaagaaagaaaagcttggcaaacacaaggtgtctcatgttggacggtattttcgaagattataaacagcaagtgttactgtttatcccttagcttgcagaactaaggctatgtaacttttataatgctattttaagaaaatgatagcaaacttattagacaccctataaataattgtgtgcactgctttcaccagtggggctggtgatgcctgtcactgtggtaaagccccgttctgtgtagacctttagacctgaagtctctgtgcggtctgtctgtaatgtccaccttaacatctctggatgtatacgccatcagaaagcttacagctatgtgcatgtctgtgtctctgggtatcctgggtttgtatgttgtggaaggattgttgattcagctaagagactcatagttgggtgggtgggagaataacgcattgctggttcccctcaaactaaaggggaagacacactatgctagtctagagtgcagttatccactttggggcaaatactgagatatggctcttgcgctcccggcagaatgaggtactgtcacgtaagtgtgcgctgaacaaagaatgttccctgaagagccagtgtcagctttctaatgccggtagagactttaagagggcaaagaggcgtgtgcacaagtggtgttgatcatggtgctggcttggcttctccagagggagctccttgttgactctactacgtgggcttagaaaacttgagaattagcagactggtctctgctagaggcacagagaagcgaaagaatcgattctgacagcccatctggaagagcagctggcactgtgggacatcctggcctcactaaagcgctagctgagatgtggcggaggcgctgctgtgttcactgggagcttgagcttcaccagtgcaatagacactagaattctcagcactccaaggcagcagaagcactagagaaggttttaaggcccaagatggacacctcgtcactctcagaagtaaccaactgaagcaaagtagccatttattttgagctttacggttgcgtgtgatgcgatctaattcttaagtggcagctgaaggtctggttctgcttcacaattcatccatagccagatgataaaaatgagctaacgtcgctcagcagcagatactcaggcgtcgacactgggtaccgcggggctttctgtgtcaggcttgatcatcacagtgaccttcagcttactgctgtgattcccacctgctgagaggaaggccaggatcttactgtagacaacagatcccagcattgctgctgtgtgcacacttgtggatgtgggcatagactgcggtgcacatgtgtgtggaggccaaaggccagtgccagtgccagctgtcctccttagcactttctttctctttttttttttcaatttttgttttatttttgagattataatgtaattacatgacttttcccttctctttcctccctagaacctccacgtttttagaacccctactttgaaacagtatatttaaaagaatgtccattattctaagatcacttctatcatcccttttgttattaaatgtgttttcttttatgaagcaatggtcatattttatacttatttacttttgagacaaggtcttactgtgccatcatggctgtcctagaacttacaatatagaccaagctggctttgaactcctaagggtcctgggatagaaggcacacatgtctttttttaaaaaaagaaatcttgaattgacaaaatttaaaacaaacaagcaaaaaccttaaacaacgcaattagagcatctctccccagttttgggcgagggggctcttgtttatgggaagtcattttgttttcttttgtgggtgtgattattgttttgagtcttagtctcactacatggcccaggacagcctagaactccattaatatttattattattattatcattatcattcttactgctactaactactactacattcattctgtgtgcatgcgtgtgcatgtgtgtgcatgtgcacgtgccatagcacacatgtggaggtcagagggtaacttgcaggagttggttctcgcctacagtgtgggtccagctcaagtcatcagccttgcaggtgaacagcgttactccctgaactgtctgttccaccaacttgctctgatactcgccatccccctgcctctgccctctgagtgcctggcgtcacaggtgtgcaccaccacacctggtcctcacctcatttaaaacatgtttggtttggtgttgtagactgtgaagtccaagtctaagaactgagtagaaaaatcagtgtataataatttttaatgttctctagaattcttgatttatttcctgtttagttcagtcagcggcaggcctttctttcccctaaacaaaccacgccctcagtcttcttgacaaacatctcttgagaactataattaagatacagctttgtgctcagattcgagggactgtctagaaatgctttcttttaagggatctggaatgggtgccactcagttttcacctaggttctttttagacagtccctcagtgtctcatcactgaaaccctcactaaagcagcatgtggtcattcactgtgtggtggtttgaatgaaaatggcccccagcagccttgttggagtaagtgtgtcacttcgaggtgtccctttaccaccataaaacccctaagacaggctgtttatttgctatcttgtataatttgtatcttcataatagctcacgcatgtgtgtcagtgaaggtcagtacatcgtctaccgtttggataacaaaatgagtgtgaaggtggccatgctggagaggagcaagcaggagagccctgcaaacgctgagtgcatcacttgcccctaagtgtggtctccactgtggtttagttatgtgggtgttgttggcaatgtcgccatccttgttacgtggttttaattcactgagcttctctcttggtctatctcaaacacacgcttgttcattataaccaagactgcattaccagcaaccactttagaggacctcagatttgagcttcctgccatcttctttttaactttgtcttctcttttcttttttcttttttcttaaagatttatttatttattatatgtaagtacactgtagctgtcttcagacacaccagaagagagcgtcagatcttgttacggatggttgtgagccaccatgtggttgctgggacttgaacactggacctttggaagagcagtcgggtactcttacacactgagccatctcaccagcccttgtcttcttttttcttgtagcacacatacgcacacacgcgcgcacacacataccccgccccaactctagtaagttagattccagtggagcctcagtttgtccccggcattagctgccctctccctctttacgaagcttatgtgcttatgtggcatgatttaacagaatcactctctctctctccaactgccttgctccttagtcaaaatctcagatgttcctcagcctgcgagcctaggccagcatctggctgctaagtttgactttagaaaagacccacacttgtggtgttgggtcccactttgaatctaggctctgtgcctcaggtggaccctgggcgccttgttcctaagcatccctggctcaggcagtgtcctctcctggtttctaagatgactagctcttttctgttctctcaagctcctaacacagcttcctccagccttctgtctccaccagcaggcagtaacctagcatctttattttgctggcaacacagaagctctcagaggaggttttccccatcttctgtggtacatgctatctgctgagcgagggacctgacacagtacccgagctccatttactcctatagtcaatgtaaccaggcctagagatggagctgggtagtagagtacaggccctggactggatcttccccagatgtataccgcgcatacaataaacataactaagctataaatgtaggtgcctacttacctacgttagagaataaggagacaagatgggaatcacttggagacaaaagttaaagcctcaaagttgatggagaggaaaaaagctgttaagcatggatttgctttttgttttctttcttctttctttcttctctttgacagctttgtgtcctgtgcaagatacctttctactcaagatagctctctgctctcgatcactactctctcttgtagaccaaaatccagtccttaggaattacatatcacttcagtcattaaccccaggttcccttttgattatcacatggttatgatcttagccctctgactctagagacagagccacatggctgaagctgccgagttctgctgcttgctggagctggaagcatagattttcttatctcatgatgttttgctggtattttgagacagagtctctctctctctctctctgaagctgaggatggctttgaactcacagagctcttccccctgcctctgcttcccaagtgctgggattaaaagagtttggcaccacacctagtttatctcacacttttggttgggaagttaggtaatagggttataaatgaatgtggcacttttatttactccacgatggtaatctttaagatgcagattgtgggggagtggggggggggggaggagacatgcccaggacatgaaagcttgaggttcttatgtcagtttaggtgaaatttgtgtttaaggaactaagaatggccaccttgcctaacatccttgttagttatgcagctgtatacaacggagaggctagtgcaggatgacctgagtctcacgccaagccagcttacggtggtaccagtctgcttaggctcacttctcccttcctcacattcttcccatttcttttgttttcctttttcccaaaacctttctatgttgcccagaacccctttctaatcccttagttttgatggcttggcacactcctgattgcctcagttaacagactccaggaaatatggcctcagacttcttccccaattccttgactagtctcaaaaggagatccatcctgacaagttgtctcctatatcctgcctgtaatgagctattttcctcctggccgcaagctcctggaataacgactcaaactcaaaatatacttacagatacctaggtcatagagttaggttcatatcctgcatagctaataacccacttatacaaatccacactctgccacgtggctggttacctctgcgcaggcaccaagtgtctgtgctcctcacatcttccccaccccgagactctcccctcatagtgctctatccctctctgcctctggcccccttagtctctctccatggtatcacatccttcccactgcccaagcacagcccctgtgcatccctctaggccagactcaagatctctttgttcctgggtccactcctcatttttccaatatcacctcagcaaaatcagtctttcttgggtagatgccaaagatgtttcctgcatttcactgatccgttagggtagagtccttccggctttccatgcaggtagggactgctctttgcacgtctcgtgtccttaacacctcccgctgtgcttcatcccagcaggagcttagtacaggtttgggctgagtggaatcagttgttatgattcactgaaaattagaggccggtgctgatttactaagtcaggaaagactataataatagtaatagcaagctctcacttccactgcttagtcatataaccgagtctttatggagctggattgtggagtcttcttgtcagtgtgtatttctttgatatgctagaaaggattctcgccccgataccggcttgaagccgctaagacaccctgtcgctgtttctccgactgtattgtcatttcaaagataatatatgatgcgtctcataagtgcacacgtcagctttttctcttaattttcatggcaatattttgtgaactatttataagatgtgagttagtttaattcaaaccacattaaactaagcatctttcacttacaaaagcagaattgcaaagttcagattctactattcatgagcagtttgttttgataatcaggaaaggcttagacactgcaaatagtctggcacacacacacaatcttttacagatttaaattagttcagtagtgagacccataaattaaagggttcaagtaattttgaaaaatagattctcctccctcagactctgatttgtggagaaaagaaatctagaatttacctgtttgccccacccccaccccccacttcttttttgagtgcatgctatgctatgtttgggctaaacattctgctggggcagttgtgattcaagatcaataaaacagtatttccccttaaacagcacgtcacctcagagagaaggtaggtaaacaaatgactgaaatataaacctctgagatgagaaggggagcctgctcctcttgagagccatgggtgaggttagggatggaggagccagccagccactgtggctggtgaagcagagagctgccgggaggtcacagccgatagataatctcttctttaaatctgtggagtgggaatctaggtcacctgcgagagttagaggcatgaggtagctcttgagaagaactgagtatttcaataattcataaggagaattagaaaagagataacaaaggcgagaaagagaggcgtgtgagagcatgagagtaaagcaaagccccacgctcgctcctttgcgagcgagctgaaattggatagtgtgggggaggaggcgccgtcagtcagcacactgctgtaatttgctccagctctgctctatggccatattgtgctcagggctcacaggccagggataacagaagacttgaagagcctttccaagaaagtgggacctagccggggaggggtctccttaagaggagattgataaacttggagagagtctagctgagatgaggataggccttgactctgggtcctctgcaaaccttgctgctctgctcttgctcctcctcctcttcctcctcctgcgcttcatgtttatttatctttatttttatgcttatgagggttttgcctacatgtatgtaggtgggggtaccatgtgcatgcctgaagagggcattgaatcccctggaactggagttacagaccgttgtgagctgccatgagggcacaggcatctgaacccagatcctctagaggagaagccagtgctgttaaccactgagcccctcactcggcttcttgcacttcagtcggctgcatatggtcaaatggtaactgctggcttggagaggaagattaagagtaaggttccaaagcctggttgtcctgaagacttggatatgggctgtgattggtggaactaacctccaggagaagagccagccttacccataatgcagtataagccttctgctcgagggctgggccaaaggtcaaagacattatactgcctatggttcctgggcagagctttactctgtgatgaaaaaggatgcctttatgagtttcactgaagttctctttctgcctacaagcttaaccaggagtgcagatctcattgttttccagaatttttaacgcgtcttttctcgacataacgatgctacctttggatgtcactggcaacccagaagctcttcctcttcctcttcctcagagtcttgcttctggcaggggtagtcgtgtcgtgtgatttcttcacttgtcgtcagtggtaccactgtacttcccccctacagagagaatctttaagactctaatttcagataaggacaagtcgttttctcaagagcaccctgtgtgttgcacttccagtttcttcacctgcagctacgagagtaacactgaagtctagtacttagtcactgcatagagtgctgcgtcagtgtagcgtaaagaagaccacactcaacagaaaccatggactatagcagtgacatggcgaaggtcagtgtccccagaagagtgaagaaaagtcacaggtcatcttcatcttaagaaatggaacaaacagtcctatagagtagcccagagacactctggggagcccagatcatcagtcttgctaatttggcttgttagtggcaagtaattgaaaactatttttgaaacttcatttccgtctgggtggccctaaaaagtcatacacccacttgtcatgtgacatttgtcactgaagacatctatccttacttgtaaaattgttgccatcaatctagaccatggacctctcctgtgccagcccaggcattcctgctgagtttgtttccatccgttgacatgttaccttgtaactaagatgtagtgctcagagcctgctgtactgtaatagatgcattttccactagagtttctccaaggcagactttcctcctgatctcaagccacaagaaagcaggtaataattcctggttagatattaggtcaaagagacacttccagggtaaaagtgcttattctaagtgataaagagtatctcaaaaatcactaacttgcagcttccctctcccttcaaatatagcagcatagaggcctggtttctgggttttctgtttaaaacaacataagaggcttaactgtttcatctttgcctactgacagcacttggacattactgtgtgtaagtgacatgggggtctgtgctaaggggcatgtgaagaaggcaggccttccttcagatgtcctccacggttgcagtgagctagtgtgtaagactgtctcttcttcctttttaggttgcaaacatgttaaaggcatcctgttatacggaccccctggttgtggtaaaactctcttggctcgacagattggcaagatgctgaatgcgagagagcccaaggtggtcaatgggccagaaatccttaacaagtatgtgggagaatcagaggctaacattcgtaaactctttgctgatgccgaagaggagcaaaggagggtatgtggacataagactaacttactaaaaatgtagtatggctcacatgaagagtgatgcccagagacatggagctcacttgttgctgtgatctatagtttgaaacaacttgcagctaaaatacagttgctatcaataaatcaataataatgcagaattcccctggagcagtagctctcaaccttcctgtcttagtcagggtttctagtcctgcacaaacatcatgaccaagaagcaagctggggaggaaagggtttattcagcttatacttcccacactgctgttcatcaccaaaggaagtcaggactggaactcaagcaggtcaggaagcaagactgatgcagaggccatggagggatgttagttactggcttactcagcttgcttgcttatagaacccaagactaccagcccagggatggcaccacccacaatgggctgggccctcccacccttgatcactaagtgagccttacagctggatctcatggaagcatttcctcaagggaggcttgtttctctgtaataattccagctcctgtcaagttggcacacaaaaccagccagcacacttcctaacactgtaaccgtttaatgtagcctctcatgatatgatgaacccccagccacaaaattattttcattgctacttcgtaactataattttgctactgttatgacttgtagtgtaatatttgtgtttgttgatggtcttaagtgaaagggtcattcaacctcccataggggttgtgacccacagcttgagaaccggtgccctagaggttatagggggttggcatggtttgaaatgctactatacaatgttcaaaaacagaccttgaatacactttcgagtgatgcttttggaccactttgtttccaaacacttgagctcaatttgtctttgggaaagaagggaagttaagtccatgaatagattttaggcattttctgtgtcaaattccacaggaagtagaattcccttcagcacccagaatcagctcggttgtggattcgtatcttttaagttatagcattaccaattattcccacctataatgacatggaggaaggtggacatatatttggagctccagagaccatatttacactgactgtgagtttaaaacctcaaaagctgggaggctggagagatggctcagtggttaagagcacttactgctcttccagaggacccaggttcaacccccagtgttcatatagcagctcatagttatccataactccaagtattctgatgtcctcttctgctctcctgtggtaccagacacacatatacacttaaatacatgcaagcaacgtgttcatacacataatataagagaagtaagtcttaacgaaacctcaaaagctggatttgggccttaggtggggaaaattatttgaaaaccagaccaagtttcttaactgtggcagctgtttcatgtgtcatcttgacccgggtcataagttgcccagatgtttaactgtataccctgggtgtatttgtaaaagtgtttctgggtaaaattaactttgaataggtaagctgaataaagtggattgtcctctcagtgtgagcagaactcatccagtcagaggccacctggcttcttctaaacagaaacaaaggagctagaagccacagaatgacattttaagagcctgagagaaaaatcaagtttttaaatttttcatatgagatataggggtgcagttccatggtggaacactgtgttaggccctaggttcagtccccagcgctgcaaaaataaatgactgaatctctcgttcactttagcatctgaatgaatgaagttctgtgtcctgctgtgcagtggttgaggagggttcttctctgttgattttttttttgttttttccgcatatggccaagaatgacgtcagggggattcgtacatcattttctcataactgcagcatccttcctcttacagtggttgccattgcaaccaccttgaactcaggtggaaataattgctgatgctgtgatttcaaagatggtgaaatagcttaatacatcttagagttaagaaaaagtctggtggacgtacgtggttatggaatggtaaagtgagcttgagtgtattttaagaattcatttttctttttgttctttggaaacttagaaaaaagaaaaagcatgagacagcagtccctataaatagttgcaactgctttaaaaaacaaacaaacaaaaccaaaacaaactaaagaagtaaaacagcctaatgggccccaatagttacacactaaacaaagatgagttaacacgatctagagaaacagctcataaaagctcactggtgagagtttccttgtaactgcgaagataactttggtactgtttttaaactcagtcagtttaaacatgacactactaacgatgaaacttcattagcggtcttgcctaagtctccccgctccccagccctcactcgcacggtcctgccacagtcctcctgctgcccacgccatgggcctcagctccaactctgctgcgggagttgagtggatcgcggccgatacctttgctgctggcacagccactctcggttacctggcttacaagaagttctacgctaaagagaatcgcaccaaagctctggtgaatcttcagatccggaaagacaacccaaaggtggtgcctgccttccacatggaggatctgggggataaggccgtgtactgccgatgctggaggtctaaagagttccccttctgcgatggggctcacgcaaagcacaacgaagagactggagacaacatgggacctctctgatcatcagggaaaaggaaacctaagccgggcatggtggcgtaagccgggcgtggtggtgcacgcctttaatcccagcactcggggaagcagaggcaggtggatttctgagttcgaggccagcctggtctacagagtgagttccaggacagccagggctatacagagaaaccctgtctcgaaaaaccaaaaaaaaaaaaaaaaaaaaaaaaaaaaaaaaaaaaaggaaacctaatggacagtttcgtggctgcacccagcatgctgtgatgtcacctgatgacttaggtagaatggcacccaacccaccgtctgattggcctccccggttctagatgtggttgacccctgtaaatcacagctctcatatccatggcatcggccttgctactgaaacactgaggtgtacgtttgttgaaagaagaagaaaggctaaactaacctcgtgctataatgggttattttggtcttgtaaggatccgttcctttaaaataatggtcttagaatatagttgtatcttgaggttaaagtattaaattatttcaaaattaaaaaaaaagaaagaaaagaaatgaaagaaagaaactgcattagcaaagaatttttaagccgggcgtggtggcacactaagaaaccgggcgtggtggcacatgcctttaatcccagcacttgagaggcagaggcaggtggatttctgagttcgaggccagcctggtctacaaagtgagttccaggacagctatacagaaaaaccctgtctcgaaaaaccaaaaaaaaaaaaaaaaaaaaaaaaagaatttctagatagaaattagtcatacccattctcttctgtcacatccaggcatgaccagctaatgactccatggagggtaatgtgggttacataataaagaaaaggctcctctctgtgactctcaacacctggccaaaagagatgaatacttccatataggtcaactagataaatttagagcagccactttcgaaggctgttgccaggggctcagtggcatcagccctgtgtctatgggaaagatggcaaatggtagaagcagagagacaggagccagtacgttgaagagggttgcactgtggagtccaatcctttggcacatgttaactgatgtctcggttattttcatctgcgaatctgactcctaattcagattctgtgaatactgtgagcttgccttaaactggcacgctgtgaaactcaatgttattgtgctgattaactggggagagggagctgctggcaggacccaagtctgtaagctctaaaaaggccagaatggtaccgatgtgcttagcacagagcacccctgtggtcagcaaaaccacaatcttgcagtctttggcatccttcttgactcgtggatagaaggcttaggtgtagatggaagatgtgatatcacacggctcagggcaccagacaaacatgccagcactacagctcctttctgcttcttgtccatgaatgttttatgttcatatgtttttatatttcagacaaggtctcactatatagaccagagtaaactggccacttagagatccatctgcttctgcctcctgtgctcagccaggctatgaataccttttgaaaatgaaaaatcctacagttttccagtcacgaacaatagtgtcctggttttgcactgagttaactatagctctatgtagtgttctctggcaaagtttgaagttccagtttttctgccagttgatcaatgaacagtttggggcatgggatttttttttttttttttacaaatctaagaaccatttgacattagacaaatgtataatatatattcattatgtacagtgacactgagaaatgaaaaaaattttaatttaatttagttttaaaaatacttatggaaggagaataattttgattgtttagaggaaaaaaaaataaaacttaaattccaagaactttgaagaacacctgggtatcatttcaatatagaatcgggctaaagaacaagcagctctttacatgtgagaacaggagcgccctaaggcattttatctgttggatgagtatcctgcaattttgacattttctcttctgccatatacttttatgaatttgtggaactaccactaaagttgggatgtaacattagtattccctcagtttatttatttacagatttaatataattctaattaatgtttggatttgttttctttcatccttggtgtgttgacgagcatgcctgagtgtacatgccagaggtcacagttggcacctatctctactattctcccttttatttttatttatttatttatttatttatttatttacttattatatgtaagtacactgtagctgtcttcagacactccagaagagggagtcagatctcgttacggatggttgtgagccaccatgtggttgctgggatttgaactctggaccttcggaagagcagtcgggtgctcttacccactgagccatctcaccagccctcccttttatttttttaagacaaattttctcagtgaacccatggctgccgtttggctagatttgctaacaagcccccaggctctgccgtcactgcccacctaactctggggtttcaggggcacaccactgaccacttttacatgggtgctggagatcaatatttacaattacacatcaatagacttaattaaaaagcatgtttataaaccaataaaagaaacacataggaggcttatcaaatataaaagaaaaattagcaatggtaaaaatatataatgtatgtttttggatgtgagtctagtcttgtgagctgagccatctcttccactcaaatatatataatttataaagtgtgccagcaccttcagtaattagaaagatgtgacttaaaagcagaaaaatcagctccattaaaaccaatgaccgaagcatgcacagaaagacagtagtattgatttgtccattggcaattggtttttagtgtttttttaattttccttatttgtgagactatatcaagataggcacagtcatgcattgtgggagctgctgaggacgtaaccctagatttatccccatcactacaaaatagcaagaaacaaaattttgtagaaaagcatttgacactctgttgtaaggtctttaaaatattcagtataccctttaacctaacagttgtgtttaggaagtaattatgtattttgtcaaggatttaggtaaaaaaaaattacattgcagccaaatatataattagaaatatataattagaaataattaaatatctaacagaaaggaattagagtatgtggactaaaagagctactaatagtcatattgtagttctggaagaggaaataaggcaatagctagactggaaaaacgagccagcctaagaagctgcagagtagtctgtgggattctgttttggttagctgcctttagtgctcatgagctctttctgtttccatgttttcccacatttcttctactatgttagtttgcaattagcgagagtgggagattttggagtagtgatccctaaaagcctctatcaacccccgcccctcaggtgtcagggagctggagagagagagtgtaagggccagagtagcggatgacttcaagggaacctcttccagacccagtaggactggtacattatgaattcagagaccatggcagcatgcacaagacctactcaagttcaaacccgataaaactgcagccgggagagaagaaagaggccacagagtcccgcccctaaatgagaagctatttgcagttgaaggaatctatcggttttctgcagtggactgtcactggatatagcagccacactgcagagcagggcccatgtgcaggaatggttagtctaacgtgaagtggaccccatgacttgttttttgtttttattttgtgtgtacatgtagtttttgtcttggtgtttttatcttattggtttggggtttgttgttgttgttgaattgttttgacttggtttgttttttttgttttgttttgttttttgttttggtatttttgttttgagagagaaagaatgtaaagttggatgaacagggaggtggagaggatctggctggaattggggggcagggagaacatgatcaaagtattttacaggaagacaattttaataaataaaagcaaaatattttatttaaaaaacaattaaaaacaaataactatttggacttctttcaaagaacaataagtattcacgagaagacaaagtatgatgagctcccattttcttaatgtttttattaattatttggaaatttcacaatcacacttcccagtcctcccaggtccactccacccccacccttgtgacctcccccaaaacaaaaggagaaaaaaatatataccaagttcaatttgtattgctcttatactcaccggagcatggtcaaactcagtggccggccccttaaaaatgagacccactaccaccaaaagccaccgactggaacgagctgcatacatttcagcagccttatcacagtctttgagagttctcttcaacgccttcctttccaggctgtttctttttggggaatacagataggggaggaggtggaagagaagttgtctcagaagccttctgcacctctcattctcaactgtgagtctgtagtcattgagaccaacgaaaagatgctctcttgccctttatagtcagcagcagtaaggatcatagacttgcacatggtttctggctacagcacagtgcagaccacagatatctccatggcctttggtggtaacgtgggccatgggcatcaacaatgcccttgactgcaattcagtccatcggcaccatcatggctcttggcagcagcgcaggccacggatgtccacgtgggctccagcagccacacgggctacagatacatggcctgtggtggccacatgagtcatagacatccccgtggcttcagagggcagcacagaccctggacatccccatggacttcagtggtgacacaggccacagctgcccatgtcacttccataccctttgtcactgggtctgtggtttgctgttctcccttgcacaccatttggtctcttccaccatttttccttccagtttcatgagtccacttttaaaaaatgtttccataggacttgcccttctccagtttttctggggattccgcaggctcttcagacctcacacacacacccctgccacctgctgctgcctggtctgccctcggagcttccatgggtcccatcacagccatgcttcaggttttcaccctcgatggcgataacgagctccccgattgggttccgcagcactggctcctccacattgctccagcagcttgtaaaggactccagtactcacctggtgaaaggagagacccaactcccacaagttgtcctccatgtgtgagccctgactctcagacatatgtacacacacaccccataaataactgtaaaattaaaaaaatagaaatattatatcaatagcatttatctttaggtgataagggtagttttaactttattttaaattttcttacaacttttgctaagttaacccattaactaagttaagactacatctcttaatttaatttattattattttgggtttgtgtgcatgcatgtgcacagaaatcaggaaacagacctacttttgggagccgccttccatcatcatacattccagggatctaactcaggtcaccaggtttgacctatcttgcatccttaaacctctcttttaaaattgtgtttgtgtgtgtaaaactaactgtatgactgtggatatgtatgaactatgacgtgtggagattaaaggaaaaccagtggcaatcaattcttattctgcgtgtctcaggtattgaactcaggtcatcaggcgcagtggcaagtgcctttacctgcagagccatttcagtggcccacttaacctctttgaaagatcctattgttatagaccgggtgtgcctgcccactccttttatcccagcactcatcagagattaatgaattctaatcatacctaatccttaggttcactatgctcatcacttaatttatatttataaattttcatatttatgttatattcagtctattctgttttattattctttgttgttcgccttggtgttaaacatagaaagtaaaagaatcatgattgacatcaattaagtctatatttcacgacagtagagaggattttgatcaccccccaaatgaagacctgttgcatgtttgatacgtcagttaccctatctgattgctacacactcattgcacacattgcaatgtcactgcaccccataataaccatgtggctactatcttaagttttctagttcgctccctctggcccctcttgggaagcataattactaaatataaattgttagaaagcccatgttaatttaagttaatatattattagctattttgcaattccaatatcttcgagagggcaacatccgtgttttaatttacactatatacatctatacttattagtcaaaacgcagcaaagcaaacccgtaggatgctttgttctgcatttctcgatgagtttgtttattgatgcattcagattgtgacctttagcagaatttccttccttcctagcttggtgctaacagtggcttgcacatcatcatctttgatgaaatcgatgccatctgcaagcagagagggagcatggccggcagcactggagtgcatgacaccgtggtcaaccagctgctgtccaagatcgatggcgttgagcagctgaacaacatcctcgttatcggtatgtctgaaataaaggatatgcagcgacgatgcgaacaccttagctgccggctctcctgcagctgggcttcgggcctgagccattttctcccagaaagttttagctgttgtatatacagagctgctgttccttaggatgccttctagaaaggaaaaacattactgcttcttacagacatcggaattgctgcatgcaaaagagagaccggggagctggaaagaccaccctggtctctttcagccgcgaacttgcaccttaggtttgctctttaaatagagatttcactgcagtctttccatgtttcctactaggtaaaaaaaaacaatgctgttcttggtttagtgctgtttggttcgtgcttgacttttgtaagaggtcctcagtgacgttacgattgtttacgtaaactgaaagtatgttttatcttacttttggactctgatcatttgcttaccactcttaatatctgcgtccaggaatgaccaatagaccagatttgatagacgaagctctccttcgacccggaagactggaagttaaaatggagataggtaagtaaagtaggtcacgggtgtgcacgcgtgcatgtttatgtgcacatgtgtgagtgtgtgtctgtgcacacgagacttcacatgtggcttcagactctattaatgatagcaacctcatattaagtaatgttcattgtcagctgtccacagctggcctgcctagaagagaactgcgaggattgtgactgggtctcctgatggatccccaagactaggaaaatgtctgtttttatctcatcaggcttgccagatgagaagggtcgactccagatccttcatatccacacagcaaggatgagagggcaccagttactgtctgcagatgtggacatcaaggagctggctgtggagactaagaatttcagtggcgctgagctggagggtctggtgcgagcagcgcagtccacagccatgaacagacatatcaaggtcaggaactcattgaacagatgagaacacacggcccgtgcaggccaggccccattctctaccacagaagagaacacacggccagtgcacacacggcccgtgcaggccaggccccgttctctaccacatatgccagtgagagtaagctggctcttgatggcgaagagaggcagagtaaggattgctgtccactaaaggacaagcagcactgtctgcccagtggtgaccaccggtttatttgcctttggtcactcccacctggcagatgtggatttgacgattattgttttcaatcttataagaagcggagtcttttgcatccaggagctgtttcttgcagcagacactggatgtctgctactttttaagtttggggctagtcatgaagatgaatcttgaccttttccctcaaggggttcagagtcaggaaaatggactagtacagagtggtggtggtggtggtggtggtggtggtggtggtggtggtggggttctgatttttttgtttatttctttgtctttgtgctgctgagaactaaactcgggcttaatgcgtgttttacaaacactctgccactgggctacagccctagcccttttgattatttttatgttggtcttgctagttggcacaaattggccttgaacttgcgctgtattgcaggtaagtgttgagtttgtgatggtcctgcctcagattcctgtgtagctggaatccccagcgtgcagcaccgtgctgggcttagtacaatcatatcatttatactatggtaagattactattgaggggccttctgtttggatcagtgaagtttggtgcataagtacgggtggttctttcccacgctgcagttgtccctctaattccttagctcccaggcttctgttgcatccctgacaggacctgtcttctaactttctgactcatatatagtaattctacttgggtattttctcagatctcaaatataagatccaacaaaccacctttcctcttctgtttctttttatgccaacatcccaggttaagattgcagagtcacctcctctgtatacctctgcgtcctacgtcagctcatgtgttcatcctcctggttctgtcccggagcagtgtttttccagtcatggtcgccacctgcttcctatgctctaactgtcctcattcagatcattttaccttcatgtcagccatgtctgcaaagcaagttcatagtgccttgcctggcccttccagacattttcccagtctatcgccatgtattctgaatactgaaagactcaccaaactttattttgttttcagactctccgttcttgcttattttgttttgttctgcttgggggtctctctctctctttttttttttttttttggtttttcgagacagggtttctctgtatagtcccagctgtcctggaactcactttgtagaccaggctggcctcgaactcagaaatccccctcctctgcctcccaagtgcgagtgctgggattaaaggcgtgcgccaccacgcccggctggttctcctttcctaatgctgtgctgtctcccttcctcgagtagtcacagcgtgtggggtggctctggctgactttgacaaatactttatcaggctggtgtggggctccctgggtcaaggtgcatagggtggcgagccttatgacctgtgtaatcacctgacccatgtgaaggcagaaggggagaactaactctaactccacaaagtccatatgcactgtctcacatgctgccctccccatcacacacacacacacacacacacacacacacacatgcacacacactaataaacaataatttctaaaacaatatagatataccaagcagtggtggcacataacctttaatctcagcaatcagaaggcagagacagacggatctctgagttcaaggccagcatgatctacagagtaagattcaggacagccagggctgtctatcccaaaaaaccaaaacaaaaaacaaaaaaacgtaactacaaaatggatttattactgacctgctgatacaggctatagctcagtagttggcgtctaaggggaaaagttagctttaagtttaaagactgcttgaggtacagacaaagtacaagaccagccaggatcacatagcaagattctgttccaacacaaacacatacacacacacacacacacacacacacagacaggtttagtaccagctacatgccatgtactgtacaaagagtggaagctgtaactgcaaagaatgtaactgcctgctgttaatcagcatgcatccaccttcacacacaaggttagaaagcagtagtaatgcacaatacaggaagagacaaagcactggtgtggtcatctcatggcacagagaagccttcacagaggcttcttccagaaggatgcgtataaaaggagcatcggcagaggcacagggacacaagtagagtgatgggctagagtaacttcctattgtttcagcgtggaccctagaggtagtgctgggaaagccgggagccaaagctgaggatgagcacaaagagcctttcattctctgcggagaagtgcagactcttccccttgcagaggtttgagagcagtagtgacagagcgtcaaaacagaagatctctctgcagctgtgtcaggtaggagtggagttggtgacacgggacaagagagcagatcagacaggaagtaacggcctgaggttgagcacgtctccgttatttgggggctccctgtggttggttctagactgcacttggtcagacccagccaccacgagttctctgaataaagctaaacgtacagagtcttatccatcactgtgtgtggctgtggctgtggctgtggctatgcagtaatggctgagccgcttttgctgcggaatatgtggcctataaaggctattcagaaaatgtttgctcatcaatattctaacctttaagtccacatcttattcatcctggaatatcccacagttcacagaaggtgaacactgagcagcatgtacatgtagtctttacattttttattaaatttatccatttatttgggggtggggatgggcagtgggcagcaagtgcccttagttgctgagtcatctcccaacccatgtgtattttgtaaagcaataagcctacatgtgtattatttttaaatcgtccatttagtaccgtgtggatgagaaagggggaagtttgcagtgtacacacacgccagggcacttgtgtggagggcaaagggcaaccctgctgaagctggttttcttctgtcttcctgtgcgctcagggagtcttaaggtctccaggcctgcacatcagtgttagtaaggggtcagtgagatgactcagttggtaaaggtgcttgctgccaagcctgacaaccagagttctaccctaggactcacctggtaggaaagaagtaattcttccaagttgtcccctgacatccacaggcacatagtgtcaggcatgctccaacccacacagtccgtgcatctgcatccacgcacatacacaactctctctctctctctctctccctctctctctctctccctctctccccattttttgttgttgttatcagaaacagtttttctgtgtagccctggctatcctggaactcgccctgtagaccaagttggcctccaactctgagagatctacctgcctccccctcccaagtgctggaattagaggcacgtgctactgccacccagcatactaataataaacttaaataaaatttaaaagttggttttagaactttaaaacatttacagtaaccagcaagtcattatgatattctgttttcaaggtccaaaaaaatgttggttttacttctatttccttttcaaaacaattgggccaaagcaaagactgagctaggtcgacaagaggggccttcctggtggatggcagtcttcggttttttgtaacaagcaggaagcatagtcatgaactgcctggtgtttgtgtcgttgtacttgaacctgtgtttgtttaactaaaactcatgtgacatctggttgtttttatgttgagaggaattctgctacaggtagagaagattcataactcagatttcttcccttagctgtgttggtgaactttagtaaaatgacttcttttccagagaccttttagctgattaaagtcgtcccctgcttaatttcagaggaatgacgagagcctggaaaggtcaggtttagaaggtcacgaagcgtaagggtgaccactgatatttgctggtgttgaaatacgagcttatgagtttgtgtctcagctggaaggtgtcactgtttctgtattgatcagctggcacaaataaaaggcagaaaatagcttgtcagctcaaccaaattggggaaagggtttttaaatgagtagaagttcagaattgttgattttttaaaagtaaaattgtattgatgttgataaaatagtaactgttagctaggaaaaactcaacatttattctaatgaacaagaagtaatttagcactataatattatttatagttgggtaactttaataattcctggagtgcctgaaaacagcttattctcctccctcaactcgtagccaatttaattcatttataaccttctgtggttgactcaggatcttctgtgcagccctaactatcttcactgtgtattccaggctagcctagaactctctctcttcttcctgtcttcaccatgtagtccaggctggcctagaactctctcctccatatcttcaccatgtagcccaggctggcctagaactctcttctccctaactggcttcaccatgtagcccaggctagcctagaactcctccctaactgtcttcaccgtgtagcccaggctagcctagaactgtctcctcctgccccagcctcccaactgctgggattgcacataataagccacaatgtctgacttaaatttttaaaaaatatatatataattgacatatacaacaattagccatatttataggctagattctaatacatgtatgcagtgtataatgtgcagattagactaaatggcatactcatgccccgggggtggggacattcggcatctctgcactagctgttgccagccttggtaaacatcctctgtgtacctccataccctcatacccaaagcccctcgtaacacattctctttatgtttttaggcaaagttgtagtagaccaggctggcctcaaactctagcgcctcctgcctcagtctccttagtggctctatccctggggtcctgcctttaggaatagctgagtcatgcattctggggccctggtagtgcataagagagggttcttagaagagcaagccctccagcttcctgcttggagatgggaatgtttcctcccacgcatgtcattactccagggcccttgccagcgcctacaccagcttgtttaggctttcagcatcctaaactgagactggtaatgtcttttctttataaagccagtctgtgtcaggtattaaggattcaaggatgccagacatacaggaaaaatgagaaaagctctaacagctccccccctctctagagtcaaccagtatttgggatatacccttgtcgcttgatttctccgaatttatatgtatatgcgcacataatttatcgaaaggggcataagtataattgtactgagatttgtatttttcgttgtccattatatcttgggccccatttcatgtcagtacttgtaagatccccacattactttgtactgatgcaaagtagtctagaatactgccacataaaatacaaggtagataaactgggcatggtagtgaagaagattaagataggaagttgggggggcgggacacatacctttaatcccagcatttgggaggcagaggcaggcagatctctgagtttgaggccagcctggactacagagtgagtttcgggacagccagggctacatagtgaaaccctgtcttaaaacagaacaaacagggctggagagatggctcagcggttaagagcactgactgctcttccaaaggtcctgagttcaaatcccagcaaccacatggtggctcacgaccatccctaatgagatctgatgccctcttctggtgtgtctgaagaccgctacagtgtacttagattaaataaataaataaataggtaaacaaataccagtaaagttctaaaaacaaaacaaaacagaacaaaacaaaaaactgaagtccactctgggccaggaatgtgaggccagccagcacaagccatgaagctggagaacactcacatttttatctcgtgcttaatttttagttttttgggtactggataatataatgaatgaatatgctggtaattgacttaacatggaattatttctggttgttgctatttttcaatgctgttgggacagtgcttacctatgcctccatatacaacgagaggcattttctagaatggctatctagctgtgttagtggataccagtcttattgtctcctgagttctagtaccgccagtgagaatgatcacatcagtccaggctcgttggcttgcttttgtgtctcagaaaggctctgggactttgtctcctctttgatgttcagagggtttgcagcagtgagtctagaccgtcaggatttcttcccatggatcccgatcgcactctctgaactgcagagacacacctttcttcggctctgtaggtgctccctcatcatttttaaattgatatcatgccttttttttttaaagagcatctttaaaaaaaaaagtgactataaagcaaaactatgcgcagcacatgtcaaccttccattgatattattaaaatatgannnnnnnnnnnnnnnnnnnnctccccctccccctcccagtgctgcttctgtattagtgggtgtctctgtcctctgttcctaagacttcaggttagtggcaggttttccatggtttcacctttcttactgccgctgccgtttgttgggatttgggaactgaaaaggaaataaatacgtatgttccagtttcctgacatagttctttttatcccttaaggctgaatttttctttttaaatgtcttttttttttgtctcagcagtctgtttctgaaggaacatgactcatattttaataatatcaatggaaggttgacatgtgctgcgcatagttttgctttatagtcacttttttttttaaagatgctctttaaaaaaaaaaggcatgatatcaatttaaaaatgatgaaactcgcttgctttgtgctattgggagtgagcccagtcacattaaaaagaaaaaaaaaaatatgttgctatcttaatcactcatcaggtccaggcaggtccaagtgctgatagaggcctggatgctgctggtccagatgtgcaagcgtcagctccaggtgcagtgagcagactgtttggagctagcacaaagtccaagttttaggtccttactctctggttcttaaacacaactcagtgccactagaggtgcctagaccctccactgcacactgtttagcaccctggagggtgtggctggcctctgcaagtcgggaaggactctagagggcatcctgatgtgcgtccaaggctggacaccattgtcccccaggtatctctttgttgtgttaaatagatgtaaccttaaccacttcaattgtactttttagtgacattaaacgcatgtacaatgtgcagccatctccacttcaggcctcttttcatcttgtaagtctgaaactttgtatccatttaaaaagtaaccatctgttctcatctcctcccaacccaggataaccacggccctactttccatagaaccctaaagatgtcaccaagtggggtcacgcagtgtttgtattcttgtgactggcttgcctccatcaacagtgttttcaaggacatccatgtggtgtgatacccagattccttctttcttagggtggccacaccatggctgtgttcgttcctctgtcggtggacaactgggtgccttcctcagcttcgctgccttgttccatgctcttgtgaacatggctgtaaaattcctaagccccagtttctgcccccggggatggatatccaaggagacatcattagatcataaggcaattccagttttctgtcttttctcttttcccttttgtcttttcctaagacagggtttctctgtgtatcttcggcagtcctagaactccctctgtaaaccaggctggccttggactcagagatcacctgcccctgcctcctgggtgctgggattaaagagctacatcaccatggctggcctgagtcctagttttctttctatgagtgctttcgaattttatatccctgtcaacagcccaagagttccagtttctctaaatccttgctattgcttattttctgagctttttgttcagttagggttttttgtttttgttttcattttgttttgtagtcatagctgctttttaagtgtgaggtaaaatttcattgtagttttggttattagggggttttgaaacagtgtgttgttgtgtatcttatactggccttgaacttgccacgtttgtgcctcagcctcctgagcactggcatgtaccacacttggctttgaagttcactgagaactagtggtgtcagccatcttttcgtgtgctcttgggcattcacagggtgtctggaaaaactctgcaggacactgatgttggccaatgctggtcccccactgtctccattccttgaagaaatgtctgttcaagtacttagttcttgttgggttttagacaccttatatattctagccattaatccctttagcatgtatgatttgcagacatttgagaatttgatatatgaaaatatcctttgtactcttcaattctcaggctgggaatactgctaagtcttcttcaactcttgtgttttgtttaatttctttcaggccagcaccaaagtagaagtagacatggagaaggcagagagcctgcaggtgacaagaggggacttccttgcttccctggagaacgatatcaaaccagtgagtatgtgtgttgagtgaggtgtggccccacagagcgagcctgtgttatcaaggaggggaagcaccggtcagtaggtcagttggtcggtcgggcggccttctgatgtatgggctgtcctctgtagtttcctaacacgagagaatctcactgtagacacagcagtacaggttggttagttgaccagtatttgcccaaacacttcctgcggtagaaagcttactatccattttgagactttctgagttttgtttttctaggttttgcttgcttgcttgcttgcttctctcttctcttctcttctcttctcttctcttctcttctcttctcttctcttctcttctcttctcttctcttctctctcttctctcctctccttttccttttccttttccttttctccctttccctttccccctttccccctttccctttccctttccccctttccccctttccctttccctttccccctttccctttccccctttccctttccctttccccctttccctttccctttccccctttccctttcctcctttccccctttccctttcctcctttccccctttccctttcctcctttcctcctttccccctttccctttccccctttccctttcctcctttccccctttccctttcctccttccccctttccctttccccctttccctttcctcctttccccctttccctttccctttccccctttccctttccccttccccctttccctttcccctttccctttccccctttccctttcctcttttccttttcctctcttttcttttcttttctagacagggtttctctgtgcagaccaggctggcctctagctcagatcagcctgcctctgcctccacaaagcaaagttattcccatgggctgcctgagctccttcccactgagctgcagctcagccctcagcttgcttcttctccacagtcttcatagagttatatctggttttattgccatttttcatccaagtctttggggaatgagagtttttaatttcttggtcagacatcacttaattcaaaatgtctttgaagagaccataacaaggaatgggctgtgtgacccaaacaacacagtgacagagacaccaagagatgcgatagtttagtttcaataccattgaccaaactgctttaaagtgtcctttacctcaataggcatttggcaccaaccaagaggattatgcaagttacattatgaatgggatcatcaagtggggtgaccccgtgacccgagtcctagatgacggagagctgctggtccagcaaacgaaaaacagtgaccggacaccactcgttagtgtcctcctagaaggtaaggggaaggaaggaggtgacggcccgaaaggtttgcacactacacaacaggaagcattcatttttaaaagctatctagcatgcttcagaaaaataaatgcttttctgttctaaactttgtttgtgatcgacaaataatatcctagcctacgcatctatagtaggacagattaaaattaggggggtagaatgtacctgacaagtgacagcaaccaggtttcttacaggaatatatttctctagtacttaataatgtattgatactgcacagctcagtgcaggaactattgatgtggacatagagcatccaagcatcagtccagtcctagaaaagacttgtaaagaaatcctgccgggcagaggtggcacatgccctcaatcaggcagatctctgagtttgaggccatcctggtctacacagtgagttccaggacagccaggactatacagagaaaccctgtcttgaaaaacaaacaaacaaacaaaaatccctaattttcgcatacacacataaagttgtgtgtggggtggtgccagtcattgtgcccaggcatggtcagagagaactacaggtgatgctccattcaggccttgcagggccagttcagattttatcaggtagacaagggaagggcattccattcacacccagttaacttaattttagtatgacagtagagaagttcagggaaaccagatgacaggggagctcagctcccttaaggtctagaggttacgccttctaagaaaagcatgttaaagggctggaaagatggctcagcagttaagagcgctgactgctcttccaacggtcctgagttcaaatcccagcaaccacatggtggtcacacccatccataattagagccgatgccttcttcttctggggtgtctgaagacagctacagtgtacttacataaataagtaaataaatctttaaaaaatagaaagaaaagcatgtgaagccaagagccagaggaggagtagaagctggccgggccagaagaatcgagaaagatactctatgcagagagagcagcatgggagcagccccttggcaggaaagacctataagcagagagatgggtgaaaccagggttgaagtcggtgggagggaccggtgagatggcttagagggtaacggtgctggcccacctaatcctcatgtcaggcctgggagtgcaaatgcgtttgttttgggttttggtggtggttgttgttgttgttatcattattagtttttctacatggctgtcctggaactcactctgtagaccaggctggcctcgatccccctgcctctgcctctcaagtgctggattaaaggtgcgtgccaccacacccagccttagatgttgtttttattcctgtgctgtacacagagaaccagaagcttagaaatagtggttagactaaacattggcagagggccaaagaggtggctcagtagttaagagcactttctgtttctgcagacaacctgagttcagttcccagccctgtttgaggcagctcacctcagccagtaactccagccccaggggacctgacaccctcttctggccttttctgacacactccacacacacagacacacacagatttttaaaagaaaacaaatctcttaaaaataaggagataaatatgagtaaaggcatcaaacatgactcccagcccggtgaatggggctgtttatcagagatcactgacagagaagcagaaattaggaagaaagatcacaagctcacttttgagcagttaaattgcaagttcctgtaggataatgagattagaaatggctaccagcgtgtttgatttgcaggtctgaagctcccagaagccagctggctgccccagatcaggatctgccccagcagttgcaggagtagaagcagtcctttagagaaaggatgtggctgagatacagacagagcctggaacttttgtctgaaactcactcgttaacagttcaggactaaatagagcaggagaaaaagacaagggagcctaagcaggaataaccgagggaggaggagggagagagcagctgtcgggcagccaggaaaggcacttcaggacagaggagctccatcaaatgccccagaaaaatacctgtgtggagtttggggacctcaatgggcgcctgaccagtgtgggcagaagtgctacagttggataagtgtgggtgacaggcaaggtccagcagcccggagctatcacttaaaagagaggaactgtcactaactaatgttgccttccagagaggatggcaaggaagggtggactggttatgactgggaggaggggcatgtcttcaaatacacggggtgggtgttgtctaagtgcaggtgacttcatgggtttgattgcctctgtaaaacatgtatgagtcttcagcaccatagcctcatgacacctttgctcagatagagcagtttgcccctgcacccaaagtcatctccaaaaaatcacaaaaaacaaaacaaaacaaaaagtattttttgttaccaaagaggaaaaaaccagatctgttagaattagtgacgcacgtcctgatatcgcatttatatacattttctttcttttcaggagcaaagtccttgtgttgtcagaaggtttgggagattaaaggcatgtgagaaagcacgaaggcgtgcgtttcaccgtacagttgagaaatgctaatcagttcattaagtttagttgctaataaatagaaggaaacatgtctgctgtgaaacggtcaggaaatgttaatgagcaactagttgagacctcagtaccttgtggataaaagtttaaacttgtttgattccctgctctcaggttggctttcttcctctgcctgtcttcttatgcagggcctcctcacagcgggaagactgccctggctgcaaagattgccgaggaatccaacttccccttcatcaagatctgctcacctgataagatgattggcttctccgagacagccaagtgtcaggccatgaagaaggtatcaagattttgatgttattttaatttccagtctagatgagtgtgtgtacctgcgtacacatgggtacaaagctgtggcccagaactagttatcaccaggaaggacctgagagtaggtggtgactagttcagattctaaaacttcatgaatgcatatttgttgagaatttctttgcctttcagatgtcactgtcttagtacacgtgaacattaattctcacttctttttggtgttgtcttttaaggcagggtttctctgtgagcccctggctgtcctggaaaactctgtcaaccagactggcctcagattgacagagagatctgtctacttcggcctcccgagtgagtgctgggattaaaggcgtggccaccactgcctggctcaattttcacttcttgtcagtgttggtttgattaaagaaagatcacttgagagggtcatgtagaacagaacaaattcattcgagttttgtctctttagttctttatcaatgtgcaaaccaaactgttcagctccgattaaattggaatttaattaattccaattaattaaattaatttggaagaggagaacacattaaaatatggaagcttttcccatgaactcccacatttgtttattgagaagagcctccttaaacccaatgactcctcacccctctccctttaagtgtttgttacctctgagccgttggtggagttagaggggcacagagtagcattgggatcctttggcccacctcacttgcatccctgcaagtaccgagtcagccttctgcagcagccgccgagtgtgcttaaaagtcagagctgagacccttccactcgcccagaagctactgctgatggggacggcctgattttgcagactcttggtccttgttttgtccgagtgagtctggcacatgctctacccctgactctccagcaccctcccactctctcaggcttgggtttccctctacaggcaaccccccaagccaccagcgttggaacccttggaatctggagtcactggacttcataccttatggaagaatgggcaatacttacattgtcctaaaccatctactccatacctgctcacaaccaggagtgtgtgcagacagcgaaggactccattgctttctgctgctgccggctcctacctcgggagtgctctgagatgtgggtggatggtccttgtttttctataaagttttttttttttaagtactttaggcttctgcagatcaaagccaccttgctgagtgtgagatagtatcatttttattattttaatctcttgcaaattgacttgagggggggaaggtaatatgcgctgattttagaggcttaaatggttaaattaatgacttaataacttatgatttaatctttaaattgctgaagcctttcaaggtagaattttagatgagcagaatgctaaggaatataaaactaagagtccataccggcttattcaaaatcattctgatttatgattcaccgtctgcatcatccatgtacacttaaaattaaaaaatatctgctccagcagattaatagtaactctacgttagacttttagttttccttggagtgggggaaatattatttcctgtcactaaactttaggacagagaaaataatgaagcagaggtgtcttagaaacatagactattagaaatatcaccaacctttgctagcacagttttcgcgttacctaatggtgggccgacgaatgcctgagggctcacactggtctaaatgctctaggtctcccaggttgatttcgaaaatgaaccgtaaacgccatccttctccagcccccagttttaatgtgaggaggggaaggggtgttttcacttccttttcagaccacaagtaacttgtaatgctttatcctgaaacaaaaccagttctttcttgtacgtgtcctctctccacatagttattcttagtaccattcctaacagagcggctggagaccgtgagtgggtaagagactggctgctcttcccgaggacacaggttcggtccccagcgtccacagcaggcagctcacaatcacctgtaaccccagctccagctttagggagacctgatgctcctgtcttccacaggcacctccactcatggacccagacatagacacatcatttaaaagtaatacgaatattttttaaatcacttttgttttaatttttttcacagttataaatagcattctatagaattaccaaactagaaaaatcactgctccacattttgttttttaggtttttcttagtttgattagcattacatgactgaatacttgggttttaatgcaaatagacccaaatttgaatcacatctctgtcatacttatggtctctgttaccttgagtaaattattttctctacaagcctttaagcctttggtttttctctataagatgaaggtttgtttagagcatgctggtgcatacctgaatcccagaactctgtaggctgaggcaggagaattgccacatagagatagtgtgtgaactaaatgagatggcaatttatttaaagtaaaatagcatttctgggacagactatgcacttcagtaagtatggtgggcaattttacttactatcgtacagtttctgcttatttctttaggattcagattgctaatattcattactatttttattataaatcttcagttttcacattatagtaagtttacaccatttcccccttctatttcctcccttcttatgcactttcgcctctctccccccttctctctctctctcaacatctttttctttaattgttgatgtgtgtgtatccttctatattcctaaatatataaacacaacctgctcagtgcatatagtgttgcttgtctgtgtgttttctgggctgctgtctggtattggataaccagttggcgttctcttccggtgaagaccatctcagcattgcttagctgcccatagtcctttgtctagggcagcggcccacgagctctcccccttccacgtgagcgtgtctgttgctgtcatccttgttcaggtcaggtttgggcagagatgttggtgaggcttgatgggtttagcttctctgacatttctaggagacacaatttttctggggggggaggggggggaaactttgtcaagattgtttatgcgtattgctatcggatcttttatgtaaagatgctactgatttcccatggcccatcccttcagaaagttccgctaatttacacctgaaaagaatgagtttgtctgcacttttgccccaacttaatgttgttaaatttttctctttcagtttgttaggtaaaaagttggcattcagttatttctttagctacatcttaatgactgtcttgctgactctgggagagtacctacctacctagcacatacaaggcctggtgctttgtctttaatggtgtgtgtgtgtgtgtgtgtgtgtgtgtgtgtgtgtgtgtgtgtacacatgtatttccccaaatgttttatagttataatagtttataagctcagcaataacataagttagctttgttaaatagagtagtctgaattatttcattcagtatctttattaccattttattacttggatgcagtagcagatagtttttatgaggaaagagggccataattacactactacttttttccccaaaatgaaggcaaaaatacgtgaaaatcgtttattctcaattcatttaaatttcaccttgctaccttcttcaataaatcctttctgcacggataaactcagcactgtcaaagcatttatgaagtgttatcctcttgttgggagctgggggaaagccatacgctccaataagacatttgacagatttacagatttttctcctattttatgtttgcttctcaaactttattctgttctaaaattttcattcttgtatccatctttttttttttttgcatctatactgcaaaaatctattttgctgactgttagtgacattggacgaaaagaacacagcagtagaatttggtttcacctaattatgtagtcatgatacctctgagtatacattcagtaccaatataaaatacacaagccagatatcactaatttttttaaacaaaattaaataatgtttatggaccttctattagtaacaggatacttcttattttcaaaggtttgcaaatgaacagaagaaaatttccttcccactagcttttgcgagaaggagataatcttctgtgactatcctgctgtaaatccactgccgactgtagtctgcacagaacggccatggtgctaatcccctcctctcatgcttcagtccgtacaaagagcaaagctggaagctggatctcccgacagcagttactaagcaacagaatcctgatgttttgggttgacatcctaatatatcatggagccgtttcagtggagtttgagcatgcatgagttgagccgtggggtactccagaagtgtccaagggtcctggtggctgtctcctggctttgggtgaacacactgtcatttgcggagtatacagaggaagagcagagctttggggccacgtgacttttagctggtggagcacagagcacaccctctcttggatcaggatagtgaaaaatgtaagactttttcctgaaaagcggggagaacaaataagggattttaaggtcaatcccaaaagcttcagtgctttgccgaaacttgaggtccacttcctgtcagaagacagctgatgtttgcttggtctgctcccaaattatttttagaggccagagattactactgatagtgccaatttaaatctgctcatttacgtttttatatgctaccaaatatgattagcgtgtgctttccactaattgctgacagatttacagcattggggattttctaagtcattagcttcctcttgtcattagatttctgctaactaggctgaggtgcttcacgccagctactccaaaatcgaagggaacccttccagtctccgccagagagagcttagctctacctacttaagtgcactaaagaggttatagaaggggaaggatagaagctccttacagcacactttgctgcggcttgtgactctgaaaggctgggattaacatggagctaataatgcaggcatcctccctggagcgttcaggtcggccagagaagcagctgctgccccgcctctcctcacaggtggctctagcttgtgtgtggagtccaaagctgagtgagctctgtgccttgagctcttgtggtgccctgccccctacccagcctgccccagtcccggttcctcggcttatgctgtatctccagcatcctgtcttggagcccaggtcgtccgtggtctgattgtctcttaggaccctcaggtctgtgttgtactctctgcctttagaagcaagagaggtggtgcagcctgttctgtccacagctggggataggctctgggaatctgttttctggagattatctttatccttcagagcaaatctcatcatttgcacaccaacccagactgtccttccctctggtcctgccgtcctccctctagctcttcctcaggctccccagctgactagaccttgtctctgcaggcttttgcctcacatgctttgcaggactctccctgatgactcaagagtgaccggacgttccttagattggtgtttttggagtctctgaggtatatatatatatatatatatatatctcctagctgcagctttcctgctgactgctgtgtgccccgtgcacgcgtcccatccgctgtgtgttgtactgagggcaggctggggcacctttctaactgggacactttagatgagtttattttctctgtctctttgcttccaatacctcacctcctttttgaattgatttacataaaattacagtagaactttccagctcagtatgtaaatatctcattagatttaggctggcagctaatctcctgtgcttgcccgtcaagcctgagtctcatcttagtgagaactcggctggggcctgggccaggaaacagtttctgagaagactgcacataaatcgtggtgcagtggacgagaaggggactcagcttagaccggtgatgagataaagaggggcctgtgactgcaggaagtgaaagggtgtgtgcgcattcagattagagcagaggagtctgagctaactcgtcaagttacaactggctttggcacagcctttgtcagcgtaagtacatcatcaagacagccgtgcatgctcctctgtgtaacactcgcactaagagctggttattcctctaaaaatacaggtacacttgctgttaaatgaatactattggtctttttcttctcaagtgttccaggcagcctatataatgaactgtgatgtccctaagttgtttccactacataacaaaaaaccaactgttcacacacacacacacacacacacacacacacacacacacacttttaagaggccctcatgtaacccctagcctcaggctttctgatatggcgtggtggacactggcttagttctgaacttgctgaccccacctcccagggcctggggtcccaggtgggcatcatcacaccaggcccacagatgcctggagtttgctgtagtaaagtttgctctgtaagttacaagttgccttgagaaaggagaagcactgagtcaaagagagtgtgcagcggcagcagccagccaggccctgtggcgcgtcccgtccccgtccccgtcccccccccccccggcttccttcactcttaacctatgattccatagcttgaatgatagacctgttttcctgcctctaaacctttagtagatctctgaaaacatgtttgccaagcaaagtttagttattagagattccctgagttcacacaatatgacaatggctttaataccaatccagactttggaaatagctaagaaccgctgctaccaagcctttctgtggcctggaactcactaactccaagccagaaagaagtaactgtcaggaagctgaacccctcttcatcccattatcccccaaccctagctggctaggatggggcaggctagccttcatgcacatatactcagcatccattcccaaagcaatgagtttttgactcctgtttctctcttatcacagcactcatcctcagatcagcctctttctgccccccagataccatagcatctgccgccttttccatacaccgacttcccacaccatctcttacctgacactccagagtcccaaactggaaaatgttcctaaaatgtaaaactcacatctcagcgcattgctttaaaacttaatagtggatttttttaaattgcttgtacaataaattttagctcgcagaaaattttaaggtcctctaggtcaagctggatgtgctggcacatggccttaatcccagcatagggaggcagaggcaagtacatctcttaattcaaggccaacctggtctacgtattgagttccaaggcagccagggctacatggtaacatcccgtttgattatgccttgcttcgtggtttgaaagatgctgggtgtccatttttttcagtccctcctgagcctcacccctcacccacatcgatactgtcacgtttccatttcatcagctaaacaccagttggttgctataacagctttcctgatttttaaatttttttttttaagacaaggtttctctgtgtagccctcgctgtcctggaactcactctgtagaccaggctggtctcgaactcagaaatccacctgcctctgcctcccaagtgctggaattaaaggcacgtaccacctctgcccagctagctttcctgaattttgtcttctctggacatgacagtcagtgtaatcataatacattctgtgtttttagatttgggcttaaatgtcttttttttttttttttttttttttaatttgggagcctacccttgtcccctacctacctttgtggcttgggataacttcagctctgctgcaataaggagcacccccaaattcaatgccatggcacagtgcactgtttcttatctgtgtaggacatgtgtgcatcatggctcagaaggtgaccctcgctcactgtagcttctcagagactcaaccgagttggtaatgtggggctctgtggcatccaggacaggaaaaggactatggtggctcatggcgtgactctctctgaagccttctctcagacaggcctcttcacagtacacaggacctttcccctttcaccactctaagttctggcaggtcacttatctgcctcactgttctcttccgtggcttcattaacacttggcgaatgaaagagttaataagcatttgttgtgcatgaatgaaatgactgaatgactgtaatgttaacacttcctactgcagcctccctagtactgtgtcctttttcctctgccaccttttcctgaaagtcccatccagccaagcgttcacttgccactatcctgagagcatttcctcagcctgacttcagttggacatccaactacctacttgatatttctgctgcatatttttaaagcactaataataataacaataataataataataataaataattaccattattattattaattgttgatgtttgagatagggtttctctgtttaacactatctgtctggaactcactctgtagaccaggctggtctcaaactcagagattcacccgcctctgcctccggagtgctgatattgaagggatgcgccaccacagcctagctataaatttacttttttaacaaacacttgttgtttttctggcgagcattatattagttgatagaggatctagagctaatgaaacatacttgctttctgggtttttacagcctagtgtaatatatgggaaactgtagtgagtccacaatacatgcacagtatataaaatgctggggcaacagaataaagaaaaatgatgcggacaaggttgactcggagcttgtgaatctgccgagcagacatctttactgtcgtgtgctgggtgctaaaggtgttatgaacagagcaatgtttttagccacttcacattccagtgaggagactggtagctaaggaggaagtagagccttgacacagcacgggactatgttacgtatcaggctcttcctggggagatacacacacgtgcacgtatgcgtgtgcacacacactgatgaaccagtgagttttactgcagttacttaaagtttgagtgtgggtgacaggttactctcaagagcagaaattactcaacaacagccacatcaccaaaaggccacctcagcctgggtgacagctccctagagctggaaggctgtgcacactgcatagcctgcaggcctggaacactatacagcctgcaggcctggggcacactgcgcagcctgcaggcctggggcacactgcacagcctgcaggccaggaacactacacagcctgcaggccagggacactacacagcctgcaggcctggaacactacacagcctgcaggcctggaacactacacagcctgcaggtctggggcacactgcacggcctgcaggcaactctacaggttgcagtcttttccaggtggtacaattggttgggctgagccttttccaggctgtgggacttctttgcctcctggaaggttgcttatctgagaatcctctttgcagcatggcttgtgaaaatcaaaatcaccaattgtctcctgtttagatggtcttttggaggaaggggcctagcagagctggtcagattcagggacttcatgaggctgtattgagtcgtttatatcctttcttaagaggcttctctggagaatggagtgtttcagcctagaaggaaactgctagatagatagagacaggacagatagcaagcgtaaagggcatggaccaacagaaagcccttctactagaggggctgatctgactaactatgtggagatggaaatcgttagtgtttatgccatggaagaggtaacaaggaactgtgttaaatggtgacagcaggaacctccacagtagcctttcttcaccgttaagggttctgtaaggaccaaggatatacaggttagttttaagtttaaaatgaaaattattagtattagtttaactaacttaatttctatacttaattctaaatcttctttggtttaaagatacccaccatggactattgtgccacctaaagcgtgttatgtgttggggctgggccgttttctgccaccgtggtccaccaaggttacatacatatcaaccagagagattaggtgggctgcggagatcaatctgtactctggtgccccgtgccccattcacagtgtctaaaagggacctgccatcattcataagaggctggcctgaaggccatgggcacttagctctgccttccacatcgacagcttcttctgacgtgacgctgctaccctacggtcaccagggcataaccacttcctttctgctttaattcgctgactgtttttgtccaccttcctgtgttgtcccaagcaagtcatttaagtgctttcagtttgccgagtgttcttcaagttctacagtcctgtaatctattaatgtattttagcctgggcatcagtgccacgctgtgttttgttcaggcgtcgttcaagaattaaccaaatgtaacagggcatcgtggtgcacttttaatcccagtattcaggaggcagaggcaggtgaatgcctgagttcaaggccagcctggtctcttcagtgagtttcccatgtcaaaaaaaagggggaaaaaattaaccacacttaatcttctttggattgcccttactgtgggagacagtgaggtggtcacacatggttttctttcttccagatctttgatgatgcttacaaatctcagctcagctgtgtggtcgtggatgacattgagaggctgctcggtgagtctgaactcggccatacgataaagtccctgtctaacagggactatagcagcgtctcttatatgacatcagcagtcaggatgagctagctgcctcgttttctccagtgtgtcctgtccataataaatgagcaatgtagaataataaatactgaagttctgaaaatgaaaaaaaaaacttattaaacatctgaggttgaggtacagtgggttcaaagatgaaaacttagtcccgagatggctcagccgttaaaggtagggctcccaatccaaaatagaagaaatattctagcaaatgtcgggaaagcttgttactttcacattttgttcactgtgaattcagtcagtctgtgatgtatcatgatgacagtagatcagaatgagatagacaccattgaaacagaaatatctggggaacctcataaacaccaaggagaccgcccagcagtggctgctactaatggtgccgtgatgctctcaggctaactgctccccgcttccagccttacgctggcgcatctgctttttgtttcttaagttttggtaatgcttattgtaaaacaaagcaagtatatatatctctgaggcctctttaaattaatagtgtctacctaatggccaggattggaggtgcgccatgtttgggccatctcagttcattctataggattatttctttgagaacgttagtcatgttcattgttctgtgtagattcctttatctgagcacagtcagcagaagtggtcatagcaacacactgccaagagtttgtgccctctgaggagattttcactttatgaagttattttttttgtacttgtatgtttatttattcaagtactagcactgtgttagaatgactggtgttctagaaggatctcagtaaaatatactacctaacctttataacatacattgacaaaaaaataataataataaaataaagtcagaaaaaccttgacttcgcgggcttgatgcctacagggctccacgtacaggagatgggcaggcagaaagagcgagggaagtggcttcaggccgacgtgtcccaaggtagaaagttctctaactgcctgctctgccttctcggaaggccaacctgagcactctccattcccgaagttatgttatcgtttcttttcgtatcctgttcagctccacctttctcctcctggagtctccaccaccgagccacgtcccagcccctttctacctatgcttggtgtcaaactttgtccccagcgtaatatatgtaaatgcgccatggtggtttgtggtaatttcttagaaatgcttgttaaatacacctggatgtcctctcccttagaagatggtctctgaagaccagaaagcacggctacacgaaccaaagtggatgtttagcttttttaaatgtacagacacatccttctgtaccttgttgagaatgtcgagtatgaaggtgtcttttctcgtggcagagctgattttacccagcatgcttggatgtgtgccccaagctctccatccctcaaccacagccatgtttctctttcagattatgtccccattggtccccggttctccaacctggtattgcaggctcttcttgtgttactgaaaaaggcgcctcctcaggtaaattagtagtaacaagacttcgtatacagtgggacactccgaatatgtaggttatcatagactacagttctgttgtagcgttctggaaggcccatctgatctagccttctgtcttaaggtaaattgtgtttcttaaacaaacagttatctactttattctgtgtgcattggtgttttgctgcatgtatgtcggtatgaggatatcagatcccctgtaactgaggtaccatgtgggtgctggggaattgaacctggggccatctctccagcctgtaaattgtttacttaacagatgttttttttttttcttttccttttctgaaaatatcaggatccgacagtttcagttagtgttagatcttgttctgtaaattccccagcaaccttccgtatccttaagtcatcacctccagagggagatagatggtgatgcagatgtagagggtgacctgaaattgattctcctgtcatgctctgcccttaaggaacagggctggcatctccattcatctgctcacatctttactgatgtggctgctggaggtggtgattctggcgcctaaacaaatgcagaagcatcctgtgagggtcaggccttacttatggaggtctccagagaagcttggctgcgccacaagacagattttctaggttggctctatgtggtaggatgttgagacgtgccagtcacagggagacaggaagagagtgagcagtcatttgaaaacatcttagtgtccgtatggaagtctcatatgcaatatgcagaggaagaaataattaaattagtttatgactctaatatgtaatttaacagtagaaaatatacatccatattttgtgcttgaagactggtctcgattttctaggtttttagtgcttcttaaaaattttctaaagtcataaaagatacataacagcctcaaattttttcattatatgcaatatgaaaggttttttgtttttatttttgttttgtttcctgtgctgagaatcaaacccagggctccctgcatactagtcaagttctctaccactagtcaatagtttctcttttgattttgagatggggttctcagtgttgcccagactccctcaaattcctggacttgaatgactctcctagactctcctaccttagcctattgaagctttctctctgctaaggctgaagtcaagagaagtattttctgccttctctagattcctcccatttctaaatagatgaatatgactacagttgctaaaacaaatagcttctatatactcactgttatttaaggagctagcatatttaaaatttttagaataggagagattgttcaggcatttaaatatttttattatatattcagctttttgtttaaaagtactttatgtgaaaattcacttaggagaaaaattaatagctttccaatattattttaaaatttctcctttacctggtcacatgctatccatgctagtttaaataaagatatatgtttcttccttgaaagcttttcctattcaaaatgacataagtagaaaaatattaacaaatggtatggttttaaatgttttaaatatcatttcattatacgtgtaattgggggcacacgccatagggccctgtggaggaggccagaggacagacttttgggcttagttctctccattcacctttaagcgggtttttaggattaagcctgggccacaaggcttctgtaaagcacctttaccccaaccttcttgctgcatttccattcgagactaaagaatcactgtttcggtttcttaaaatagttgtaagactctaagggagggaaatgtatcttatacttctaagtctcacagcatacacgcacacacacacaaacacacacacagtgtacacgcgcacacacacacacacacacacacacacagcgtaaacacacacacacacacatccttcctagttcattccacaaacacaccgagcacatacatacagcgatgtatgcattgtcttgcattgatggccttaggttataaaacaagatataattcatggaaaaacattaaaaatagatgggggcaccccctttaatcccagcactcaggaggcagaggcaggcagatttcttgagtttgaggccagcctcatctcaaagcaagttccaggagcagccaggactacacacagagaaaccacctcttaaaccagcaaactttaggagccagcaaatggctcagcagatggaggttctgcactgcaagcctgaggtcagatagatagagggaccgcagtacaagcctgaggtcagatagatagagggaccgcagtacaagcctgaggtcagatagatagagggaccgcagtacaagcctgaggtcactccctcactccccacaaatccacaacaaggtcgaaggggaaagccagttacacaaaggagtcctctgacctcacatttataacccatggtacacagtctcccccatctctcacacacacacacacacacacacacacacacacacacacacacacatgcataccacatgcacacacatacactcacacaccttcatttttaaaaaaaatttatgtgaaattcaaatgactacttaacacatgagtaaatcattcatattatcgtttatcagggactgtaaatcaagaccaacacagtgaaattctttgtgttttggattatagatgactatcatccaaaagtcagataaaaataagtgttagtgaggagttagaaggaattggaaaccttacaaactgttaataaggtttaaaatctgttgcctttgggaaagtttagccgttcctcaaaaggttcaacttgaagtgaggtgccccatcagttcagtgctagaatacaaataaaataaaggagagcacatgtcggcaccaaggcttgcttgttcccagcaagatgattcagagaaacctaagaggaaaccactatgagtctaagtagaatgaaatctaataaagttacaaagtggaatattattcagcaatgaaaattcactcagatcatacttctacagaaatggaccttgaaaatgtgctcacaaaagaccacataccttctttccttcttccttccctccctcttttcctccctctctccttccttcccccctcctcctccttccttcctcctttcttcttcttcttccttcctcctttcttcttcttcttccttcctcctttcttcttcgtcttcttcttcttcttcttcttcttcttcttcttcttcttcttcttcttcttcttcttcttcttcttcttcttcttcttcttctccttcttcttctcctcctcctcctcctcctcctccttctctctctctctctctctctctctctctctctctctctctctctctctctctcagatctatttattttactttatatgtatgagtgctttgcatgcacatctctgtgcactgtgtttgtgactggtacccacagagaccagaagggagcagaagttcccttggaattggagttagagatggttgaagccaccatgtgggtgctgggaatcaaacttgggtccctcatcaagggcagccagggcctaaactgctgaaccacctctccagcccctatttctatgaagtgtctacagttggccattctgtagagatagaaagtatattatcagtggttgccgcaggagcggggggtgggggtgggagggggcagctggattgggagaattagaggcaactgctaatgtgtgtgggattctccttgaagagatgaaaatattctaagataagtgtggtaacaggtgcccacatctgtgaacggactgaaaactgttgatttacacactttaagttattgagccgtgtgctttgcaaattatatccaataaaatggtcacatttttaagctgtgtaaaggatgaaagaagaattctatagagggttaaagtaaagggcaagccaccagggtaggtggagaaatcccagcttgggagcgctcttacacccagcaaccggatcattaaaaaggactgtgaaatagatttctctaagaagtaaagatgtatgtaagaagtgagaaacctggttgccttagtgacagggactggcagggactctcttttaagggaacactggcctgtcattagtcagaatttggtgactgaccccagctgccaggtgacctgctgcatcagggactttgtggcagaaaggcattagtcttgggaatatttctgcttggcgcaagtttaacagaataaaaacatgcctggtctgcatgacctcgctttgtaaatgcgtcgtacattgtactcaggaaagtgaagccgctttgtaagctgctccagtgttggggatgctggtgacagccacttgggcaagccagtgagtgccccatggggttttcaatttaacgttaaagctagaggctgagagtcaggtagagagtgtgggtcacagaaagctgttcttcttggcaagaagacagaagctgtgggcagccttctttagagagcaccgcatcttaccagacagccgtcgtggcagtcgcaggagccttaatttcccatttgttgtcattccagctttctagtagaaatattgtgtgtgcatgtgtgcacatgctccgatggaagaatcccccagggcgggtgttgttctgtatccagatactccctttccgcttcccctcccccacccctcccctcttgtaaattggcttattaaaactgggtctcaagccctcctttttttccctttgtgatctccttgttcttggattttcggtgtagaactaaaaattcaaggcagatttcagttactgggataattttctttgaatttaattttttttctaagcaaatgcatagatttttaatgaacctggtatccagggggtttgctttaaatttatctgggcagttactaccatgattgatttattagtcctttgaaagtataaaaagtggtatcggtagttgatgaaaactgagaaacatcatcacattttgtttagcatctttttaaaaccaattaaaagcttttctaaaatggattgaacaggagaaaataaaacatgttccctaggtctttatttcaatcaagtttcccctgtgttctgcgggagaagagatcgaggcgggatagaaaggctgaaaagggctgtcccagcagggagccgagctggagaaaaggcttctctgagaactccgccgggagcagctctgaaagctcccagccggcttcatctacatgcagagtcacacaaggcatgggggcgctcaccggcacacagaggctccacatgtgcctccctgctgattcctgtgaaaagctaacaattggcttggagggtaaaagaccactgcagttcaccctccctgggctggacgtacaatttgtccagtgttaggaaatgtccggcttagcagtgagaggcttgaagccggccctccttgcagtgagatcctaatgctgggcttttactccatgacactggggctcttttcaaggtctgcagatttatggaagttgggggggggtgcttttccagatcggaaggataaaagcggaggtctgcacgtcagggaggagcccagggaagagggaaggccaggtgaactgccggcatcagcagccctcagccctgccggcggccagccggggctttaacgtttcctcttgggtctcttgacactacacttaaaacaatagctttatcctttgggagacaagaaccgtaaaacaacatgatttcccggtttcctcaacaagtccaagggcatttgagtcattaattggcttcttgattctgggtgttcctgatgtttggggtcatcctggaagccccatatgaacagagtagaatagagagtagatagaatagccttgccgtgcctggagaaccaatactttttcagtgcctcccaaccttctttttggttttgttgttgttgttgttgttgttgttttcgagacagggtttctctgtgtagccctggctgtcctggaactcactctgtagaccaggctggcctcgaactcagaaatccgcctgcctctgcctcccgagtgctgggattaaaggcgtgcgccaccaccgcccccaaccttcttttattatggcatatagaaaatggcacccgattgtacatgtggataggttgccacggaacactcaaaactggccagggcccatttaccaggtatcctttgccttctcagctgatgggcatcaacacattaattcatatatgactcgtttgtgtcatatcaatagtataatctctggaaactataaactataaaaaagaatatccaaattgatagcagtatcactgaagtaaaactcagacctaatagttaaaagtttaaactgagttcaattataagaactcaattgctctgaagcctaggaatgcgttgttgttgttgttgttgaggaaagcaagcagggtgtgcaagtgcactcttatactcctaacctcaaggaaacaggcaggagaattgtaagtttaaggccagcctgggctacattgtgaaaccttgtcttaggaagaagaaaaaagggtaggtgtggtgggatatacacacatatataatcctagcccttgggagatagaagcaggaggactagaagttcaaggctctcctcagctgtatagactgttccggatcagcctgggctacaggagttcctttcccaaaaaaaggtatgaagaggatgatatggtcagggcataactgggccaatgaaaaaaactatagctaggcaggcagtaatctacagtaactctttagaagagttttcaataaaatattatttataaaaggaaaaaaaactatagctctctagattggcatctgtgtttcttgtgaatttgattttagcagcagaagtctatagacagcactggttttatgtagttctcatgggacatttcggtatagtcttgccatagctgtgatattggggaggtcttgctaatattaggcaacgcttcaggctttgagttgctttagtgaataaacagataatggaagactccaaaccctacaggcctaaacacgagagtctttctatctatctgtttaaaattaactctggctaatgactacaggatgactcaataagatgtataaccactccaggaaagaggtgtagtcattttgccagatgcattcattgtaactacttgacagggtgacttctacagtggactttttttttttttttttttttttgagttatgactgacagttcagtgacctaatttttccatttgttaagtcaacgatattatgtagttactatgttttataaaactattttatatgcacttttcttagaatagtaggttttcttagaaagctacatgtacattgaatgaaatatattaagtatagattagtttcaaatgtatcaaaaatagtaaaaacatttgatgagcccttttataagacattgttacaaatatctgctgggcaagtatctcaaagggtttttttttaattgtttttggaacaatacatctatggtgggcattaattaataccaaaatcagtattgtgtgtgtgtgtgagaaagcatgtttgtgtgtatgagcgtgtatgtgcacaggcttgtgttataaatctattctaataactcagaatatgtaaatttttatcaacagagaaatgttaattaaaaatgtgcctcatggccagaacttagccttactctctctcatcccaggtaagatgccccactatggcaccggctctggaggggctgtacacagcacctaacattcactggggccattcacctccttggagcaccttctctgtagaactcaccctttgtggcagggttagggtcctaaatcctaaattcaagtcttgactcagacaccttctggcattattgccttaagctggcatcttagtttctctgtgcatatttctttatctgtaaaagtagaaagaattattcttcttttcctatcttatagagggtcaactaagatattacatactgaaggcctttgtaaatgtgtgaattgtaaccatataagatactaaagcaaagaaggtccgtatgctgtggacctcttcagctggtgagatagacagctggggaatgcacctgctatgtagaggaaatgcccacagagaaagctcagagttccagcttgtatcccctcctgtgcagtactcagaagggaaatgggcgggcctctagcctctgtccacattcagtaagatttgtaagctaagtcctaagacaaatgcacctgtctgaatattagagatttttgttataaaagacatatagagacaagaatttcagaactcgataaggcgggggtgggagtcgggttggcaggcatctagtcaccgaggcccaagaacacggctggctatacttgttttgactcacctgttgccattcctgaggcccctggaggctgtgacctttctcccagctcctaacacaattggatggcaaatcgttttctctcatgtgtccctgtgcctaaaaccaggacacagatctccaagcatccctggggcttcatgccatgcagtttgtgctgaacagccattgggtaagagccaactataattataaagggctaggacagtctgtcaggattcctggtgtttactggaaggtaaatagaactggaacttgaggttttaagtcacagtgtttgtaaaccacacactgacagctctcccggtcacactggggaggacaaagagtcctcactgggtgtgacccaggctgccatctacctgatacatgcacacacacacacagagacatacacagacatgcacacgaaaatagcctgggctatatagtaagacctatttcaaaaataaataaataaaataaatcataaggggtggagcacatattcccaaactgtcataattgcctttccatcagttggcctccaacttttctgcatacatgcccatactggaacaaacaagaaaaattgggctaagtatccccgaaattttcaaacaagcattatgttatgagatggtatccacagtaaaacaccaaaagagcaatatcgtacgataacagaaactctaccgtacggtgccggaaactctaccgttccatcctaagcactgctaccctccccagtggttacgtggcagggagctttttctgcctcgttttttgtttttttgttttgttttgtttttgttttttcagttttttgaaataggggttctctgtagccctggctggcctcgaactcagaggtctgcctgcctctgcctccccagtgctggaaatgaaggcatgtgtgccgccaccacctggcttaggaatagtaaaattttaaagtttatagatagctattttcatttttagccagcagccttcttctttgttttgtttatgttgtttcctttgttgactaggctcttttgtagctcaggatggccttcaacagcagctgcatctggcctgttggaatgtgtgtgacatgtatccctagccttgcattcctttctgatgaatgttataatgtctgtaaggttctctgtggtggccggaggaccctccactctcatagctgaccttagcttccttcagtgctgtgcctcccatccgaagggctgatggttaacacccacatagctaaaggtgaccaagataagtgacagttgttgtgtctcatgaacatggggaggttgttttttccatctgtaacatttctaggcatgcaaggttggaacactaccttaaggaacacccactttgttcgaatgcacaggtgatgactattctacagtatagaaagggaggctgcataggatgctccgctcagttgtggggtgagggtgaggtgcgcaccacgtaacacaagtggcacccacggtctagcctggcacggggctgaggttgtcctcggggaggctgccaggtggcttccttcaatctgatttttttaaaaaagatatcaaacaagttctcagtgccccggaaccccgtgtatgggacaggcttacttatcctgggggttgcatggcaaccccaagcctgaggaagaggaaggtgcttgcctcctcacacagggtgacagcctggagagcagggcaagtgcgctgggtttgcccagaccccgctggctgtcctttccaggctctgtactcaggagttcactgctcttgtccctgccgctggttttccggttcacacagaggctggtgcccctgtcactggatagtgacaaagatgtacctgtgcccaagttagcagggtgtcgtagcctttcatacaaagatttgtgggaatgtgaagatatgttttgagtacagtaaaccatcttagactccatgtgacctgttcagttttactggggacaaggacagaattcataagaaagcaaggacttcaattttttaacccaagcatatttttttctgtgtgttttgatctcgtgtacttctggtgcccccagaaatacacaagactgtccgcagaggagggcactagatcttctggaacttgggttacagatagctgtgggtgctgggggttgagccagggtcctctgtaagagcagccatttaacaagcgagcatcatctctcctgcacccaaagtgtattcttatttatacttgctgggtgacgatggcacacacccttagtcccagcgctcaggaggcagagacaggcagatctctgtgagttcgagaccagcctggtctacaaagtgagttccaggacagccacagctgttatgcagaagaaatcctgtcttgataaaaacaaaaaccaagttatactttcagactttccaaacaagaaatttttaagaggaaatgtttgctgagtatatttttggtatctgaggtaaaatatgctgaacaccttggatgacactggtgacagtaaggattgtcattgccaccatgtgtaggtgtgctcagcaaggcatgttggcatattcagactgcacgtggcagtcaccagggagagccacgtgccctgtgtgttaagagtcctatacctggttccttggtgacattgctgatagctgctaccttcaggtctccagtgaagtcacctgccagtctctgaaagtccctcactagtttgatgcttctgtctgagagaaccaagggggacagccaataggggtcagggatgtcttacagcgagagtctcgaggctttggtattagaggcaggggagctttgtccatgggtaaatactgcgtaaatatttagagtcttatttattattgctataaagatggatgtgtcaccatagtcaacctaagaagccaccacttttaattgtaaaaaaaattacccaggtgtggtggagcacacctttaatcccagcactcaggaggcagaggcagggggatttcagagtttgaggctagcctggtctacagagtgagttccaggacagccagggctatacagagaaaccctatctcaaaaaacaaaaacaaaaaaaaaattaaaatgagcccctcaaagtctttagaggcctctctctgctgctatgcctagcaggtaagttgtaaggctgactaaaccttatactcacattcagccctagacactctttgcttctttcttagttcctgagttctgagtaattgaaatcgtttagcaggttgtctcttcacaggtcaggtgttattactagacacactgaattttgttctgtggttaattgaggaccgagtaccggggaagaaaggttctgagatacagacatggtacagttacacactggcatgaaaatcccaacagctgtgtaaaaagagaggttccctgagtgaaccccacagaggtggaagtaaggttagaaagaacagccgtgggctggtgagatggctcagtgggtaggagcacccgactgctcttccgaaggtccggagttcaaatcccagcaaccacatggtggctcacaaccatccgtaatgagatctgactccctcttctggagtgtctgaggacagctacggtgtacttacatttaataaataaataaatctttaaaaaaaaaaaaaaaaaaaaaaaaagaaagaacagccgtgcattcagaaggggaggagggggcaggtggaggaggccacttacaaataccacactggaaggtgagctgggtgcctgggtccagaactggactggctcaacaccctccggaagaagtatctacacaaaccattgcttttggcgttaagaacagtgtggcatggtcactacaactttattttcttgagttatttattcttttctgctaagagttcagaggtcatcatttctaggagatctatctcccaaacttgtaattagtaggacagctattttagacacaggtttaaaatcatacatggtatcaggtgttgtggtgcgtgtccctttaatctcaacactggggaggcagagactagaggatctctgagttctaggccatcctggtctacaaagcaggttccagggctacgacgaagagaaaccttgcctcaaaaaaccaataaataaacaaaattgctcatggtggcacttctaactgtgaaggccccaggtttaatttccaatcacaaaacaaataaatgagcagtcaacaacagatcccataaagttaaggaaaattagccagcctgagcccctgggccagccctttctggagctaagagcccagacacatcacctccccgccaggttcctcagctactgaaggaagaagaataagaaggcaggccgcttctccaagtgtaagatgaggtgagccgggtctttcttgtaacttgcttccacggattcttgagtatgtggagttgtctgcttttgcccacttgagactcccatgagtgcgagtgccttccttttgtcccctgctctgctttacagcaccaggccagctacaaagggctaggcaaagaatttgctccagggtaaagtctaatggagaacttaagtgtagttgtctgcctagttacagcatgatttattcggaacatccttcctttggtattcaacttcagcatttaactaaaggagaaggaaaaggaaaataaaaaagggaagaagagttcaaagaaaaggagccatggttgagccatgatctcaaatgcaggctggccaaacaaaaactgaactgggagcctcattcattcattcaacacatatttattaactgccccctgcacaaggccccgtgttagccctggttagttcagtaacactaaacaaacctcagccctgcctcacaaaagactcgtgagacatgcaataataggtaaatacaggagtgagtcaaatagatatataaacgatgatccgatcaagggacaaaggagcatggggaaggaagcatggtgggtgtggagcttgagtagctacagaaaagctgacattcaagcaagcgcttgacaagggaaagagccatgctgatagggagaggggaaatggcctgtactgcaccttcgtgtgccaggcagctgggcccaagagcttcagagactgagcacatgagcatagagggcccagatctgtaagatggctcagtgaaggaagccacaggggcaggcagaatagttcttaaggtttcagtagcgaataatacaagccaactaaaaacgaaaattgttcccttcccaagaaacaaaccagaaaaaggaaaagacgaaaacactctctgtagggaaagcttcctgctggcctctgtcctgagctaagttctcaccctcacaagttactggctctcacagaccccactacagtgactcctaccaagagggtgtgtggcctgagcctcattggcaccccaggctgagtattgggaccctgtcccacctatgcaaagcaagcctggtgcctgggagcatgcttgtcccaagtcactgctagagtccctagtgttggaaaataaccttgtccttcctactgctcacttgcctgacctaacgtgacccctgatcttccgtgctcccctgggaagcaccactgcacacccttgctttctctccttcctgactgttgggacagtgatgtcggagagcaccgtccccagtatgctttatcttacacataggttcttgtcccttttctcctgcacaagctcctcagccttcaggagaactccactgctcccctcccccggtcccacccaggctggcttcagaagcaccccaggatgtataagccatgggctaaatgggtgctggaccctacttggggagttttaccctgaactggcatggcatccctgtggcttgtttatcccaggccacaagaggagagcatctcacgggcacatgccaggagtctttctctctgccacagtcctttctccttagggcctgcttttggtttctcctgatgctttttatattaaacttcccttccttccgatagcattctgagcctgcctttttgttggctgccctcctgtccccagagagatctgctgttgtggcatagctgtttccaccaaccacatgggtggtggcattagcgacctgtcctgccacagtgcctcctgtcactggccttgcagctcaccctagttggagctgcaaggtctccacagccattgccacttgatggttgctgctatgtgacttggtagtagccccccgggtgctgaccagccagtgtcccaactaaattaaaattactctgaaggtgcaaactaaataattcaccatccacgtattcttgttcatgttccaatgagcaaatgttaatttcaccttttactcactgggtttacaaaattcttaatattccaactcttcagtcttttacaaaaatgccaggttgtaatcattagaaaacattgaaggcccatcgcacatggcacttctgaaccttgctttcaaactcacttcttaatccatcccagggtttctgattgttccgggttcattcttctttccgagggtgtgttccatttgctgcattcaatggtaagaaaggcctttctctcccgcatagctggcttcgctgctgttgggggtgaagccagcccttccatttcactgcagatattatattagtggcatttttttatttaggaaaaaaaaaagcagctttattccgcatgaacttttgttacaaatcagttgattggggcccaatcaatggcagaactctgaaagggtgtggattatctggttagccctttgtgtggcaaaaggcttagatgatgctcagtgcttgcccattcttcatgctgtaaagaagtgggtctcagaaggatcagcacctgaccgagccctgccttttttcatggtaatgttttcacctgagttgctccttagagcactaagacttggttaactaatacttatttaaccttggaacaatgttcatcgtaatccgattggcaaatagtcattttatttcagcctttttttgtgtcccatcgggaccagcaaatctctgtagagtatgcccagggagcgagggagcaactccctgccccctacataggttattgttactgttctctctctctcttctctctttcttccatggggtatgtctgggtactgtggactttaaaccagtagccacacattagcaagatggagtttcccctttgggtggaaactgcctcttctaaagccgctctcccatcacatggcgctggcggttcccgccctccagatgtgacccagtgtggttggttccctgcgttagtacatccgcaactgtttttccatagaacgcttccagttgcacattaccactaatgaatacgtagaacaacccagcacaatttaatgatttggtaatgtttttcagtgttttcttaaagatgatgctttacaagtcaaggcctgagctggcctgggtcgtgacctcaccacagagtttgcagtcttgttaaacaagaagacaggcaaaacataaattagcgtctccattataagttaccccacacttcccaatctttcaacactctgaagacattgaagtcgctgtaggagaaagttccttgaggaagatggtggtggatggaaacaagtccagctttctgttgtgagccaggagtttgtgcagagctgctctttgagggaggccactgtttctttctgagaagagagagataaggatgctcagaacccagcgggagggagaagcagctactttcttaagctgtgatgagccagaagaccaggacagaagcatcaccgagctcagggatgaaggccagccttggcacacggccagacactgtcaaaactgtaatgattgtaataaaaactgcctgccgcagcattggtatctcttagctctagagaccatgttccaaagttagcattagaattattgtttgtttgttttttagtataaaatgtttttagtataaaagccttttttgttatagtagtaatactgtgtgtgtgtgtgtgtgtgtgtgtgtgattacctcagcacccagcttttatttttgcctttggacttttgctcactctgacttaggccctcaccatcttctaaaccagcttagccattttacaagacttggcctacaggcaggtggtaatggcacacacctttagtcccagcactcgggaagaagaggcagttgaatctctgtgagttcgaggccagcctggtctacagagtgagttctaggccagccagggatacacagagaaaccctgcctcaaaaccaaatcgaagaagaaagaaaggaaggaaagaaaggaaaggacaagaaaggaaagatgtggcctgtggctccctccctgcagagatggcattttcctctggcagacccctcccctgggtgtaggctgcctcctctctgtgcagcacagtctttgggtttgctgttgtcgcctttattctcttacttctctggtcaaggtcattccgaagtcactcaggagcttgccaaatgtctggtgataagcatttgacctttttggttaatggttggttggtttgtttcttttaagttgatttattgactagcaataatgattagcctttaatctgtatacatcacaaataaatttctacattggaatctttgcacattcgatctgtaaaaccaaggagctcttagtgtcaagaggggttctgcctgtgtgtctgtactgtggggcttatgtgtacacacgtgaatatgctacaacttgaacctcgtccctatgcatgctaggcaagcgctctcctagtgacccgtagccccgcctcctccttgaggtggtgcatggttgtgctaaaacagtgagcgagcaagattgagggaagcacccttgctttgctgacaattagcaacataatgtgtacaaagcccaagctggagggtttgaaagtttttgggggagcatgagggattgttttagacacagggtctcactaggaagccctggctagcctggaatacactatgaagaccaatctggcagaggcaagcagattcctgtgagttcgaggccagccacagctgcataatgagaccctgtctaaaacaaagacctacttcccatcacaggactgaactatagtgtacatttggtgtctctggctttggtttggtgttccagttccactgggcccttgttgcctgggatcaggggaaaaaggcctgcttcattgttgctgtttctgttacgtcatctatgccttgtttagagtttaatttggaaaatcctgggttttgtatgttttgcctgctttgtatcatacacaaataagtggaccctgctcatttcagtcaagcctcccctggtctcctcactagtgtttttctgtatgtaactcatctgtctcaatgaccagggccgcaagcttcttatcatcgggaccaccagccgcaaagatgtcctgcaggaaatggagatgctgaacgccttcagcaccaccatccacgtgcccaacattgccacaggagagcagctgctggaagctctggaggtaaagacgagtcactgtttggaactgtgtatcagaaaggagttgaggcccgagatacctcagaaggatcccctggcaaagcagctgtcacttagtagcacacttagctagagtgggaccccggggtgttcccgccaaagcttctcagaagctagaaagagaaggggattcaaagacgaacagataaacttcttgttcctggtgtgggcagcacatgtactgcaggggccattcactctctttccagcatgcattggtactcccagatgacactgcaggggctcactgggatccacacagtgtggcataatcactatttcttcacaatggctggcagcacacttctttgcatttaataaactagaacaatgattaaagcctttggaactaccaaaaagaaaaaagaaaagaacgctacccaaacctcacaactttataatgtggaaatgtttccttttttttttttttttttttttgaagatgataaagcctttaattaaaaaaagtgagtcttcgagtgagtgttgattaatattaatgtgcacagatgactagatgggatctgatggaaaaggtgatgtaagttattcggtgtggtcgagtcggggaggctgcctaaaggctccacaacttcagagttgccgtgggctcccaacagagcagacgccaacagcatgagaagtgtgcctgggtcacctgtctgaacaccctgttgtagttgggaaagagaaaagaccagcgtactttgacacatacgaactgcgcccaggaaggaatgctaacacgtttaacttgtatttatcatagattggagctgttttccctaggaaacgcgtctctcagtttagtgatggtcccttagaaaaacagcataagatttatctcttctagatgaggtagtctcagcaccgcggaggctgaggcaggaggattaccatgagtttgaggctagtctgggctacagaataagaccttgtcttttatggtcatacaggactaggtgggtcaattcatcccaggcaggtagctcctcccactgttcacttaaaggtgaatgttggtgtgcacaccataaaagtgtctaattgttgtttattgcttttatagcttttgggcaacttcaaagataaggaacgcaccacaattgctcagcaagtcaaagggaagaaagtctggataggaatcaagaagttactaatgttgattgagatgtccctgcaggtaaggcgatcccgtctctgcgtgagtcacaggaatggctgtagcacaccaggagggcctgctttcctctcccaggcctcaggagtacccatgttctcctctttctcttcagaaataaatgagcagagcagagcgtgacttctaatcttaatgtagagagtcattaggtctcaaaatcagaaagggcttcaaagcgaatttaaaactacaactgccccgtccacagtctgtcagtgagtctgccccgatctctctcactactgaggctccgtccttcagggtgagcatgtgacagcactgatggctaagagctctgggagatgtggaagtgtggatgcggccgacttgtgcagatcggctgtgactgtgcgtttcccctcactgaactcctaaaaaatgttnnnnnnnnnnnnnnnnnnnnttatagcttttgggcaacttcaaagataaggaacgcaccacaattgctcagcaagtcaaagggaagaaagtctggataggaatcaagaagttactaatgttgattgagatgtccctgcaggtaaggcgatcccgtctctgcgtgagtcacaggaatggctgtagcacaccaggagggcctgctttcctctcccaggcctcaggagtacccatgttctcctctttctcttcagaaataaatgagcagagcagagcgtgacttctaatcttaatgtagagagtcattaggtctcaaaatcagaaagggcttcaaagcgaatttaaaactacaactgccccgtcatggaagacattcaacaaggaggaaaagacactcccacccctgccctaggctcctcaacatcttggaggctgcagagaggtgacctgggtacagtcaatttcatagtccttattaacaatcagagaaaaggagtgagaccctgaacagcttaggatagggcttacatctacagcacttagcaataaaaggagatgtgcaaaatcctggtgataatttaaactttaccttcagtgaggggagactggatgttgtaggatgacaatgaagatgaagagggggctggaagggaaggagggaagcaaggtgtccccagtctcatgcagatgggagaagagtctgtcagtgagtctgccccgatctctctcactactgaggctccgtccttcagggtgagcatgtgacagcactgatggctaagagctctgggagatgtggaagtgtggatgcggccgacttgtgcagatcggctgtgactgtgcgtttcccctcactgaactcctaaaaaatgtttattttagtttttccagacgggtgtctctgtgtagccctggctgtcctggagctctttatacagaccaggctggcctcgaactcagagaccatcctgcctctgcctcccaagtgctaggattaaaggctcataccgccatgcccagtgccctagaaatctcaaactaactgactcccagcctgctgctaggcacaggcagatgagactgattttggtttggaactttcttgtgtggactgcacctccctctctccttctggaatgccttgcctctgtgtgcccgaacgtgtacacacacatgtacataatacacttgtgtagactgagttccgtgtgttcagacccctgggctgccacacactgtcgctggcccctggaccagctcagcacgtattagagagctcaataaatttcactagatacaatgaaaggagcagaagtgaatgaatgaggagtgagccatccccagacctgaggaggtgtgtcactgtggagccctgcgcgcccactgctcacattggggttccccagcttcacatctgaaggaagctcttaggccaataaataagaaatatggagagaattatcttaactctctctctgataaactcaatttaaaattagatttttgtggtttttcagaaaccaaaagtttcccaagcttccagcaactgtttttaagtcaatttatatagtttccattatgagtagtaaattattgtcatagactaagcaccctgctcaggcttattcctggtaaaggcatacatacaggtgtattggctttgtccccgaaaaaagataaatctgtcagaagtcagctctgcccttctttttccagtttcagttcaatcttttaaaataattgcataggagaaactatgcgagttttcctccccacccctgcctcctctccctttgatgcctgcggcgcagtgatcaagttaatacttatgtgtgtgaggtagaaagtgagagtggggcgctcggcctaatcttgagcgactgacacttcataggcctggagtttgaaccccttcacgtcaaatggattccgagcagctgagtgacttctctttagatctgcctcaggagcaggggcagagcccgagtggagaggcatgcagttcagcagaatggaagccatgctcactcgctctgctcgccggactcgattttgttaaaacttgctcggtgttaaggatgtgctctgactggatgtcacctgagggaataaagtcatttatctaggttgcttttttcctcccctttctcttgactcttaattccatagctacaggcaagtcagtaagtcgctcctcacacatattaaatagagttaatgggcgaagacctgcatgtactgactccagcgagctccagccagttccattttttagaaaaagctttgacaattgattcatgtgtaattctagtcccatagagggggaaaaaaaatgactcttttgttagctgttcacactttttcttagttctttgtagtctgaccccttaactttgatacatttgaaacttacgttccatgttttgctgggacagaactgtcgcttttccagcctgcttggaggggagtctgagtgcactcttgcccacggctgcgcgagctgagcccttgcgagcccagccactcctggagggcagggagttccctcttgccagcagacttctgccctgcaacatgctttaaaagtgaggtgtttcttacagtacaaattcatagtgagtaattagagatgtttgtttgtgattattcttttccagatccccacacaccctagtcaggccaataagactatgatacactttgaagtgaagtaacttggatccagaatgacagcgaggagagataattagtaatggtgacttgaaccatcacccggatcaaaccaccttgtcttgagtctgtgactctcgggctaccagaggccaggtgtacggagaggagaggccaacagcactctctgctctcttaggtgtggcagcgtcaccagaagggcactaaagctaagaatgccagttcagtgagtatgtgaaagtcataactggtcaggcagtggtggcgcatgcctctaatcccagcactcaggaagcagagacaggtagatttctgagttcgaggccagcctggtctacagaatgagttccaggacagccagggctatacagagaaaccctgtctcgaaaaacaaaacaaaaagttctaactgtattttggtcacttaatcaacctcagtttggtttctcaggttctatcctcctccttcaataagatatatgaattttagcatttaaactctcatgatttatagcaccatgaatgcacccaggcatgtctggacccctccgtgagtgaccacgatctagtgttgtggtgacacctggctggtgtgcttctcctcctcacaccaacacactgggtgcagggggtgcttggctgaggtgcctgtgagtgaccagtagcctctccgtgttgggaagttccactggcttctaaataacataacccactttattatgcttcgaaacaacaactagggaatggtgacatggttctgaacgacccaggaagcacatgaccacgcgcctccctggtgcggaggaagcacattgtggagaaaaggcagcttcgcgcgtctgatttgtttcttccgatgctttttagatggatcctgagtaccgtgtgaggaaattcttggccctcatgagagaagaaggcgcgtaagtacacgcagtgctcacccatctgcgaggtcccaagtcttccccagcgcatatgagcccgctgatggtttccttccttcctgtatagccttgttttcacgcactagcccctcgctgtgctgtgggtctgagggaccaagcaaggaagcaggctgtcgtgttggtctgctctccttggcttgcttcacaagacttccttgtcacagagcagagaaaacttgatggtccatgattcactggaacctgcttttaagtgcccggaatgtgaccattttcttttagaaagtgcccatcaaatagcaaacaaatggtggaaaatgtagagagaacaggaagcctcgagtgtttcttagtgaatagggttgggtttttttgggtttttttgtttgtttgttttggggtttgttttggggtttgttttgttttgtttttgcagagcttacagtttagtgtgtgctttggggtttcttttgcagtagtcccctggactttgattgaaaacggactgtttacaacagtgaccaagggaagcgaccaaggtgcagatggcctgggatcgtcactcctcacactcaagacactggactacgtgaagtgtccgcctctctccacacactcgctctgcatgactagtgcagtgaactccctcgtgcttttgagatgttctcgtgttccctggactgctgggcttccctcccgtgctagctaagatggttcctgcttatgtgggaggcatgtcacacccgtgcacgctgcccacaccgcgatccctaccacctgcccgaaggtcaacttctacatgagaccaagagcaaaggtagaggttccaagggagtcccttggcgctccccatgctaacagctgtgtatcccgcagattaggtcattgtctgttcctaaagaactaggctttgaatatctaagatgctgttctcaatcattttcagagatatttccaagttgcaatcaggagagcttttctaatcggaagtcaaatcattcctggggtggctgtgatatgctctgagtgtaattaatttgctctgtggtaagagatatgctaatcattgccacttggtagatgccgttaaaaccttatgaaagatacatatggaaatctgtacatccctaaacagaaaaaaaattaaaataatttacaagcctctcaattctaattagcgtccggctctaagtgggtcagttccttaggatgacgttagaggcctattagtgccatcgtcttccttttcctcagcctgatgacttacaattcatcctccttgtatctcaagtgatctgtagtgtctgcagcacataaataaaacactactctccagcagaacaagccaccccctagtcctctccctcagccctcgaatatccattccagcgtactcaacacacctcttcccgaagaggaactcagcgagccctttggagggtggtttgcctaatcagtgggttagaaggaatgcaattaggtcgtcacgtcattcgtggagatgagtcttagggcgcatgccactctccccgctgctgcttcaaacacaaagacagccatcagaagccgcccgggaggcttgctgccacaggggcacctgggtgatactctgacactgtccccacagtagaaggcaaatcatctcctagtcttgccgtctgtataccttgtttggggttttcatccctggcttattttgtggctttgaaagagtgaattgtgttgtgaaactgtgattcccgtggctagtaccgtggttccctgtccaccaccgtggtccctgttgtctgcagttctgcctttctcctcccaacaaagtcctacatgaattaatttatgtttcttgttcaacgaagttaatgtcttgtgtttttgtccaaaattatattgaaaaagatattatattgtgtaatgcaaattgaaggaatgcaataaagagtaaatatacttgaaatattgtatagaccagtattttatatggaacaggatcaatcactaatggggctgcatgacgaagtggccacagaagagaaacccctccttgctttgttacagcataggagatttttttttgttttgtttttaaatctctttagaaaaacattaaggaggctggagagatggctcagtgggtaagagctcttaccgctcttccagaggactcagttcaattcccagaattcacatggcagtgtacaactgtaactcacatggcacacagatacgcatgcaagctgacggcacatgcctttaatcccagcacttgggagacagatctctgagttggaagccagcctgctctacatagtgagtcccaagaccctgtaggacagtagttctcaacttacgggttatacctaagaccatcagaaagcataggtatttaccttacaattcacaacaggagcaacattacagttatgaaataccaacaaaagcaaggttgtggttgagggtcatcatgataggagcggcattaaaggcaaacagcgttagcaaggttgggaaccattcattcagagagactcttctcaaacaacaacaacaacaacaaaaagttcagtgggcagtggtggcgcatgcctttaatccaggcactctagaggtagaggcaagtgagtctctgtgagttcaagaccaacctggtctacagggtgaattccaggcaaccagagctgcacagaaaccctgtctccaaaaacaaaagcaaaacaaacccctcaaaagttcattagtatatgctaatgtacgagaatcttcatatttacgtttgatacctattttaccttaaaaagtctgaactgcagccatgagctcggttgttcaggagctgggtggaagctgctttgcggtacaatgacttctctgaagcaggcaaacctgagacccccgagctcaccctgctgttcttcataccttctggatctctcagatactagatgccacagccccagtccttgcaccaggaagcccagaaatggatgctgtgtagagaagaggcatgtccagcaatttgggggacagcagttgcccccacctccagttctgggaggatccccaaaggccttcctacctccagcccacagcatagccctgtgaacagtgtggagggctctgatgacccccccccacacacacacacacacacacacaccggctgtcaggaaatactaaatcttccaaagaagagctcattttttccttactacatttttgtcttcttttgaggatttttttttcatgtactatccaaaaacatgcataactgtagctagaatctaagatgtggttttttttttatatgtatatattttgaatacttttttcttttttcttggatattttctttatttacatttcaaatgttagcccttttccactttcctccccctcccagaaaccccctatcccatcctccctctccctgcttctatgagggtgttcctccaccacccacccactcccacctccccgccctcgattccccaacactggggcatctatcgagcctaagatgtgtttttaaggctgtctttttattgcctaaaaattacagtgagcagcctttacatttcccaccttatgttacagaatcatggaggagattcagttatcatttaataatcaaagcctggtcaacaggcctgctgaagcagggtcagctataaatatccacctggccaaacagaaggcaaggccaggacttcagtttgcttgcctggcagctgggccgcctgccgccttcaaataagtgaagccaggcaaggtttgctaagagttcaaaagcagcatttaaattttagaagttattgcaagatgaaagccactcgtttgctgacaactgctgaggctgagccccagtgacagcccagggggtgtgagtgtgtcgtgatgccagagcacggataacacctgtgatctgcaggaatcccaagatcgggaggaagggtgcgcacctctaatcccagaggtagcgaggaagggggatcagcacgagattgaggccagcctattctgcatggttccaggatagccagcactacaaagtgagactatgtccaaacaagaaattgtaatgacatgtatttatgattctccagcacagtctccataatgaacatttggtgattgattagtgatgagatagctgtttgcctcccaagttctgttaagccagtcatggcttaacaccatatgttttgctgaactcacttcctaatgtagacccacaccacccatgttacgtgctgttatgcccagcactacacaggtcgaccagcactccacccaaaacagcctcgcctcgtttcccttgctgtctttctcctcgattccttttcctatctctgtgcccatccatttacccacagcctgccttcagaatagtgttgctttcaataaaaaaaaaaaacctcaccatatccctttatcttctctcaaattattctcaaaaccttttttttaagacccactaagtctggtgtgtagcactggctgccaagaacagagggatctacctgtctctgcctcccagatgctgaaattaaaaggtgcacacacgacttaggcacaacttgaaacttgttctttccagtgtttccagctagtgttctagcatagctataaattgtactctctttaatggaatacaatgatcatgggagacaaatggccttggtaagtatgatagggaccatctaaatacttggcaaccttatacagtcaaaaaaataaataaaataaaataaaacccagagtgctgcgagaaaaaaaaaagagtattcagctcaagggaaatgcagtcaaagatggccagcactgaagccaggagctctgcttttaccctcaaggggcctcacataggtggaaaaagatttctaggggcaaaagatgcaccaaatggaagctcaggcggtcatggtcaaccgagggccagaaggtgttggcagtccccaccgtcagaagcagactgcttcatgttcctatggccagtgtgaatacgttatctctaatagtggtagaccagaagaaaggaacactgaagaggatattttagaggtaggtctgagaactgaaggaccacccatcatcctaaaactgcacagcatcaagatgacaggcaaaggcttcgggtgagtcactgaaactccagcccaaggagagagtgcccttcccagagctctgcccagcaacctatctaaaccaacctacaattccattgtcacttggcccagagcacaggcagaacaccatctggtcaacctacctaccaacctcttccacagttcagctgttatctgtttctggtccagctttgtttacagttgagcaattcctatttctcccacaactggagttgggtatgtagtgagaaagggagtaagactatggcaggccctgtgacccactgacctgggctgaaccttgtagaaagatctgagacatcaacatgcgttgttgaaatttttcaagtctatgaatgaattgctgaccaggtttgttcttccccaagttggcaattccttgtttgatactgacttaatatcaagtaatgctttaaggctcatgtcacatctgctgtccatcatacctcatcttgcttagagagcagaggaaatgaccgtaaatttggccatttaattagcacaacattcagatacccttgacctaaggacgaatctggagactccacacatcgtacaatgtgtccgtttgaagtttaccttctctttaatgatttaacagaaaaaaactgcatgatgaaatagattttctccaaatatatatatatttatataatatataatcttagttaactcaaaggtatatacattgtataataaataatatttataaaaagagactttttgaatataaaatcaaaaagatcaacaacttctacaactttttacaaaactttggatacagcaggttggtagggacctcccattggatgctattacctgactatggcgaggataattacaatgcgctcatgtactattattaaataattacttgtcagctacttgaatacgccccggaaacatgactttatcacttttaatatagaatacatagatatgaagagacttgtaaattgttgtatccgttctgctcaagtgtcctcacacaagcgttatccagttgacttgatttccaacttctggaaggagagatgggaaggggcatttggggtgctaggaagggatgggaggtgtccctagagcagtgctcatggtcacatggtagagagtgcaggcaagggcctactggagcctgcttggcaagccaactgcacaacaggaaagaagtggctgacccctcgtcaagccagcattagcagaccctagacagaagcgggaaaggacaaattctttgttctgccccattcccccattttatctcctctttctgattctccttaagacggagttgatggattgatccgtgcagccccacccaccttactaaacccagccagtaccatcatgcgtcgggaacagagctgggagctgcctccattcgctgcttgcctcttttgaatatctatctaatccagatccttgggaactgagataggctatcccttttacaagtgggaagaagggcttgttaaggatctcttgtctttctggttacttcagccaatgggagaaaaggacgcagggtagtctgccttctaacacaaaggaagtgggactctttaccctccccacctgccaaccatgtttagattgctctctaaggtgccccgctgctctcctcggtgtctgctggttagcaaggctgagaagggcagagcagcccattctttctgggtgtggtggatggagccagaagagacctgcctccacatctgacctatttacaaggtcatcatgaaaaaaaaaaaaaaaaacgcgtagtaaaggtggacactgtagaacaacagaaaggggcgtggagatctgactgtcgctccagggcagaacagggctagcgaaaacaggagcccacaaggaactctgttctgcagatggcttcccaggccgcccagaactctgaggtcttcaaaactcaagatcttgctcccactgttggccaggggcctccccatcactacatcccagctacacctatctatggcttttctcagaacgacaaggtatgtccaatttaaatgggagtcgacggacaagaggggactgcggggctctgtcctacttcacagttcccacctcagaggcatcttggaatgtcacgagtagaggcagcttggacacagaatctcgccatggtcttgtccttcccaccaggccaagagctcacactagcccagcctgttctgttgcggtagatttttttttttcatttttattttctttaacatgtgcaaaggtaagcctcgagtctgtccccagcagaccctggtaaaaccataaagaaagcccctctgtaaagccgtacaccatccagagcagggggagagacgttagttgagaaagaagccgcccgtccgtccgaggccggctgggtccaggtcgtttatcacatgcagctggcaacagtccatgctccttgctggccagtgccgaaggctggcctggatctagatcctgcttctcatgggacttcgatgaatggatccagccgcacaatctaccccttcccagtgccctttgggaaataaacaggaagaatcagaaacctcataactgctgtcaacatcaccccctgggatgcaaagatcacaggctgcctacgctgccagccctgcctccctcctcgccccagagcctgctgttgagggaggacatgccatcctcaggaagaacagagcctgcatccacacaactcaaacctcctcctagctgaggaagcccactgtaggtaaccaagggagcattgcccttcctacgtggagacggaaaagcctgccagtctgagccaccagtcacagcagggctagtgcctgccatcagacgcacaactgccgtgaattgtccaaaagaaacggactctacctagttatggtgaactccctcccagggtgctttcctgagcatgatcactctgtacagccctatcccgtgggatctgaggtactgagccacgccccaggcaccccccaacccccagccaaccctcatctctggtgctgctggcagagctgaaccaggcatagcaagacgacctggatatgcctaaggtcccacaaaagactagtaacagacccaggacacagggccagttagagggggtgactagattcatagcctttccgacatagggataaaaagaataaatcagatatttgtaaactaccagcactcggataccaagctagtggctaagtggagacagtggacaaacctcaagcaatggagaaggtgtcttccccacttagggaggactggatgctaccactgtgctgaactcttctcagagaagggcatgtggcctgctgggctctgctctgtggcccctttgtgcaagaaaaaagccagagccttctatgcctgctgtctccctgcccatttgtcccttggcttccatcagtagcagcgccttcgggggtgaaaggacaggaaggaaccaggtctcaaccatctcctggcctatggctccaaaccaggagcccagagcaggctctttatggctgtgtctggctcctgagcagccctgcagggcacagaccttatcacttcacacaggaggaaacctgggctccgagaggcaaaggacatcccagtgggagggatctttcttatcaggaagtgtgaggttgagagtccagtcctcctcccccctccaccccccaccccatgggaagggattaaggctgtgaactctgtgggcatagcttcttaaaaacatgtctgcatgatactagaaaaacagcaagtgtctaccttaggaatgtgaggaaagggggctgctttcccctctccccagtactggagattgattcaggggtgtaagtgttctactacccagctacacccaattcttcttaggagatcatttttaggcaaggattggagtggagcgatttgctggacaacaaaggctcaccctgcacctccttccctgcctggaagatctcagctgcccacatgggcaaggacggagtggagtcatgggctctgtatcttggacccacactgccccatgtatcaagcttgggttggcaatgctgaggcctatgcaagcctacataggaagcttctggaagcagacccctgggtctatctaggccattaactcaagtctaaccttcagtgacatgggtggtcaggacaaatggcccttctagctgagtgataagaagccacaccaagagctcctcaaaacggccagagctatgtatgtactatctgatattggggggtgcagggctaactcttgtcagagtgaataccagagaaggcggccgtcatggtctgcttccttccacctcaaccttcctacttgctgacttttctcccatccctttgaaaagcagaaagaacgcccatgggatcttcctttgcagcaaccccgtgctaacgctgatggcaaccctgacacttagagcagcattcacacccactaacttgagctttataaaaatccatcaagatccccatactgccatcactgcgcagatgaggagcgaggttcagcagtgggcgcgtgaagcgctaaagctcgccgctgtcttccttccagccttgaccttgataaagaaaacccacgcctcctgtatggttctagagggaccctgggaatggaacctaagccccacaaggaacttcttagatgggcttgtgatgtcaggtacccccccacccttacagagcgcagacatgagccaccagctctggtgtgtcaccagctccaaggtccctgggtggaacacactgcgctggccatccatagatggacagaaagctgcttttccaggaaccaatgtggtttcccacgttcctcacagctgctcggggaaggtaacagatgctgaagccagagttgttggttgacaaataagaaaagccagttgagagtcagactcactagcagagccctctcaggggaggggacagagacaagggtcacactggcccatgccagagcctctaggatcactctgcttccaggctgacctttcttggggtcctcccacgcatgcaggccacctctgggaagcttggaagcataatccaccaggcttttatcccacggtcactcaccccagccgctctgaactgggagctctcctctttcctgtctccctccataaacttggtgagagtgctcccgctccacccaagcttcagatctggcttcccccacccaccttcccaagctctggaggatttgtgttaggtcaaagcttgccctctcagttcatgggtgatgtgaaatgactctgccccagggttaggagagacttactaggtgactgtctcagggtctcactgtgtagtcctggcctagaactctctatggagaccagccagacctcacactcagatccagatgcctcagcctcctaagtgctgggattaaaggccagtcccaccataccctgcccctgtttctgacatttgaacctctcctttagacagtagggaaactgaggccctgagatatgacacttttaggggcatggctgggaccagacctcaacctctcttctggccgaatagatgctcactaatgacagccagcagccatgaacaaatctggtctggctcatcactgctaatttgtgtaagaattttaatcaattgcttgtggctgacgtgcacaccctcagtcattatctgagcctcgtgtaaatacgtcaagtcgctccccaagaccattcccgtggaagcgtgggaagcctagtttctgacttcagctttgggaacttgttcgtcttgggaagccgagaatcagaagagcaggcctagcggatgggaggagagggcagtcccacgtcccgccccgcgccctacctggctcactacttgcaggtgtgcacatcgtagatgcgaatacactcttggcagctgacatagcagcaccagtggaagacgcaatggcatttctccttccgtttctccgtcctcgtgttgtggccccggccacagcacagcagatcgcagccatcgatgccgtgggaggtgacattgcaagtccggtccctggtaccaaaggagcccgtctctgggttgggctcacaaaagttgggggagttctcgtagtagaccaggtccctctcggtgggtggcttgaagagcgcgtacttagcccgcagggtctccacccagcctcgggactcacggtgtttctccaccaccatctcggaggcactgtcgtacttgtccttgaggaagtcgccaatggcacggaagtcgggctgggcccaccagcaggtcttcacctcgcagctgccggacaacccgtggcatttacactttaggtgcatgtggtccaggatggtctagggaaagaggggcagcagctagttcagactgacacaccgggagaaagcttcccctctgtaccacaccctcctctactcttacttggtgccaggaagaatgggtggaaaccagtgtccctagtcacacccccggccccagcaggcttcacattcacctcatccatagaagtggtgcaaactagggactgttattcccattgaacagatggaaaaactgaggccgagagctaagtgttccacgagcataggaagggctatgctatggaaaccctactttggattcagagtcagtccccaacccacaaccacatcacagacgtacacaggcacagcctgccaaccagtgtagcctatgggtgttgttcctatggggcagccatactgcactccttggcagatttctcaaaagatccaggaacagcatcaagcatgattcaagtttggaaacctacatggtgggaagaactgaccactacaggttgccttctgacttccacatacacaacatgg

SEQ ID NO: 522 - DNA, 3780 bp, Mus musculus
gcgagcacgcgcgcggcggaggcgggctcagcagagtgcggagctgcaacctgggagccggacgtgtccgcgaagatggcgggccggactatgcaagctgcgagatgccctactgatgaattatctttaagcaactgtgcggttgtgaacgaaaaagatttccagtctggccagcatgtgatggtgaggacgtcccccaatcacaagtacatatttacgctgaggacccatccgtcagtggttccaggatgcatcgcgttcagcttgcctcagcgaaaatgggctggactttctattggacaggacatagaagttgccttgtattcgtttgacaaagccaagcagtgcatcggcacaatgaccatcgagatcgacttcctgcagaagaagaacatcgactccaacccttacgacaccgacaagatggccgccgagttcatccagcagttcaacaaccaggccttctcagtggggcagcagcttgtctttagcttcaatgataagctctttggattactggtgaaggacattgaagccatggatcccagcatcctgaagggagagcctgcatcaggcaaaaggcagaagattgaggtaggcctggttgttggaaacagtcaagttgcatttgaaaaagcagaaaattcgtcgctcaatcttatcggcaaagctaaaaccaaggaaaatcgccagtccatcatcaatcccgactggaactttgagaaaatggggatcggcggtctggataaggagttctcggacattttccgaagagcatttgcttctcgggtgttccccccggagatcgtggaacagatgggttgcaaacatgttaaaggcatcctgttatacggaccccctggttgtggtaaaactctcttggctcgacagattggcaagatgctgaatgcgagagagcccaaggtggtcaatgggccagaaatccttaacaagtatgtgggagaatcagaggctaacattcgtaaactctttgctgatgccgaagaggagcaaaggaggcttggtgctaacagtggcttgcacatcatcatctttgatgaaatcgatgccatctgcaagcagagagggagcatggccggcagcactggagtgcatgacaccgtggtcaaccagctgctgtccaagatcgatggcgttgagcagctgaacaacatcctcgttatcggaatgaccaatagaccagatttgatagacgaagctctccttcgacccggaagactggaagttaaaatggagataggcttgccagatgagaagggtcgactccagatccttcatatccacacagcaaggatgagagggcaccagttactgtctgcagatgtggacatcaaggagctggctgtggagactaagaatttcagtggcgctgagctggagggtctggtgcgagcagcgcagtccacagccatgaacagacatatcaaggccagcaccaaagtagaagtagacatggagaaggcagagagcctgcaggtgacaagaggggacttccttgcttccctggagaacgatatcaaaccagcatttggcaccaaccaagaggattatgcaagttacattatgaatgggatcatcaagtggggtgaccccgtgacccgagtcctagatgacggagagctgctggtccagcaaacgaaaaacagtgaccggacaccactcgttagtgtcctcctagaagggcctcctcacagcgggaagactgccctggctgcaaagattgccgaggaatccaacttccccttcatcaagatctgctcacctgataagatgattggcttctccgagacagccaagtgtcaggccatgaagaagatctttgatgatgcttacaaatctcagctcagctgtgtggtcgtggatgacattgagaggctgctcgattatgtccccattggtccccggttctccaacctggtattgcaggctcttcttgtgttactgaaaaaggcgcctcctcagggccgcaagcttcttatcatcgggaccaccagccgcaaagatgtcctgcaggaaatggagatgctgaacgccttcagcaccaccatccacgtgcccaacattgccacaggagagcagctgctggaagctctggagcttttgggcaacttcaaagataaggaacgcaccacaattgctcagcaagtcaaagggaagaaagtctggataggaatcaagaagttactaatgttgattgagatgtccctgcagatggatcctgagtaccgtgtgaggaaattcttggccctcatgagagaagaaggcgctagtcccctggactttgattgaaaacggactgtttacaacagtgaccaagggaagcgaccaaggtgcagatggcctgggatcgtcactcctcacactcaagacactggactacgtgaagtgtccgcctctctccacacactcgctctgcatgactagtgcagtgaactccctcgtgcttttgagatgttctcgtgttccctggactgctgggcttccctcccgtgctagctaagatggttcctgcttatgtgggaggcatgtcacacccgtgcacgctgcccacaccgcgatccctaccacctgcccgaaggtcaacttctacatgagaccaagagcaaaggtagaggttccaagggagtcccttggcgctccccatgctaacagctgtgtatcccgcagattaggtcattgtctgttcctaaagaactaggctttgaatatctaagatgctgttctcaatcattttcagagatatttccaagttgcaatcaggagagcttttctaatcggaagtcaaatcattcctggggtggctgtgatatgctctgagtgtaattaatttgctctgtggtaagagatatgctaatcattgccacttggtagatgccgttaaaaccttatgaaagatacatatggaaatctgtacatccctaaacagaaaaaaaattaaaataatttacaagcctctcaattctaattagcgtccggctctaagtgggtcagttccttaggatgacgttagaggcctattagtgccatcgtcttccttttcctcagcctgatgacttacaattcatcctccttgtatctcaagtgatctgtagtgtctgcagcacataaataaaacactactctccagcagaacaagccaccccctagtcctctccctcagccctcgaatatccattccagcgtactcaacacacctcttcccgaagaggaactcagcgagccctttggagggtggtttgcctaatcagtgggttagaaggaatgcaattaggtcgtcacgtcattcgtggagatgagtcttagggcgcatgccactctccccgctgctgcttcaaacacaaagacagccatcagaagccgcccgggaggcttgctgccacaggggcacctgggtgatactctgacactgtccccacagtagaaggcaaatcatctcctagtcttgccgtctgtataccttgtttggggttttcatccctggcttattttgtggctttgaaagagtgaattgtgttgtgaaactgtgattcccgtggctagtaccgtggttccctgtccaccaccgtggtccctgttgtctgcagttctgcctttctcctcccaacaaagtcctacatgaattaatttatgtttcttgttcaacgaagttaatgtcttgtgtttttgtccaaaattatattgaaaaagatattatattgtgtaatgcaaattgaaggaatgcaataaagagtaaatatacttgaaatattgtatagacca

SEQ ID NO: 523 - protein, 736 aa, Mus musculus
MAGRTMQAARCPTDELSLSNCAVVNEKDFQSGQHVMVRTSPNHKYIFTLRTHPSVVPGCIAFSLPQRKWAGLSIGQDIEVFDKAKQCIGTMTIEIDFLQKKNIDSNPYDTDKMAAEFIQQFNNQAFSVGQQLVFSFNDKLFGLLVKDIEAMDPSILKGEPASGKRQKIEVGLVVGNSQVAFEKAENSSLNLIGKAKTKENRQSIINPDWNFEKMGIGGLDKEFSDIFRRAFASRVFPPEIVEQMGCKHVKGILLYGPPGCGKTLLARQIGKMLNAREPKVVNGPEILNKYVGESEANIRKLFADAEEEQRRLGANSGLHIIIFDEIDAICKQRGSMAGSTGVHDTVVNQLLSKIDGVEQLNNILVIGMTNRPDLIDEALLRPGRLEVKMEIGLPDEKGRLQILHIHTARMRGHQLLSADVDIKELAVETKNFSGAELEGLVRAAQSTAMNRHIKASTKVEVDMEKAESLQVTRGDFLASLENDIKPAFGTNQEDYASYIMNGIIKWGDPVTRVLDDGELLVQQTKNSDRTPLVSVLLEGPPHSGKTAAKIAEESNFPFIKICSPDKMIGFSETAKCQAMKKIFDDAYKSQLSCVVVDDIERLLDYVPIGPRFSNLVLQALLVLLKKAPPQGRKLLIIGTTSRKDVLQEMEMLNAFSTTIHVPNIATGEQLLEALELLGNFKDKERTTIAQQVKGKKVWIGIKKLLMLIEMSLQMDPEYRVRKFLALMREEGDLDFD

SEQ ID NO: 524 - DNA, 3779 bp, Mus musculus
gcgagcacgcgcgcggcggaggcgggctcagcagagtgcggagctgcaacctgggagccggacgtgtccgcgaagatggcgggccggactatgcaagctgcgagatgccctactgatgaattatctttaagcaactgtgcggttgtgaacgaaaaagatttccagtctggccagcatgtgatggtgaggacgtcccccaatcacaagtacatatttacgctgaggacccatccgtcagtggttccaggatgcatcgcgttcagcttgcctcagcgaaaatgggctggactttctattggacaggacatagaagttgccttgtattcgtttgacaaagccaagcagtgcatcggcacaatgaccatcgagatcgacttcctgcagaagaagaacatcgactccaacccttacgacaccgacaagatggccgccgagttcatccagcagttcaacaaccaggccttctcagtggggcagcagcttgtctttagcttcaatgataagctctttggattactggtgaaggacattgaagccatggatcccagcatcctgaagggagagcctgcatcaggcaaaaggcagaagattgaggtaggcctggttgttggaaacagtcaagttgcatttgaaaaagcagaaaattcgtcgctcaatcttatcggcaaagctaaaaccaaggaaaatcgccagtccatcatcaatcccgactggaactttgagaaaatggggatcggcggtctggataaggagttctcggacattttccgaagagcatttgcttctcgggtgttccccccggagatcgtggaacagatgggttgcaaacatgttaaaggcatcctgttatacggaccccctggttgtggtaaaactctcttggctcgacagattggcaagatgctgaatgcgagagagcccaaggtggtcaatgggccagaaatccttaacaagtatgtgggagaatcagaggctaacattcgtaaactctttgctgatgccgaagaggagcaaaggaggcttggtgctaacagtggcttgcacatcatcatctttgatgaaatcgatgccatctgcaagcagagagggagcatggccggcagcactggagtgcatgacaccgtggtcaaccagctgctgtccaagatcgatggcgttgagcagctgaacaacatcctcgttatcggaatgaccaatagaccagatttgatagacgaagctctccttcgacccggaagactggaagttaaaatggagataggcttgccagatgagaagggtcgactccagatccttcatatccacacagcaaggatgagagggcaccagttactgtctgcagatgtggacatcaaggagctggctgtggagactaagaatttcagtggcgctgagctggagggtctggtgcgagcagcgcagtccacagccatgaacagacatatcaaggccagcaccaaagtagaagtagacatggagaaggcagagagcctgcaggtgacaagaggggacttccttgcttccctggagaacgatatcaaaccagcatttggcaccaaccaagaggattatgcaagttacattatgaatgggatcatcaagtggggtgaccccgtgacccgagtcctagatgacggagagctgctggtccagcaaacgaaaaacagtgaccggacaccactcgttagtgtcctcctagaagggcctcctcacagcgggaagactgccctggctgcaaagattgccgaggaatccaacttccccttcatcaagatctgctcacctgataagatgattggcttctccgagacagccaagtgtcaggccatgaagaagatctttgatgatgcttacaaatctcagctcagctgtgtggtcgtggatgacattgagaggctgctcgattatgtccccattggtccccggttctccaacctggtattgcaggctcttcttgtgttactgaaaaaggcgcctcctcagggccgcaagcttcttatcatcgggaccaccagccgcaaagatgtcctgcaggaaatggagatgctgaacgccttcagcaccaccatccacgtgcccaacattgccacaggagagcagctgctggaagctctggagcttttgggcaacttcaaagataaggaacgcaccacaattgctcagcaatcaaagggaagaaagtctggataggaatcaagaagttactaatgttgattgagatgtccctgcagatggatcctgagtaccgtgtgaggaaattcttggccctcatgagagaagaaggcgctagtcccctggactttgattgaaaacggactgtttacaacagtgaccaagggaagcgaccaaggtgcagatggcctgggatcgtcactcctcacactcaagacactggactacgtgaagtgtccgcctctctccacacactcgctctgcatgactagtgcagtgaactccctcgtgcttttgagatgttctcgtgttccctggactgctgggcttccctcccgtgctagctaagatggttcctgcttatgtgggaggcatgtcacacccgtgcacgctgcccacaccgcgatccctaccacctgcccgaaggtcaacttctacatgagaccaagagcaaaggtagaggttccaagggagtcccttggcgctccccatgctaacagctgtgtatcccgcagattaggtcattgtctgttcctaaagaactaggctttgaatatctaagatgctgttctcaatcattttcagagatatttccaagttgcaatcaggagagcttttctaatcggaagtcaaatcattcctggggtggctgtgatatgctctgagtgtaattaatttgctctgtggtaagagatatgctaatcattgccacttggtagatgccgttaaaaccttatgaaagatacatatggaaatctgtacatccctaaacagaaaaaaaattaaaataatttacaagcctctcaattctaattagcgtccggctctaagtgggtcagttccttaggatgacgttagaggcctattagtgccatcgtcttccttttcctcagcctgatgacttacaattcatcctccttgtatctcaagtgatctgtagtgtctgcagcacataaataaaacactactctccagcagaacaagccaccccctagtcctctccctcagccctcgaatatccattccagcgtactcaacacacctcttcccgaagaggaactcagcgagccctttggagggtggtttgcctaatcagtgggttagaaggaatgcaattaggtcgtcacgtcattcgtggagatgagtcttagggcgcatgccactctccccgctgctgcttcaaacacaaagacagccatcagaagccgcccgggaggcttgctgccacaggggcacctgggtgatactctgacactgtccccacagtagaaggcaaatcatctcctagtcttgccgtctgtataccttgtttggggttttcatccctggcttattttgtggctttgaaagagtgaattgtgttgtgaaactgtgattcccgtggctagtaccgtggttccctgtccaccaccgtggtccctgttgtctgcagttctgcctttctcctcccaacaaagtcctacatgaattaatttatgtttcttgttcaacgaagttaatgtcttgtgtttttgtccaaaattatattgaaaaagatattatattgtgtaatgcaaattgaaggaatgcaataaagagtaaatatacttgaaatattgtatagacca

SEQ ID NO: 525 - protein, 698 aa, Mus musculus
MAGRTMQAARCPTDELSLSNCAVVNEKDFQSGQHVMVRTSPNHKYIFTLRTHPSVVPGCIAFSLPQRKWAGLSIGQDIEVFDKAKQCIGTMTIEIDFLQKKNIDSNPYDTDKMAAEFIQQFNNQAFSVGQQLVFSFNDKLFGLLVKDIEAMDPSILKGEPASGKRQKIEVGLVVGNSQVAFEKAENSSLNLIGKAKTKENRQSIINPDWNFEKMGIGGLDKEFSDIFRRAFASRVFPPEIVEQMGCKHVKGILLYGPPGCGKTLLARQIGKMLNAREPKVVNGPEILNKYVGESEANIRKLFADAEEEQRRLGANSGLHIIIFDEIDAICKQRGSMAGSTGVHDTVVNQLLSKIDGVEQLNNILVIGMTNRPDLIDEALLRPGRLEVKMEIGLPDEKGRLQILHIHTARMRGHQLLSADVDIKELAVETKNFSGAELEGLVRAAQSTAMNRHIKASTKVEVDMEKAESLQVTRGDFLASLENDIKPAFGTNQEDYASYIMNGIIKWGDPVTRVLDDGELLVQQTKNSDRTPLVSVLLEGPPHSGKTAAKIAEESNFPFIKICSPDKMIGFSETAKCQAMKKIFDDAYKSQLSCVVVDDIERLLDYVPIGPRFSNLVLQALLVLLKKAPPQGRKLLIIGTTSRKDVLQEMEMLNAFSTTIHVPNIATGEQLLEALELLGNFKDKERTTIAQQSKGRKSG

SEQ ID NO: 526 - DNA, 67485 bp, Homo sapiens
acacccatcttaattcacttttaagaaaggactcagcaattaattgggtgagtcttttcttaataattagcaaaatgacaagttttataccagcttcagtcctaaaatctatcgtattttttggcaaattttgaaagatgggcaagatttttctttcatactgctgtatgtatctatcatttgaattcggttttactgtaagagaatcagaatgcaaaatattatggtaaaaacctaggcctgtgtaggaaagaggtgtttaaagtgaggctggtagctttgttgagattttaatgtttcggtcagagctcttgtcttccctttggcctgagagtttgtatcttgtagaatcctttcagatgtatcaaaaagtttgaatcagagttaaaacttttatataagggtatctaggaaggaagtcctgtatctgccttttataacttatggaaacccccaggtttgtataagtataaaatgagataatgtgatatggtgaaatgagatagtgtgtatgaacatactttataaactataaagaactgtagacatttgtatattattaattatcataattctttcacggatatgcttgtttcctgtgacaccatttttctttttttcttttttttttttttggagatggagttttcttcttgttgcctaggctagagtgcaatggcgtgatctcggctcaccacaacctccgcctctcgagttcaagcgattcccctgcctcagcctccagagtagctgggattacaggtgtccaccaccatgcctggctaattttgtatttttagtagagacagggtttcgccatgtaggtcaggctggtctcgaactcccgacctcaggtgatccgcctgcctcggcctcccaaagtgctgggattataggtgtgagccaccgtgccaggcccatttttctttttttaaacttagaaatgccaaataaatgcgattaatatttatcaaacctcatatgtgccaatataagccctattaataatttaaatgtttatgtttttttgtttgtttgtttttgtttttgagacggagtctcactctgtcgcccaggctggagtgcagtggcgccatcacaactcactgcaagctctgcctcccgggttcacgccattctcctgcctcagcctcctgagtacctggggctacaggtgtctgccaccacgcctggctacttttttgtatttttagtaaagacagggtttcactgtgttagccagtatggtctcgatctcctgacctggtgatcctattgcctcagcctcccaaagtgctgggattacaggcgtgagccaccatgcccagcccaataatttaaatgttaattgttctattgaagtaaaatatttgtctctttgttactttttactttatttttaaaagtatagaagttatagatgatggctttctttttgtaaaagattcaagaatgtcaaagcatatagggaaaaatgagaaaggccatctctaacaccactttcctttccctctccagagttagccaaaatttgggatatatctttgaagtttgttttctttatataatatttacattcatatacgtatgtgcttttttaaaaaaatgaacattaatggaattatactgcagtttacatttttcacttgcaaatattccttggatagctttctgtgtcagtgtatgtaagtccccttcattattttggacaaatgcagagtattctagaatattgccacataatggaaaatataagatccatgaacacagggaccttttctgttttatttactgctatgactccagttcctcagatagtgcttggtgtctggtaggtattcagtaaatagaattaatgaataatttatttaacatatggattatttctggttgtggctgttgaaaaaatactgttgtgaaaatgcttacttgcctccctgtgcacacaaggaatcattttctagggtagccatccaaatgtcttttcaaagacatggtttcattgtcttctagtttctagtgttgccagtgagagttatcataccaatctcgttctggtttctttgcaggaaacctgttttgtccctcagaaaggttctaggactttctcttcacctttggtgctctgaaagtttacagcagtgggtctggacagatgtgtgcttcttttcatttatcccgatcatcactcactgaaccctttaaactgcagaggcacacctttcttcagctataggaaatttttttctcttctgtcttttattgtttcttctctatgactctttctgttctctccttctgagactcctgttagatcacagttaaaacttatggatatttctttcatgctttgtagcctttctgtctcactttctgtcattttgtgggatttggggcggaagggaagataaataactgtgttctgtttgccatcttcacccagcttcctgccatagttctttttatcccacaaggatgacttttttttatatctgtcacttcatttgtctcacagtctcttcctaaaaaaaatatgactcatatttcataataattgatggaaggttgatatttatttaacatgcgtttgttttatagtcagctttttttgaaaatgctttttttttcaaagccatgataccaatttaaaaattaggctgtgttgttttgtgctattggtagtgagcccagtcgctttaaaacacgtgttggtatcttaatcactcatctggtccaggcagctccaagtgctgataaaggccttgatgcttctccagatgtctaaatgctagctccaggtgcagtaagcagactatttggagctggcacatagattctgaagcacaatgtattaatacaaatgaaagttttaggttcttggtctcctagagtaatggttcttaagcctggttcagtaccagaatcacctgtggtacttggtaaaactataaagaccctctaataggcctgttaaatcaaaatcccgtggggaatgggactgagcgcctgtatatctctgaaggctctggaggttattctgatatgcagccaagtatggctgtgttttcatttctgtatatattttctttttgtatggatttttcactgttcttactctctgtatgtattttttcttactcatgcctcatgagttaaaatggctatacagtgtcccttggtacagatgtgttctaatttacataactgatcccctcttggtagacattattaatatgcttcccatcttttttcataacaagttactttagtagatatacttgtacatataactttgtacacatttgtgaatatatttaggggataaattactagaagtggacttgttcagaggatatatatatttgtgaatttgagagatgtgttttctttgattccaatttttaaaattgttttaaaatgcccataaaattgtccgggcgtggtggctcacgcctgtaatcccagcactttgagaggccgaggcgggtggtcacaaggtcaggagatcaagaccatcctagctaatatggtgaaaccctgtctctagtaaaaatacaaaaaattagccgggcgtggtggtgggcacctgtagtcccagctactcgggaggctgaggcaggagaatggcgtgaacctgggaggtggagcttgcagcgtccgagatcgcgccactgcactccagcctgggggacagagtgagactccgtctcaaaaaaaaaaaaacaaaaaacagaaaaccataaaatttaccgtgtaaccattttaaatgtacaattcagtggcattaaatacattcttaatgttgtgcaaccatcactaccattcatctccagacctcttttcatcttgtaaaactaaaactccatacccataaacagtaactccccattccttcctctccctatcccctggcagccaccattttactttctgtctcttggatatcagctactccaggaacctcatataagtggattgtacagtatttgcttatttaacttagcgtatggtcctcaaggttcgtcatgttgcaggatatcagaattttctttctttttaatgctgaataatattccattgtatgtacgtaacacattttgtttatccattcctctgtcaatggtcatatggatttcttccacattttagctattgtgggtaatgctgtcatgaacaaggctgtacagatatctcttcaagaccctgttttcagttctttgggggtatatacccagaagtggaattgctggatcatatgataattctatttttaattttatgaggaaccaccatatttttgttttccacagtgactcaaccattttacttatgttcccaccaacagtgcataagggttctgatttctccgcatcctcaccaacacttcttattttctgcatttttgtggtagtagccatcctaatgagtatgaagtgaaatctctttgtagtttggatttgcatttccctaatgattagtgaggttgaacatcttttcatgtgcttatttaaggccatttgtatatcttctttggagaaatgtttgtttaagttctttgcccattttttatttagttttttgttgttcaattttggcagttctctatgtattctggatattaatcccttatcacatatatggtttgcaaatatttcagatttttttatgtgtgaaaatatgcttttaaatcctcaagagttacgttcttaaattgaatatattcttaactattcttaaatcttggaagtccttacattttgtttttatctcttcttaggccagtactaaagtggaagtggacatggagaaagcagaaagcctgcaagtgatgagaggagacttccttgcttctttggagaatgatatcaaaccagtgagtatgcccattgagtgatatataggccaaaaagtaatgataataataactcaggcgaaaagtaagtgccatttactcagtattatggaaggttatagcatatgcagtttcataaaatgagaaaattttagtattggaaatgttcagtatgagaaacatctgtacaataatcctagtggctggtgatattatttactgaaatattttcatgataggaagcttaccatcttgtaaggcaggccattcaattttgagactttccagttattgttttactttatattgaactagaactaattttcttattggttcttatacaatcccaagctacagaaacctaacttcagtccatcttccatatgtcagttattaggatatttaaaattaactctcatatcctcctctgtctctctctctctctctctttctcttcctttcctcagcctcttccaaggcatccctttttcttgctcagtacatttagtttctctgactactatagtttctaagacttaaaaagtgtcagttttcttaaaacgcactcaaaatggtcatagttggagctttagaatacagtttaaggttattaacccattttcctataaaacaactactaacatttgagtaacttttgtttagagtcctgtgttaatacaaaaacaaattgtagaaagtcccagttcttaaagaagtgtgtgcttttctttcttaaatggacctcaggtccattaagattaatcttaatctttatgacacactgttattagtctgtattttcatggcatgtaaaataacatatggtatatgtagttttctgggacttgctatttattaaatattttattaccaagagtcatctatatcagggatccccaaccctcagtactggtccatggcccgttaggaactgggccacacagcaggaggtgagcagcaagtgagtgagcctcatctgtatttacagccactccctattgctcgtgttaccacctgagctccacctcctgtcagatctgtggtgacattagattctcatatgagtatgaaccctattgtgaactgcatatctgagggatctagattgcacactccttatgagaatctaatgcctgatgatctgtcactgtctcccatcacccccagatgggaccatatagttgcaggaaaacaagctcagggctcccactgatgctacattatggtgagttgtataattagttcattatatattacaatgtaataataatagaaataaagtgcacaataaatgtaatgtgcttgggctgggcatggtggctcgtgtctgtaatcctagcactttgggaggctgaggcgggcggatcacgaggtcaggagttcgagaccagcctgaccaacatggtgaaaccccatctctactaaaaatacaaaaattagctggatgtagtggtacgtgcctgtaatcccagctactcacgaggctgaggcaggagaatcgcttgaacccaggaggcagaggttgcagtgagccaagatcgcaccactgcactccagcctgggtgacagaacgagactctgtctcaaaaaaaaaaaaaatgtaacgcacttgaaacatcccgaaaccacctcctcccccaatggaaaaattatcttctataaaactggtccccgatgccacaaaggttggggactgctgatgtatatgatttcttgtagctagacatcattcattttcatgctgaatagcattccattgtgtgagtaccacaatttatctattttcctgtcaattgtgaatgttaccagttttttgttattaaaaaaagatttgtcgtaagaattcttgaatgaatttctcttatttaggaataaaattattaggttgttggatatatgaatgtcccgctttaaaaaaacatttcccagtggttgaaccaacactgcccccaatactgtgaaacatatcctcttgttctgtatcctctccaacacttggtattatcagatttattttttatttatttattttttttgagatggagtctcactctgtcgcccaggttggagtgcagtggtgtgatctcagctcactgcaacctccatctcccgggttcaagcaattatcctgcctcagcctcccgagtagctgggattacaggtgcttgccaccatgcttggccgatttttgtatttttagtagagacggggtttcaccatgttggctaggctggtctcgaactcctgacctcaggtgatctgcctgcctcggctttccaaagtactgggattacaggcgtgagccactgcacccagcctcagatttaatttttgccattcagttaggtgtaaaatgagatctcatttcagtcttgatttgcattttagttattagagaacttaagcatttctccatatgttaattgaccatatgcatgtattgtgtgaaatagtgtccaagtcttttgcctgtttttctgttgtactgcttatttgattgatacaagttctttatatactctttttttctcaattttgtattgtgttaaaatacatataaagtttaccattgtaatcattttcaaatgtatagttcagtggtattaagtatattcataatgttgtataatcatcaccaccatccatctctaaaactcttttcttcttcttgaactgaaactctatacccattaaataataactcttttttccctcccctacaacacctggcagccaccattctactgtccatctttatgaatttcagtaatcttaagtacccatgtaagtggaatcatagtatttgtctttttgtaactagcttatttgacgtagcataatgtcctcaagggtcaaccatcttgcagcatgtcagaattttcttcctttttaaggctggataatactccattatatgggccaggcgtggtggctcttgcctgtaatcccagcacttttggagattgaggtgggtgggtcacctgaagtcaggagttcaaaactagcctggccaacatagtgaaaccccatctctactaaaaaatacaaaaattagccaggagtggtggcacacacctgtaatcccagctactcgggaggctgagacatgagaatcatttggatccgggaggtggaggttgcagtgagccgagattgtgccactgcacgccagcctggtgacagagcaagaccctgtctcaaaaaaaaaaaaaaaaaaaatccatgatatgtacataccacatgttgttatccattcctctgtcaatggcagccaggcttctgccacgttttggctattttgagtaatgctgtcattagcatggctgtacagatatctcttcaagaccctgtttttagttctttcgggtatatactcagaagtggaattgctggatcatatagtaattctatttttaattttttgagggaccaccataccgttttccacggtggctgcaccattttacattcccaccagtggtgcacaaaaattctgacttctccacatgctcaccaacaaattattttctgtttttttggtagtagccatcctaatgaatatgaagtgacatctcattctagttttgatttgtattttcgtaatgattagtggtgataagtatcttttcatatgcttatcaaccatttgttacatatccttttttttttttttttttttgagacagtcttgctctgtcacccaggctggagtgcagtggcacaatctcggctcactgcaacctctgcctcccaggtttaagtgattctcctgcctcagcctccccagtagctgggattgtaggcacccatcaccatgcccggctaatttttttgtatttttagtggagacagggtttcaccatgttggccaggctggtttcaaactcctgacctcaagcgatccacctacctcagcctcccagtgtgctaggattatgggcatgagccactgcacttggccaccatttattttatatatatatatatatatatatattttttttttttttttgagactgagtcttgctctgttgccaggctggagtgcagtggcgcaattttggcttactgcaacctccgcctcctgggttcaagtgattctcctgcctcagcttcctgagtagctaggactgcaggcatgcgccaccatgcccgactaatttttgtatttttagtagagacgaggtttcactttgttggccaggatggtctcaatctcctgacctcgtgatccacccaccttggcctcccaaagtgctgggattacaggcatgagccactgcacctggcctgttatatattcttaacaataattatttgttccaagtatctcctttaaagacaaaagccaatttggttagccctgtctttttattactattgtgacttttaaatataaaataatcattttcaaaagtaactccaagatttttttaacaacaagtaatttggccatgaggaagtgacaactaaaaacttaattttatttattccaagggtctggaggataaaaaaaaaatgaaattatgggatatgtaaggaagatatacacgttatatatcttgggagagtcactgttttatggttcaggcatcttaaagcttctgctgtgaggcttggagtatataactggaaaaattaaagacaaaagccagcctataatttttttttttttttaaatgagatggagtcttgctgtgtctcccaggctggagtgcagtggcgtgatctcggctcactgcaacctccgcctcccgggttcaagcaattctcctacctcagcctcccaagtagctgggattacaggcacacaccaccacacccagctaatttttgtatttttagtatagatggggtttcaccacgttggccaggttggtctggaactccatacctcaggtgatccacccgcctcagcctcccaaagtgctgggattataggcttgagtcactgcgcccggccatgaaaatttcttagaacagccatttagccagtttggattagtttcatcattactttttacactgctactgaatttgccatatctaggccaaagaatgagaaccttcctctgtattcaggaatcaaaggaccagtatatgcaaagagactacgtaaaaagtggtctgaaaaattattttgtggcaaagtaatagagatatgagatcactggatactgtttcaaagacagtattacaaaaacagctttatgtgaggtgcatgttctaaagaactattaaaactattccatacatcaggtaatcaaaagttgaattttgagggatgtgatgatctttaaaaaattgaaattctcaagatacatgatctttacatgtacatgatctttacatgtagtaggttatgttttcctatttattctgttaacctcatgaaaatccagttcaattgtaaatactaaagttattgactacttttggcagctgttttgatgggaggtataacctttgagattaaaagttgacaatgaagaagggtgcaatttaagctccaatatgtagtgaacacaaatagaattattatctgaaataattgcttttatatccttcttattacagctcctcatttctatctcatcctaaatcttatatttacacatataaacttaacattggtgccatttaactatgtcccctaccacaaagttgatgtgaacatgatcttctcattaccatttcgtattctcatgttaatccatagcacctgcagtcagtgttaaggtagcatatttgtctattgcgctgtttctaagtccataatctcttttttcctttgttcttaacagaacagcctcaaactgcatactgttgataaaaataagcacattggaacatattctttctctcaggaattatgagggtttgagtctggtggaatctcagcctagaatccattgtttttattccattaagtcacccaaagcagctttttttttcctattgggaaaaaagttaaatgagaaattatacaagttgttttgctttccaggctttttatattaatatgggatagtgatcaatacctttagcatgtacgaattataactcgtcttttatactgttagtttttaacactaaggctcaaaatgctttaaactcctttttcttaataggcctttggcacaaaccaagaagattatgcaagttacattatgaacggtatcatcaaatggggtgacccagttactcgagttctagatgatggggagctgctggtgcagcagactaagaacagtgaccgcacaccattggtcagcgtgcttctggaaggtgagaatgaatgaggagatggcattaaaagttaaaggaaaaaaagcagcattttttaaaagcccgtaagcacattctagaaaagtgaattctttttcgtttttaaccttgttcttgatctgaaaatagtaatccaatctatgtaccaatattgtgtacaaattaaaattttcttggggtagaatgttagtgaggaaagatagcaactagttttcttgtaggattatatctgtatttctgtggcacttaatacactgaatgatgccacttagcctcaattcaattaaataaatacttactgagtacttgtattttagtcattgaactagttgctggggatacaaagacattcaagtgttcattcagtctggtcatgaacaaagacagtgtaaagaaattcctgactacggtgtatgtgtgtaaaggtgtgtgtgaatacaagtcatttagcataggggtggtcagggaaaactagagatgctatttaatctaggccttgaaagaccagttaggattttattgagtagacagacaaaaggggaaggacattccattcacaaataattaatttacagttataattagtatgacggcagaaaagttcagtgaggccccatgacaagggaacctaactacctctaaaggtctgggggatgagagctccctgggagaaacatattaagccatgacttgaccaatgaggagactctggccagccaaagtcactggggaggatgtttgaggcagagcatgtgaaaaagtcctgggcaggaaggagcttgaaagagaaagggagattatcctgacatgagactgtagaagcagatagaagccagttcatataaaaccctgtaggccatattaaagatttaaactatcttaggggcaatgggaagccatttgtaggattttaagcagtgaagccacatcatcatcactgctttatgatggagaatggattggaggggcaaaaagatacagaagagactaatggttagaagcagttggattagtcttaatgagagtcgattgtggtttgaagtatgtggagtagtgtagatggagataagtagactaattagaaatatttagaagatagaataaaaatgacctcattattattgtcaatcataattatgctagcagtttttgagcccttgctatttgccagtcactctactagcactgtgcacatattatctatttaaaccccacttcagtcctccaagggtagatgctgctgttgtctctattttgtaggtggggaagctgaagcctagaaatatttgttagattggatgtgggcagaggtatcaaacatgaccccctgggttctggcatacatagcccgataaatggtgctgtttactaagattgggaacactaatggaaagcagatttctggaagaaagatgatgagttcagttttgaacatgttaaattcaagggtcatataggagaagtaaatcggaaatgttgagcagcctgttggatatgtgggtctggctagcagtagactcatgagttgccagtatatagactgtggttgaagccatgggagtgaacgaaatcacttacagtgagggtgtgggttgagacgaaaaggaggcctagaacttgtctctgaagcatgttaacacgtaaggactaaacagagcagaaaaattgacaaaagagactgagcaagagtaaccagagaggaaaggggaaagagagaatgtgtgttacagaagccaagaaaagaaacatattttaagaaagaggggaattatgaattgtatcaaatgctcctaagaggctgaaaaagataccaaaatgtttgttgggtttgatgacatggagatcatttgtgaccttgatgggagcctgttcagtgtaatggggatgggagccgtaagatttagtgaggatgggtgggaggtgaagaacaaaagcagccagtgtaaataattacataggcaagttccattttgaagggagaagaaggtgcagttttgaggggtatgatgttcagaaagagttttttgttgttatgtattaaactgtcagatagactagaacatgctaaaacacttttggaaaggcttcagggaagaggaagaagtcgaacatatgggagaaaggaacaatcagtaatgtcatgttcctgagaagatggaaaggaagatttgattggtttatggttgaacgagggacacagcttccaaaacagggaagggaaggcagggatgtctaaatgtaggtaagttcgtagatttgcttgcctttatgagaaggcctgagtctttagaattctaactttttacatcacatttgcttctaataaggcagttttcccctgcccccaatatcagctcttaagattgtctttttttgttagacaaatgatttgatagaactaacaacataagtactaatatgcatttgaatgcgttcttttaagaagcaaaacccttacactctgtatattttgccaaaagtttgaaagattaaggatatgtgagaatgtcaggaggcatgtatttcaccatacttttgagaaatgctaattagttcattaagtttagttgctaataaataagagaaaacatgtctgctgtgaaattgtgtcaggaaatgttaatgagcaactagtcgagacctcagtatgttctggataaaagtttaaacttgttttatttccctttgcttaggttggcttttttcccctgacttgctcatatctttatgcaggccctcctcacagtgggaagactgctttagctgcaaaaattgcagaggaatccaacttcccgttcatcaagatctgttctcctgataaaatgattggcttttctgaaacagccaaatgtcaggccatgaagaaggtatcaagattttactttcattttaatttcctatctcttaaatgtgtgtgtgtgtgcacatatatatgcctttgtacatgtatacatataaacccatagcaactatgttcttctcaagtggaaccaaattatcagcagaatatgggggaagcagtgactgttttagattttctaactttgtaatgtattttattgagtacctttaccttctaaattatgctttgtttaatacatattaagtttcattgcctagttttgtatcaatttgattaaaagagttatagttgaaagtgtttgaataaagtggacaaattcatttaggattttttaaagttctttcattattgtacaaagttgaactctttggggtcaattaagttgaggaagacagagatgtatcaatgggaaaatagtcccaggaatccctacaaaaggatagttttatattaggtaataatcagaatctgcttggtaacttaatgcagttctcatacatcttcctttctccaagtgccactcgtcaccttcttaattaacatggccactttctaccatcagtgaagttagaacagcatagaatagaatcctagagctgaaaagactgtaagaccatttggtccatctctcttacattcaagcaagtgccatgcaacaacaacaacaaaaatcaatgatgaagactctaaatggctgttccatcttacttgttagatcatgtttccattgctattctaattttgcatactgccagtcaagaaattattttttgtatccagctgaagtatttcttttatttaaattctttttttcatgcttgatcttttatagatatgaactgaccgtaagtccaagagatgtgggaaaatcagaatgaggtgaaagaatcttgagaattgaagtgctccctagtaaagacagctcagggttttcttttacattgctcttaggcattcgctttataaagatgtattgtagaattcttcggtgtttctttgggaaagagactgaagaagagaaatagatttaaaagatgactcccaaaaaatgtaagcttgagaagctagtctcttgtttgtgcaggtggcagaaaattgcacagggtacttcagatggatggaggaagccgaacttgtagcaggattccaggcatacacattgaagagtccagagaaatacataaaaatgtttgaaattgagtgtgaaaaggaaatattgccagatgcaaaaagaacttataatatcatagtttattctgtctctgaggtgaaaccaatagtatctgtccttcccaggaaaatctgaatagaataactgggaccagtgatttccctagagtaggtagggctgtttttctttgtttttcgttttccctctgatgggaacccttaacccacttcttctggtaaaaatttaaataacagcccttgaaatctgtagctgttgaatgtcccatttatttattgaatagctaattctatttgcattctcctaaatcatctattcctgtgctttttcaaaagtagtagtcatctttgcagatggtaaattactccattgctttccaccagctgccagcttctacctcagatgtactctgagatgtgggtggatggtcctagtttttctataaagtttttaaaaagtacttcaggcttctgcagatcaaagctactttgtaagtgtgagatattatcatttttattattttaatctcttgcaaattgacttgaagggggaaggtaatatgtgctgattttagaggcttaaatggttaaattaatggtttaataacttattatttaatcttcaaattgttgaagcctttcaaggtagagtttcagatgagtagaaagctagggagtataaaaataagtgtccatacaagcttattcaaaattgttttaattcatgattcactgtccggatcatccgtgcactcttaaaattataaaaattatttctgcttcagcagtataacaaatttatattagaatttttggttttccttgggggaaaaatattattctttgtcattaaagttcagaaaagagaaaggaatgaagcataggtttcttagaaatatattagaaatattacaaaatatttccctgcaaatagttttcacattgttacctaatgataggttgacaaaagcctgaggggtcaaaccagtctaaagatgctaagtcttccaggttgtttttgaaaatgaaatgtaaatgtcattctttagtataagttctagtctacctcgcactactgttcttgcccctcctttttttttttttgagatggagtcttgctctgtcgcccaggctggagtacagtggcgtgatctcagctcactgcaagctccacctcccgggttcatgccattctcctgcctcagcctcccaagtagctgggactacaggcacccgccaccatgcctggctaatttttttgtatttttagtagagatggggtttcaccgtgttagccaggatggtcttgatctcctgacctcatgatccgcacgcctcagcctcccgaagtgctggaattacaggcatgagccaccgcgcccggcctgcacctccatttttagtgtgaggatggaaagaagatgttttaattttttttcagagcacaaataatttatagagttttataattctggagaaaacctttcttttgttgttgtaagtgcaaaaattaaggtagctttttctaattacagaaataatttagaaaatacaagaaagaacagaagaaaataacaataaattcatatttgtccttcaattctcttttctactcagacacatgtgtacacatgaacacatataccccctcccttatatattggggattacattgaaacatactgatgtaaacttgcttttttcacttaaaatattatgaacttttttcagtgtaactaaagctaatctgaacattattttaaattaatagctgtctaatatctgaacaatccctttttgttggacaattaggttgtttccaggtttttttcacaattataaataatatatatcaaagagttatctatactcccaagttcattgcagcagtattcacagtagtggaatggaatcaacctgaatgtccctcagtggatgaatggataaagaaaatgtgacacatatacactgtggactgtaacacagccatttaaaaagaatgaaatccttgtcatttgcaagaacatggatgaaggacctggaagacctcatgttaagtgaaagaagccaggcacagaaagtcaaatatcacatgtcctcattcatatatgggaactaaacaattgaactcagggaggtagagttagaatgatggttatcagaggctgggaagggtagtggtaacaaaaataccattaaatagaagtaataagatctagtgttggacagcacaataaattaactatacttaaaaatcatgggccaggcacagtggttcacgcctgtaatcccagcactttgggaggctgaggtggggggatcatgaggtcaggagttcgagaccagcctgactaacatggtgaaaccccgtctctactaaaaatacaaaaattagccaggcatgatggcatgtgccctgtaatgccagctactcaggaggctgaggcaggagaatcgcttgaacccgggaggcagaggttgcagtgagctgagagcacaccactgcactccagcctgggcgacagagcaagactccatctaaaaaataaaataaaataatgtgtcgttcggggagtgggcctggtggcagtggcggtggcagggaaagagttggagcagtgccagcggcaagcgaacaaggtgacggaaatcacgcttaacaactttgacaaggtcctggagcatgatggaaagctgaccgaactggagcagcgttcagaccaactcctggatatgagctcagccttcagcaagacaacaaagaccctggcccagaagaagtgctgggagaacatccattgccagatctacttggggctagtggtgggtggtagcctgctcatcatcctgattgagcagctggccatctttctccctcagagtgacaccagtaatgccccacagacctaggatgcaggcaccacctcagggcctggggactgacagctggtcctgagggagaagccaaatggctgcactggctggttccggtctccagagaaccttggtgtttgctctcccctgacccaccccagtgagtgccaaagggcagccccaacacgtgcacccctgcatttcttgtcatgccacagactggccctcgagggcaccctgccatactggccatgccgggccagccccacctgaagctcagtgaaagctgattaaaaaaaaaaaattatgtatagatcaaaataactacaagagtggaaattgaatattcctaacaaaaagaaatgatacatgcttaatgagtttcacaactacccttatttgatcgttacatgttttatacttgtatcaaaatggtgcatgtactccataaatatgtataactattatgtagccataactaaaaatttaaaatttatataaaaacagtattccataggactaccaaactagggaaattactgcccccattttctcattagatttttcttcactagagtagtataacatgaccgagaatttgggcttgctcagctctccacactgaccggccgaatgaccttggatatgtcatttaacctataagccactgttttctcatctgtcaaatgaagataatattaatagctgcattatagggttatgagaattagatggtaatttctgtaaagtgtcacagtgcctgggatataatatgaaatcaatgaagtgtagtggttatttttacttattattatacatacattttttattatttccttatgacaaattctcagaagtgggattgctaaggtaaaaatattagtattgtaaagatttttgatacatagtgctatcaaaactcttaggtaaaaaatgctcttggttttataaagcctacgccttcagaatgttgtactaatttacacttgtagcttcaccatataagagtatgagtttcttgggattctcacccgtacttgatattattaaaatattttttgccagttggataagcagaaggttggcatttagttatttctttagctacatttcaatgactaaatgctcaaatttaagatttttcaaaatgttttgcaatgacaatagtctgtgaaactgaaaaatatgtaacacattaatttttgttaaagatgtgtggtctgaattagttaattcatagagcatctttacctaccactttattacttaaaccaacaggtaagagttttagtagagagggctgttaggcttgctttaatgagtacatgagattttattataattatactattgcctctttttcacaaatggatggtgctaaaatacgtgaaagtagtttattctcaattaatttaaaattcaccttgtacttctcttaatttgcttattagtgaatcctttctccatggataaactcctcaaaactgctgaagtatgtatgaggtattgtcctcacgttctggggggtataccatatgttccattaagatgtttgaagtattcacagaccttccccttctcccctattttacgtttgcttcccaaacttcattctatttttaaattttaattcctttatccatttttgcatcaatacttgtttaaaaatctattttactagttctattcgtgccattaaatgaacaaaagaagaaagcagaatttgattttaactaattacctaatcttgatgctttctgagtatacaatcagtagagatgaagtagaacaatcagatagaactaaattgtttgaacaaaattaagtaaaactaccagtgatttataaaactgtacccattaataacatgatatagtcttattttcaaaggattgaaaattaatggaagaaattttcctttccactagctttgcacgaaagaaataatcttctttgaatatcctcctgtaaatcccactgcaaattgtagtctgcacagaacagaatcgtgatgcctaatcctcctcttttcatggtttagtctatacaaagagcagagctggaaattggatcttttgacagcagttactaagcaacagaatttggatgtttttggttaacatcctaatatataatgtagctgatttgttgaagtttttgcatatattagctgagagaagtgggcactccggaagtgactacaggtccctgtatggctggggaggtgggcatttgttgttgttttgttcaatacactgtgtcttttggcatttgtatctctttggcgtagaaaggaggctggtgcagaactttcagaccttgtgactttttatattattaagaatacccttctctgtggctcacgatatgagaaaatgtaagattttttcctgaaaagcagggagaacaaataaaggattttaaggtcattccaggaagctttagagctttgccaaaagtttaggtccacttcctgaggcagtttcattagcagacagctaatgtttgcttggtctactcccaagttatttttagaaacgagattattactgatagcacccatttgaatttgctcatttacgtttttatatgctaccaaatatgattagagtatgcttttaactaatcgctgacagatttactgcattagggattttctaagctatgagattcctacagtcatcagatttctactaactaggtacttcacgccaagtacttcagaactgagatgaactctttcagctcccagaagaaccagagtgtttggctttgcttacctaagggcactaaggaggtcccagaggatggagggctgaatctcctgagagcatgcttgttgtggcttgtgatcccgaaaggctgggattaatggaactaatgctggtgtgctcccatttgcacttgtgtagactctggagcccgtagctgctgcccctgtcccacacacaggtggctccccagttgtctgaagatcccaggagtgggctctgggacttaagagcttgccgtgtccttgagcaccacattcagacctgcccctaatccctgcgtggcagagccccgcttctcctgtccctcagtgctcacggagtgcatgtggcacactcttgccttaagcccaggctccccacactctgggttgtctctcatacccctccagcctgtgtcgtacctccacctttgcatgcaagagaggttacagtttaatatgacaatctcattatgtgcacaggtggacataacgggcttctgtgttttctagagctgctcttccttcctttagagtagacttcccgttatttcatgagacacaggctgactgatgccactctttcccacattgtttccttcttcagttcttcctgttttttctttagccttctctttcagacttccctcctaactttaagaccctatatatgtatgttgataattttacctgttctacaggaaacttcataatagaactgggctgactatacattctttttctgtgtgtgtgtgaatatatactttttatttagccatttttgtttacaattgaaactctgggaattcaaaattaacatccttgcccgtgagcttcttatagacaccagaaaaagtttcaaccttgtgttccacattgttctgctgtgctttgtccaaatgaacctttatgagccggctgctatctagtttgacggggattctcttgcccacaatttcgcttgggaagaccaagtcctcaaggaaggcatcgtgcacagctgtcagagtacggctcctgggacacttttgcttattttttgtacggctttttcgagttggcttaggcagaattctcctctgagcgataaagacgacatgcttcccactgaactttttctccaattcgcgtactagccggacttggattttctggaaagatttcagttgaggaacgggaacaaagattatgatagctttccgaccaccaccaacttcagtttccttggctgccgtaatattcagctccctgagctgagccttgaggtccgagttcatctccagctccagaagagcctgggagatggccggactcgaactcgtccggcttctcgccattgggcttcacgatcttggcgctcgaactgaacatggctttctcctgggagaacttgcagcgcctgcttaggaagagacccaaatctcgcgagagcacgtcaaaatccctacattcttaagattaattttggggggagtctgtaagatacggttcttaccttcttacctccagcctcagtcctcctggcatcttctgtgttggggcatctttggatctagagcaagcactgtgtgacctgctgtgtgctataactcacggtgagtttggcacttcagttgtactagtctggctagggcagtttgtacaattttacttttctcgcatctttctttccagtacctctcctcctgctgggatttatctacctaaagttgtggtgcagcttcccggcttagtatgtaaatatctcacttggattttcctgtggcagctaacctcacgtacttgccagccaactctgagtatcttcttagtgagaattctgctggggcctgggccagaaagggtgaaagggactaagggactgaggagactaggcagaaatcgtggatcctgggaagagttatgagcacaggttacactagtgactagataaggaagaaaatgtacatgtgagaagagaaagggatgtgtgtgtatgtatgtatttaaattagagcagagtagctacccggaggagtttcagttgactggttacctgaaactagtcaagttacaactggaattgcacagccttcgtcatggtcggtgtgttaatagagcttgctgtgagtgcacctctccctctgatagtaattagcacagagaccgactgcaaaaaacaagaacgtcactacttgatattaagtgactgctgcaggtatttttcctctcaaatgttatgtgtaggccatgcagtcaactgtgaagtgatttggaatgctttgtgaattacagtgtctgagataagttggtgagactacataccatgtagcaagtcatcattagtttagacctaagcaatgtcctgagtaaggtccttgcagccatataagctgtacattgttttgagaaggaaaaacatagaactactgcaaccagccaggctgtggtgttccaggtccctgtggctctaatccatgatctcacagcctgatggtcagagttatatgctggcatcagagcttttagtagaattctgaaaaatgttttgaaaagcaaagcattattttcagtgattccttaaaattacctgagtttataagataccacattggctgcggttccatcttcaaaaaaagtagcaaagaaccgctgtagaactgcttctgagcttttcagttgtctcgaatgtaccaactcaaagccaaaaggaaccatcattgtgtatcaagagactgaaataaatatcctattctcattttctctttttctgtgtttggggaggagaagataaaaggcccttcccttcttgctctttaaatgtactcatgatccattttcaaaccagcttcacctctgtgttttatttcagttgccaaatcaggacagatccttgactccagttttctctttcatcaccacacccattcattcaccaagttctttcagttcctcctcctaaacatctctagattctgtccacttaccagcacacccactccctggccaccatcatttctcacctagaactccacaatctcaattaactattattcccctctaatgcttttctatacaatcaggaaaatgtttctaaaacataagcctgacatgtcagtccattgcttataaccctttagtggcttgttattgcctttacagtaaaattttaactcatgaaatttgtaagactctttacgtccaagttccttcatcacctcttctaattcatctcacctaccactccactgcattgacaccaacaccactttattttaattcttattgaccgttcctgcagtgttcctgaatgttcacatctctgtgtctcctaattttcagtatattctgcttagaacactttcttccaccctttccactggttaactgttgttcatgcttcaagtctcaggttaagtgtcacttcctaaatttaggaaactgtcctgactccctaagtccatttaagagtcaagataggctgagttatgctgcatgaaaggacaacccgaaaatctcagtggcttaacacaacaaagtttattttttatttacactactatatctccgtcatggctcagacagtgagttctgttcattatattttctcagagactcaagctaatagataatagaggccccgccttacatctgattccatgatagccaaggcagggaaaggagtatggtgaatcatgcagtgactcctaaggcttctttcagaaaggggtgtatttcccctcatatttcattaaccaaagcaagccccatagttatgcctaacttccaaggcactggggaaatactgcctaccctgtgcccccgtatcatcttgtatttcccctagcctaataatgtcatgctttgttataattacatgtgacttgcttccccaactctaacttttgtgaaagtaggattatttttgtcttatttattatcctctgcagtgccttcattaatgcttgatacataataagaattcaaaaatatttgttgagtgagtgaatgaataaggcagcactccaagactcaatccttaggcctttttttcttcttcttctgccatttcttcttgaagatggcttcctctgtcatggtttcagcagtcactgccctgagagtgatttccattccctgacttcaatcagatatctccaacttctcacttaatatttctacttgaatttaaaatgtgtaaatttattcttttagtaaatacttcttaattactctctaataaggcattatattaaatgatatgaggatacagaggtaattaagacagcacttgccatctgagggcttgcaatctagtataatacaaaaatagtacaatgaatcaataatatatatacgtaatatacaaaatcctgtgccaaaggagaagacaagtgatttatggcaagatggaattggaacttgtgttgtttcaaccattgaacctacagagcagacatcattactgaattctgttctgtgctgggcactacacataacatgaacagaataaagcttttatccacctcacagtccagtggggagacagatagcttaggacgaaaggatagatggggtttagacagagtgtgggagggtaattagggggtaaagggatggtgcataggaaaacgttttcaccagaggggttgacctgattaaatatctggagaaattgtcagtatttatgccaggaaagaggtaaggaaggaactgaatcaagatggtcacagtgagactctattatggtaacttaattgttaggaatactttaaaaaccaagtatacacaggttgtttttaaacctaacatgaaaaatggttaatatcatgagtttgactttatttctgtacctaattataagtcttcaatggttaaaagatacccaggaaggaatatatgccattccaagcaagatgttggtgcgggtggggatcgggtttactatcttggtgtgctgaggttggttaccaaccagagagagtgggctgggatgcagaaactaattcttactcatgacactgatgagatttcctgagccccacctgtagtctctggaatagtaccttcatttccaaaaaggctagtctcaaggccttgagtacttctattcaacttgcagataagctaattcttctatctgatttgaaattactacatccttgccaggctaaaaccgttccttcactgcttaatttcattctcattttcttgaccatcttaagacagtgcattcatatcttttgtctggttttatacgtacatctatctgatccttcatactcaacctttaattcttttgtaagctcttttaccattatggtctgatttgagttgacagaattctgatctttcagtgttacttttgcttaacagagccacaattcttatagataataaaatggcatctagttttattttacacatctcttgtggctccatctagctcttgagtcattacactaaagtcctgctcctgacacagataccagagaccagtgtgatagaagtgatgggatgtgtcagttgattaatgatcagctagtccccagcctgcccaggtgtgacacacacagctgttagtgctgaaaacagccttagcctgctctctgttcagcggtgatccagtgtgtcaattctaatttattgtagtccaaagtgttggtgttttcctgtgctttgtttagtattgctcaagaagtaactaaacttcttggaaattgtcgtaactgtggaggacagtgagataataaatgactttgttttctttcagatctttgatgatgcgtacaaatcccagctcagttgtgtggttgtggatgacattgagagattgcttggtgagtcctaacttctgctgttgtattatctttgccacattacagctaatatctcaaaagttacaagagaaaattaacaagtatttataaactgtaaagcaatagaaatacctttctttgtcttacaaggaaatataatgttctctcttaaatagctgacatcaatgatagtattcattttaatatgccctgtgactataacaccattataaactgctttcttgtaagggcccatgtctcattttgtatcttccagtgtgcccttgccatagtaaatgattagtaattttcattgatgagtatatctgttatttaggacctctgagctcagaaattcacttgtgaactttgacagaactaatgaaagaagggtttaggatcacagagaaatctgcaaattcactaaaacactaagggcagaagttgtaagctctctgcacctcagtttctgctcttacaaaacagagactataatccctctcttgcttatcccacagagtaattgtgaagacaaaaatgggataataaatcttgaaaaaattttgtaagttaaaagtgcagtatagtaatttttaaaatatgtattaaatatctcctgtgttgaagtgcactcctacagaatacaaacatgaagaagacttggtcctggcacttaactcataagaaataaactgcaaggaagggccagaaagttgttaattttatttcactgtaaaattaaatcagtctgacataaattcattacaacaatggctcaggaaggggtaatacactctattgaaatggaaacccacctggtgacttaataacatctgaaaatactacccagtgtctgaataatcccttcttctttaagctgtccataatggtgtagtcgtgatttcaagctaactgttcttactgcatttttcccatgattttcagacctgcttttggtcctctgttatttatttttttaagttttggcagtgtctgttataaagcaaagcaggtatatctgtgaggtctccataaattgatagtgggttttgggtctgctaggtttgatacatctcagcccagtttatgggatgatttctttaaaagcttttaggcacaaactcatagctctgtgtaaattcctttatcttaacacaattgaggtgtgtggtcatagcaacactaccatgtcaggaatgtgtgccctctgagtacatttcactggtatgaatagttatcatctgtgcatgcttgctcatttattcaataagcacttgctgagcccttcctcctctggtagaagtattagagtctcagaaaaagacgctgctgcctgtctttataacatatgttggcaaatgttaatgcaaagtagaatgtgccatgtattttggatattctgtttttttttttatttttattttccctcccactgttctcatcaggtggatagtctgaaaatggagggatcagttttgacctcagggggcctgcgagtagctctaagcccagggcagaggtgcatatgcagtatgcagagaaagctaagcaggtggcatttacgctgaatcttgaattattggtaaatgtttaacaggtcagatgttctcttagaaagttatctgttccttaccatctgagggccaatcttagtggttctgccattgtttccgttttattgaaattccttattttcccctttgcccattttctaacatcatgttttaatatcagtgtactgaatggccatggtttgcagtaacttcttagaaatgcttggtaaatacacctggaatttttttttccttccaaaataatcccagaaaaaacatctacatgaactcaaagtgaatatttagaagctttttcaaaaaatttatagagccgagtacagtgggattatggcaacctataatcccagctacctgggaggcttaggcaggagggttgcttgagcccaggagttcaagacaagcctgggcaacatagcaagaccctgtctcaaaaaaaaagttacagataagagttcttatattttaagcatttaggttattagagatattttttcttattataaatagttttatgactgttatttaagactgtttactctttaaattttttttttcttattctatacatattctgcttatgtagggactgtgtttacttttgatgcaaaaaaaaaaaacaaaaactgaatgtttggaatatgtacatgtgtatcaaatccctaaacataataatgtttcttttccagattacgtccctattggccctcgattttcaaatcttgtattacaggctcttctcgttttactgaaaaaggcacctcctcaggtaaaataatactactaataaggaatattttaacaaagagtttttcagtaaatcgcatataatgatacaatctttaaataagcaggttatcataaacataaaattctgttgttgaaaggattttgaaaggtcgtccagtcttgacttctgtttaaggtaaattattttatcaacagaatttttccattccttttctgaagaaatcaaaatcccacagtttctgtgtggaatacaacaattagcattgtattttgttgttttgtaagttttccaccatattacatatccctactacctccaactgccaagggagattatgatattaatagagaaggcattgaatatgttcccatatgtttcatttataatttcatgggttttcctaaaaatttgtttatggggatatttaagtttattttctttgggcagttaaaaaactatttttaacagatgatcttgagttatttttcttgggtcatgtggcacttttgaggagtgaatttatagccaggatcttgattcctgtgtttgcatttttactgatgtggctattagagacttgtgattttggtaggttaacaaatttaaaaccaacctatgaaggttggttaaatatgttaattatgtagaggctgccagagcatgtttggctgtgtcacaagacatgagttctcttgattgattctgcatgctgtaaccttgaaaaatgccaatcaaaggcaggtacaaagcagttaagcactgacttgaaaagcatcttaatgtctgtatgagaatctcatatttaaagttagagatagaaactaatctgtaaggaaaatatttactcttaaactggtgaatctaatttttaatttaacagttatatatgtgcgtgtattttgcacttaaaagtaaatgacttgtcttggtttttctggagtttttttttaacttctaaaataatgaaaagaaacataacctataatagtcttgaagatttgcaacatatgtgtactgtggaaggatttttaaatcagcttttcataaaccatcattcctagtaattggagtcttagcttatactaagggtgaagttagagaggtgagtgtattttccctttctctgattcctgcaatattttcttaagtaagtaaacgtatatatctaaagttgctgaaacagaaataattatctacatatatcatgattcctccaatgttttcataaataagtaaacgtatatatctaaagttgctgaaacagaaataattacccccaacatctacatatattatgcacacaaaaaaactttatgtcagcatattaattataaaaactattagaatgtgagactttttctaggcatttaaatttatctcttaaaatagttcttcttttttagctgaaaataatttatgctaaaagtcacttgggagaaggaagattaacttcagtgctatcttatacttcttgttctttacattgttaaatactatacacattgatttaaacagaggtacacccccttggctgagaagcatttgtgatccaaagtagatactaacagaaataaacagaaactattaacgaatgatctgccacactaagatttaagaataattgtttctgtgttgtaaaacttattgtaagatttttgagggaaggaacattatcttatgcttttaaatctcacagccaatggcatagaggcttatacgtacatgcttcacaaataccttatcaacaaaaaaaaatttttcagtgtcttttcattttagtgggctcaagtgttttcatattgctggagtttatatttagacaggatatgataagagtgaaaacattcaaaaataagtaaagttcaaatggccaacaagtataagaagaggtactcaacatcattagtcatcagagaaatgcaagtcagaaccaatagtgagataccactcattgcatacctgctagaatggctatcatcaaaaagtcaggtaatgacaagcgctggtgcagatgtggagaaattggaacctgtatgcactgctggtaagaatgttcctcaaagaggttaagcatagagttaccatataacccagctattccaccaagtatacacctacaagcaatgaaaaacatatgtccacatgaaagcttgtatgtgagtattcatagcagcattattcataactaaacatttatctgataaaatctagtatatccatataatggaatattactcagcaataaaaaaaagtagtaccattacatactacaacatgaatgaactttgaaaacatgctaagcaaaaggagccagtcaaaaagaccacatattggatgattccagttacatgaaatgtccaggactggcagatctataaagacagaaaatatatttgggatggcctagggctgggaggggagaatgagaagagtgagagggtcactgctaatgggtatggggtttctttttggggtgatagaaatgctctaaaattgattttggtggtgttgtgtatatctgtgaatatactaaaatactgaattgtacactttaaatgggtaaactgtgtgctctgtgaaccatatctcaagcgattacattttttagaagtggtttaggagctacttaaatgatgaaaggagacatagagttagaagtgaggggtgagcatccaaggtacgtggcccagcttgggagaaagaggaattggatcatttaaaaagaacatggagtgaatttatctaaggactgaagaggaagaatatagaaatatgtaagaagtaagagatgtggttgccttagtgattggaaatggcaggggttctctctgaagggaataccatctggtcattaatctgaatttggtgactctgacctggactgccagattacctgcagtatacatgaatcagtgacaggataaattaatatttgtagtatttctagttggcatgtatttaacaaaataaaaatgtgctttgtcataccaccttgctttttaaaatgtttatattctctcaagaaaataaggggaaattttcaggctgatccaagtgttaagaatattagtcattgtaaaatggaagcattcactttgtcaaaccattagcatatagttttttcagatgtttttaattaaatattaaaggtatattcagctaaatattgtagaaatgcatagagtgatagaaaaatatttattactggtaagaaaacaaaagttgtgagcatttttctttaaaaggaggaactatacttatatacactacagtaatcatatcagtcacagaatcctcaattttgcatttgttgtatttccagctttcacacagaaaaattgtgtgtgcatgtgtgcacgtgctcaaataaaagaatcccttcaggggcactatgttgttatgtatccagatattctcttttctccttccacccctcccccaccaccccctcccttcttgtaaattggcttattaaaactggttcccaagccctccttttttccctttgtgattgccttggtcttggattttcagtgtagaactaaaaattcaagtcagatttcagttactaggataattttctttgaattttaaatttttctaagtaaatgcatagatttttaatgaacctggtattcagtggatttgctttaaatttagctgcagagttaatttcatgattgatttattagccctttgaaagtataaaaagtggtatctgcagttcgtgaagagtgaaaaacatcatcacattttgtttagcatctttttaaaaccaattaaaagcttttctaaaatggattgaacaggagaaaataaaacatgttccctaggtctttatttcaatcaagtttccctgtgttctgcaggagaagagatcgagaggggatagaaaaattgaaaagggctgtcccagcagggagccaagccggaaaaaagggcttctctgagaactcagcagcagcagctaagaaagctcccagcctgcttcatctacatgcagagtcacacaaggcatgggggtgctcactgtcacacagaggtttcacatgtgcttccctgctgattcctgtgaaaagctaacaattggcttggagggtaaaagaccactgcagttcaccctccctgagctggacgtacaatttgtccagtgttaggaaatgtccggcttagcagtgagaggcttgaagacacccctccttccagtgagattcctaacgccgtctcttttacttgatgacactggggctcttttcaagttttgcagatttatggaagttgaggggaatgtgcttttcaagatcaggaggatgaaagccttggtcttaatgtcaaggaggaagcggtagtgagtggtaaggccaggtaactcttcctgcagcctgcaggaccagtggcttgatttttcctcatagatctcttctgccaccttcttttttttttctttttgggagacagagtgtctgaaaaggaactccttgggctgtaaaatgacatgattccccagtttcctcaacaagtgtgagagtagttaagcctattaacctcactgtttaatgctgggtttgacacttttgtgcatcaaattggaaaacctcatctgtatgtaacagggtagcctcgtaatttatggaggagcaatccttcctcagttcagtgcttcccaacctttttagattatggtgcatacaaaatgataacatctgatgatacacttgggtaagtggatgaggccactcacaactggccagggctctagccttcccaacagctggcaggaattgatatcttagtccaggtataactcatttgaagctcaacgattggaaaactctttggaaactttaaacttttacaaaagaagaattaccactccaacgtcatagcagtattactgaagtagaactcagacctaacagttattagtgttctggctaaattttatgatgttgttgagaatagtaacttcctcgctgctctgacacctaggaatattacctaataagagagaaatacagcttaaagcttggaggacctaaggtgtggaccaataagaaactgtcagcattctcaggatggggacttgggtagacacacttgtttctgcatgagttttgtttttaacatcagcagtctctagacaacattgctttcatgtagtccttacatgacatcttagcagtcttacttcagatatggttataggacatcttggtatcttgataatattaagcaactctttaggctttgggttgctttagtgaaataagcagataatggaagagactccaaatcatgcaggcctaaacatgagtatctctccatctatttgttcaaaattaactctggctaatgactatgatatgactcaataagatatataaccactttaggaaagaggcttagtcattttgccagacacattaattttaatccactgatgtggtgacttttgcattgggcttcatttcttttatctaaaaaaaaaaatgatgcttgacagtttagtggcctgcttagtaagtcagtgacattagatacctactatatttataatattctctttaggtatactttgcttagtatagtagattttcttggaaagtcctttgtagattgaacatgtgtgtgtgtatatatacatatctctgaggacaaaggaaatttccagagatctgtgttcttgttttctggacagaaagataatgtatagtgaatgtatagtgatcaactaagataatgcctagtgaagccctttgtaaacctgtggactacatagatagacagtattaaagaacatatatatatagtacatatatatgtagattaatttcaaatgtatcaaaaacagtgaaataggccagacattgtggctcacgcctgtaatcctagcactttgagaggccaaggcaggaagattgcttaaggccaggagttcgagaccagcctaggcaacatagtaagaccagtctttacaaaaaaaagttagtcgaatgtggtggtgagcatccgtagacccagctattcaggaggctgaggcaggaggatcgcttgagcccatgagttcaagaccgcaggaagctgattcttaccaccgcactctagcctgagtgatagagcaagactctgtctctaaaaacaaaaccaacaaaaaacagtgaagtaaattattttataaaacattgctacagatatctgctgaataaaatcaaattttcaaaatagggttttgttttggttttggtagagcacatctatagtagatattaataccagaataaattataagatatatatgccattttctgataactcaaaattaaatatctaaattttaatcatcagagaaatgctaatagtgttgagacgaaatattttttcattgctagaatgtattcttccagatccattgccttaaataagttactgtggcattacattagcttttgaaaggtggggattataacgtcgtagtagtccatgggtgccatgactctagttaagagcaccctttctgtagaacttactctttgtattgaacttgaggtttaaaaaaaaaaaaaagaaacctatgtcttagctcagatatcatctggcattatagccttgaacgtcccttaatttcttggtgtctatttcttcatctgtaaaatagagataattcctcatgtgttacctactctgttgagggtcagctaagataatgtgtagtgaagccctttgtaaactggtggactacatgagctgtccaggcgcagtggctcatgcctgtaatcccagcactttgggaggctgagacaggtggatcatttgaggtcaggagttcaaaaccagcatggccaacatagtgaaacccgatctctactaaaaatacaaaaattagctcgacgtggtggtgtgcacctgtaatcccagcgactcgggaagctgaggcaggagaattgcttgaacccaggaggcggagtttgcagtgagctgagattgtaccactgcactccatcctgggtggatggagtgagactctgtctcaaaaaaagaattgcctttggatagtccacagaaccttttcagcttgtaagataggaaaactgaagaacgtataataactgctatatagaggaagtttccataggaagtgagttcagagctcccactttggaatgcctgaacccaacttccctcatttgcagtactgggaaaagaaacctgcttccccatctctcattcactgaaatttagaagcttcctacatcctaagacaaatactcttgtctggggattagggattcctgttgtagaaagaagtaggaagtggagacaggaattgccaagatcagtaggccaccaccaggtcacacttgtcttcagcctccagggactggcccacctgcttcctttccctgccaccacctgttgcttgtggctgaagttccccttttctcctaactcatggtgcaacaaagtggtgcttcacagtttctttcctacctttctgtcccagaaacaagaatgcagatctttggagatttcctgtgtccttggggatctcacaatggccagaagccctggccctccctctactccttaccctgttaatcttggatggtaggattataggtgatttcttttttattttgctttattgtttcctgtactttatagattttctacaataagcatatgttactttgataatcaggaaaaaataaaaaatgtgtatacaattatttttaacttagcagtataactgtcaaaaattccttaattccattgctttggtactaatttgctgctaaccactagggttaaatgagactacctttgtatctaagcttgtctatgtataataaatttttaaccttgttctttttatgacttaagatttaattgaatatctgaaatatgctgtgggttttggagtaaaagtgtgcaagtgcctcctaactctcacagttgtcctgggaaacccacctggcacttggctcagtgccatgctccccatctaaacttaccatggttgaatgccagtgtgactaaagttgaccaaggtagatggtaacgattgtcttaagcttcattgaaaggagatcggaagtttctttttcaccaaaaatatttcttttgacatagaagtttaaaacatttctttaaggaacatctgcttttattagatgtacatttaagaaatccttctcagtatagagataaaaagatgaataagacattgtacctgccctcagatggctcatagtccaagaacactgttcaattgtgaagtttgtgcacaaggtgggcacaggtcaagtagcaaatgaaggttaacatccagcccacatgctgcccaccaaggagtccaccctggtttgggactgaatctgccctgagtaaggttaccagatttagcagataggaatataggatacttagttaaatttaaatttcagaaaaacatcacataattttttagcatcagcatatcccatattttggtcagacttatactcaggtatttctctagcaaccctaacgctgaacaagaggaagagggtgccttttagctcatacgaggtgctggggcttggggaaggaagcaagggtggccgcactcacccagatgattgcttttttctaatttgttcacctagggtgtgtgtgcgtgtgtgtgtgtgtgtgtgtgtgtgtgtgtgtgtgtgttttctgatccatgcagaagctaactggtgtccctgtcacaatccagggtgggagaaagatgtgaaaacatgatgcatagagttaggttttatatgttacgtggttccagtggaacataaaggaaagtgtggtccattttacctgagaagatgtgcaaatcattcacaaatagtagtttcggatcctggtcttgaaagatgagtaaaagggagatttagtcagggccattgtgccatgctaaggaattcaagcgctgcagcaatggagagagaaggtgaaggatttatgtatgctaaaattagcatattattattattattattattattagagataggatcttgctgtgttgcccagggtggagtgcagtgacgcagtctcaatcactgcagcctttacctcctgggctcaattgatcctcccgcctcagcccctggagtagctgggacaacaggtgcacaccaccacacctgactaatctttatattttttgtatagacagggttttgccatgttacccaggctggtctcaaactcctgggctcaagcagtccacccacctcagcttcccagagtgctgggattacaggtgtgagccattacacccagcctaaatttttttaattaacgtacaatatgatacttgagaatttgaggatatgttctgtgtacttatcttaggcttcatatggcatagtttcactggagggaagaatagaaattcataagaaattataggcttcattttttctaagtgactgaagcttaacctctttaaatatcaattattatactttagccttttttaagaggaaaaaaattgctacatacattcttagtgtctgaagcaaagtataataaactctatgttaatgaataaggaccatcataacaaaccataattgatgggtcagtattttcatgggtgggactcagcaggaactgttggaatatacaggattccgtcctggtgcctgttaggtagatacggtgtgccctgtttgttgagttttttgtaccttttctttttttagtggttttgctatcagctgttacttgcagaatccaagtgagttgtgtcagctggcctgcctctgatgactcctttttccagtgtgctgctttcatctgctataaattaaggcaggcaaccaccaggattcatgagctgttcatacagtaagagaactaaactgtggttgggcgcagtggcttacgcctataatcccagcactttgggaggccaaggcaggaggatcacttgagtccaggacttctagaccagcctgggcaatatggcaaaaccccatctctactaaaaatacaaaaaagtccaggcacggtggctcacacccgtaatcccagcactttgggaggccaaggcaggaggatcgcttgagtccaggacttctagaccagcctgggcaatatggcaaaaccccatctctactaaaaatacaaaaaagtccaggcacggtggctcacacccgtaatcccagcactttgggaggccaaggtaggtggatcattcaaggtcaggagttcgagaccagcctggccagtatggtgaaacccccgcctctactaaaaatacaaaaattagccaggcatggtgacaggcgtctgtagtcccagctactcaggaggctgaggcaggagaatcgcttgaacccaggaggtggaggttgcagcgagccgagatcgcgccactgcactccagcctgggcaacagagcgagactctgtctcaaaaaaaaaaaaaaaaaaaaaaagccaagcatggtggtgcacacctgtaattccagctactcgggaggctgaagtgggagaatcacctgagcccaggaggtcgaggctgcagtgagtggagatcatgcaactgcactccagcctgggcaaccagagtgagaccttgtctcgaaaaaaacacaaaaacataaaactgggctgcagtgagagctggagaggccttccagagagcaaggccccattttgactcctgtgggccccttcctctactaaaaaaaaaaataaattttccacctgttggtacaaagctgaatatattactatattaatattttcttccaccaaaaagttctttttttctgatttttttttttccaggagtgcagtggcgcgatctcaactcactgcaacctctgcctcccgggttcaagcaattctcatgcctcagcctcccaagtagctgggactacaggcgcacaccaccacacccagataattttttgtatttttagcagagatgaggtttcaccatattggccagactggtctcaaactcctggcctcaagtgatccgccctcctcagcctcccaaagtgctgggattacaggcctggcctgattttaaaagaaattagaataatactttcatgggttcctcaaagtttcataggccctgggcactgtgtctagtgggtaagttgtccttgcctgtcagttttaaagttacttgaacctcacattgttttttcagtactaggagtgagaggatttttgcttatttctggttcttggctgtgctctggatagttgaaattgtttagcagattggcctccagataagtaaggcattattattggatatagtaaattcatgttctggaagtttggggcctaaaggagcaatgtgggctctgtagggttaaatgagggcagggtatggtgagaaggcaaattttgaaacattgtgaacataagagacaattgcaaattggcagaaaactggagaaagcattttaataaacaaatgctatggataaaaatcacagaggtaaaaattaaattagaaaggagaatattgacctgattagaacacaggggtcaatttagggtatatcaagctaaaagctgagataggtagggaaaatctactgtggatataagagtggggagtttggatttgctgattaatgtgtggtcatcttagttaagtttctaatgagagagcatgcacagaacccttcctttaaggtattaagaatactatggcatggtcagtacaactttatctttttctttttttttttttttggacaccaagttttgctcttgttgcctgggctggagtacaatggcacgatttcggctcactgcaacctccgcctcctgggttcaagtgattctcctacctcagccccacaagtagctgggattacaggcatgcaccaccacgtccagctaatttttgtatttttagtagagatggggttttaccatgttggccaggctggtcttgaaatcctgaccgttggtgatctgcccgtctcaatatcttcttaatttatttaaccttttctcctaagagcacagaggtcattatttctaggtaataaatctccctaactcaaattaagagatcagccattgctgatatggggcttgtgggggcaggggcaagagtggaccccaaatctagtttaaaattacacaaataaaaacagtagacagcaaagcatagtgaaaatagcaatgaggcctgaactgtagtttcagctccctcactggacatgagagcctcagacagatcactttacctctcaccccaggtttctcatctgcaaaatgagacagagaatgagggggtttgggggaatgaggtaatctttaagagctgctcccaatgtaaaatctgatgattcagtgtctttttcacaaattggaattagatatcctttaatatcatgaagtctgcttttgcctatagtattttaaattattaagggttcagtttctcgtttcatattcagtctgtatcatgaattcccccccttattgtcttctgtcctgcttgcagcaccatgaggatggttacaaagaagtagactaagaatttgcttcagggtaaaatctaatggagagtttaagtgtagttgcctgcctagttgtggcatgatttatttgaaacatccttcctttggtattcagcttaaacatttaactgcaaaaaaaaaagaaaagaaaaagttacaggcatttaaacaagagaaatcagaaatgcatgcaaagaggcccaattcctctcccttcacttgtctctggttgcttttaatggtagtcgatcttttcccttggtttggggaaaccaagagttgtaggagatgttaatagtacttggtttttgtttttgttgttgttgttgttttgagatgttttgctcttgttgcccaggctggagtgcagtggcgccatctcggctcactgcaacctccgcctcccaggttcaagcgttctcctgcctcagcctccttagtagctgggattacaggcatgtgccaccacgcctggctaatttagtagagacagcatttcaccatgttggtcaggctagtctccaactcctgacctcgtgatccacccgcctcggcctcccaaagtgttgagattataggtgtgagccactgcactggccaatagtacttgttatctcactagcttaggttaatgacagctaatgaatcttatctttcctctgctagagaagtctgtgttatccagtcaatagctaatcaattgattaaaagagataagccagactttggcacgaagcatacatgccgttcattctagattattttctttaaaatttgttgctatcaacacttggggctcagaggtgtagactctgaaatgatagttactttccttttggacacttaatataatgtgcatttttctaggaccagaaagtaataatgaaggagtgatctgctacccttgaaagctatactgggattatcattcattcagtgcatatttattaactttgtactttgtacaaggcagtatgctagccctggaaacatcagtaaagccaaaccgacttaagtcctgtcctgatgaaggagaactagcaagaaatacagtaaatatagtaagtatatagtatgtaaaaggcgatccaaactggaggagggaaagggcaggataagggttggggagttgcagttttaaatggaggtatgtggggattgagttggcctgtggaaaagctgacattcaggcaggtccttgacttggagggaaaggcctgtgtggctatggaagggaagagcattccaggcagaggaatcctctctgtgtgccaggcatgccatgctgagtactgcaagggcacagatggatgatacgtggtttctaccatcggggagttgacaggctagaaacaagattcaggcttgaagataaatgcagagaagcactatggcaaggtagaatttttctaagggtctctgttgaataatacaagctaagaaaatatgaaaaattattcctatttcaagaatgaagccaggttaagtgatagaccaaaggacctctaccaggaaagcttcttactcttggctctgagccaatttcctcctcagaagttgctgcctctccctgaggccccacgctgccatgagtccttctgactctctgtgagtcaccccactgccatgactccttcggagggggtgtctgacctcttgcttcaggcctcttctgggcctcacagtaacccttgtgaagctgaagatgggagctctcatcttccctaacccagagccaaccttggcctctctgcgtcatttgctgccagtgccctgtgtttgtttttgggaagagagggattttcaggcatcccgtccctcacccacctgacctaaccgtatggattcctgacaccacaggcagaggactattcttcaggttcctctgaagcccacctgttcagatgcttgcttcttttccttcttgcctgttctgactgtgatgacagagaccccgcctcaggaatctccacctcacactctattctcataagtaggtagaattttctcatcgcatatttatggttgaggaggagatagatgctgagaagttaaataatctaccccaaatcacacagctgtgagtgatggggcctctacttctgttgcaccaagctacctgtccatcaggggacttgcctcaccattgctttctgccagccctgggcttgccttaaaaaggacatcatatgcataagacactggttaaaaggtgcagcatggtccctggagatgctcactcttacaactggcctgtccttggggcagcagctcctcacaggcccctaagaggtagacctcctgcctgtggctgccagaaccctcttctccatcacaggtcttcctcctcaagagccttctctggtttcctgttgctttttatattaaatatttcccttagtttagcatcccgagtctgccttttgctgattgttccctccctgtgtctgcagacaacttcgttttcagccttggtgctctgtctcagctgcttctaccacacacataggatttaggcgcattcaggacctgtcccttcttttcaagggccttgccagtgcctacttgttgtcattgtctttgcagtactacggataaccttcctagataacccccctccaggaaactgtccccataaaccgggtgccctccgccatgattagtttgtatttgcgagtgtgttacttggttgtgttccctgaatatttatttggttttcccagctaagttgtaacttatttgaaggcacaaaccaaatctcataattctattaagtacctaaaaggagtaaattattgttaatgctccaattggctaatgtctatttcatattttacttaccagatttacaaatgcttaatattctgaaatatttcactctcatttacaaaaacatcagattctactaagcagaaaataaagtttaatgcccccagcacatagcagttttgagttgcacttttaaactcacttcttaatccatttcagggttttcaattgttcacagttaattcttcttaccaagggtgtattacacttgctcagcattgaatgatatggaaagaatggcctttctttcctgcataactgactttacttttgttcataggttgaaatcagcccttccatttcactgcagtattatattagtggcatttttatttagggaaaaaaaaaagctttcttccacttgaacttttgttacaaatcagtttattgggtccaatcaatgggcaagacctatgaaagggtgtggattatctggttggtcctttgtgtggcaaaaggcttagatgctgcttagtactcgctcattcttcatcatgtaaagaagtgttttttttgaaggatcaacacctgactgagccctgcctttttcatggaaatgttttcacctgagttgctgcttatggtactaagaattagttaactaatacttatttaaccttggaacaatgtttatcataatccgattggcagatagtcattttacttaggctttttctttatagcatcaggactagcaaatctcagtaaagagtatgctgggagcaatttcttttttcccaaataggttatcactctgtgctttttttttgctttccgtcaaggggcatgtttgggcactgtggacattaagactggtggccacacattaggaaggtggaggtcccctcttgggttgagcaccacttttgtttttaaagctgcatccccatttcatgctgctggcagtgtttcccttcagacgaatcccatgcaatgtatcactttaatatattcggagctgtttttcatgataaagcttccttatgagcactaccactaattaatacacaaaatggcccagcacaatttaataatttggtaatgtttttcaatgttttcttaaagatgacgctttacaagtcaagacccaaacttgcctgggtcatgacctctttgcagtttttggagtcttgttaaacaagaaggaaagcaaaacataaattagcgtctccagtatggttgctctacatttcccaatctttcaacactttgaagagcatagtcactgttaatgtaagagaacatctcatgaggaaactggcagcgattttaaaagtccggctttctggaatgagtaagaagcttcttcctcagtgccactgttctagggccaacattgtcctttgtgagagaggagcaagatgaggaagtttgcattatggactatggaacattaaaaagctaaaaaagagaagtaacagttacctttaatcatactgaggatgtatcagcatgtgtggcctttggcatctgttagcctttagggctatgttcccaagtttgccattagaatttagtgttaaaaaatactttaaatataacagcaccactttttgttatagtaaaaatgtatgtctttactcgattgtaattacctcaacacccagcttttgttgttattttgcccttggacttaggtatttctgttcctctggcttagaatgtccttccccttcatcttcctaatcaacctactcattccttacgactcaactcatgtatcatctcctccagaaaaagctttctctgccacgtgtttcttccctctacctgacatccttgtgcgtaatacctccacctttccatattgtactataattatctattttgcatctgtctttctgtggaaggtctgttgcatattcatctaggaacttggtaaatgtctgatgataagcatttgattttttcctagttgattcctcaaataataataatgattaccctttaatctgaatgctcacaggtgtacttctatctcatattctatgcgcagtcatctgttaagctaatggctaattgtaccagagggtctcaactttgtttctttgatctgcattggtttatggtggtaccttgcccattcttggcacagcaggtggataaaaacaatgagtaacattgagaaaggctaatgtgtcttattgacagtagtggtataatgtttaccaaacccaaattgaaattattttggtttcttaaaatcttttcccgatagcccatttattttaatgttctgaatttccaagatctgtgtataggttcaatgattagtctttactgaagacttatctatggactgagtgtgtattataaatctagtgacataagtttaaaacttattcctttttcattttccaagtaaacttttttagtaatgtgtttttctttgtaaagacaggcagtatatgatttaggtctggatctggtttccagtcttggctccatcatgtattggttatttggccttgaacacaaatgacttgccttgaacacaaatgacttatatctgtgagattcaatagcttcatcagtaaaatggggatagtagtagtactgaattttcatgattataatgaaaattaattgagagactgatctggagaggtgccatactacaaagaggattaagtggaggtgtccctattaaatggcgagatacccagaaacattaccctgttgactccagtatgctggcaacgaggctttatagtctttgggaaggagactggaagattcttctctgggaaaaatgtacacatactgacctttgaaggacccccagtaatcagccaggtcttacctgatcatcctatagtgaagccccccgacacagtatttccattcatagtttagctcttaaatgtgaattagctatccagcaatcaccagacacttgaggaaagcctccagaaaacaaattggaaaaaggggcaagtcataggaaacagacaaaacaaggaacagaagaaaacatcatttttgcaatctataatattcacaagtttgttttttgagacagagtctcactttgtcacccaggcaggagtgcagtggtgccatctcggctcactccagcctcaaactccttggctcaagcgatctgctcacctcaggctcccaggtacctgggacgacaggcatttgccaccacacccggctaattttggtatttttgttgagatgaggtttcgccatgttacctagacaagtctcaaactcctgggctcaagtgatctgtccatctcagcctcccaaagtgctgggattacaggtgtgagccaccggcctcagagatctaaaacaagatattgtattttaattgcacaggatgcaattaaaaaagaaaacattcagaaaacaagaagagctcttagaactgaaaaataagttagtgtaaaggttggaagataaaattgatactaacctgaaaagtattagaaagagaaagaaataaaaactaagagtaaataagaaaattagaagattagtcctagagaatcagtatccaactaagaggttcccagtgggtgatacagagaaaatgaatgggaggaaatctcaaggaaatgtatttcctagaactgaatgattggaatttccagtttagaaagaaggaatctagtgccagcaaaatgagtatagaaagaaccatcttaggatatgtagttttcaaattgcagaacataggaatgaagaaaagattctgaaagttttgtattaaaaaggttagaaacaaaagatcaaagatcagatagcatttgtcttttagccttcagtgccttcaaaattgtgagaaaaaaattatttctaacctttttatttatttatttatttttttgagatggagtttcgctcttgttgcccaggctggagtgcaatggcgtgatcttggctcggctcactgcaacttctgactcttgggttcaagcattctcctacctcaacctcccaagtagctgggattacaggcacgtgtcaccatgcccagctaattttgtatttttagtagagatggggtttcgccatgttggtcaggctggtctcaaactcctgaacctcaggtgatccacctgcctcggcctcccacagcactggaattataggcatgagccaccacacctggcctctaaccttattttttacaactagccaaactattaagacaaaggatacaatagtaaggctagaataaaggtatttccagacatgcaaggtctttaaaattttacctccctcactctttctgaggaagcttttgggtacatgcagcatagacaggggaatagatgaggaaaaggaaggctgggatacagggaatctaacagaagagagaggaaagctccagaactacagctgtgccccaggcctagagagtcaccgcttcagattgaactgtgaacacacaggactcctggaggggaatttcttcaagaacacaactttaaactatgtaatgtgtttgaacatactgaaaggagacttgtgattgttttagagacaaacttgtgataagtacctggtaaactaagcaaaggggaaaaaggcaattaactccagtaaaacaaaatgttgtccaagaaaggaaattgaatagtactctgcatggcctagctgtaaaccacatttgtataaacataataaatactgaatatagatttaactaaagactgtgaaataactgtatcggaaggatgtaaaaaggggcatgtggtgggggaaggggggtagtgcaaaattaataataaatccccatcttccatggtaggaagttagtaaatcatatttaaagctgaaaacaaaaatctaaaaccagtaatgtaacattattatttgaagataaggaagtaaatataagaagaaaagccaagagaattgaaaatggttgcctttgaagaaagggaactgagaatggtagcataagcctggcatagtttttaaactttttttaaaaaaatattttggggttaaaagtaaaaatgaaaaatattaaatgtgacaattatggaaagcactttagcccatgccttttacagttcagtgttgcataaatataaactcttattaccctgctccttctaaaaagtgtactaaagccttgtaaagccagcgccacatactttctattcatttcatcttttttccccaattcccaccatacatgtgccatgttggctctgaggaaggaattacatacatacacgtcagtatctttccatttgtttgtgtatcttcttgatttactaatccattgttttattgatgtgaatgagaaggagctgttcacatgttgccactttctgaatcatgtggttggtaccttttttcaggattttcaggaaaatcctgaattgttttcttctgttttgcctaatcatttgcatcggcaagattaaataaaagtcttttgcaaattgtgttcaagcttactgtagtttcctaattagtcttattatgtacattttaacacattttctccctatgatcagggccgcaagcttcttatcattgggaccactagccgcaaagatgtccttcaggagatggaaatgcttaacgctttcagcaccaccatccacgtgcccaacattgccacaggagagcagctgttggaagctttggaggtaaaaatgagtcaatggattgcacactgtttataagaaaggaattgaggctgaaataagtagtaccacattatacctggtgtttggtttttatgctaatctggaacatgggacccggggatattacaggttgtatataccttatccaaaatgcctgggactaggccaggcacggtggcttatgcctgtaatcccagcactttgggaggacggggcaggtggatcacttgaggtcaggagttcgagaccagcctggccaacatggtgaaaccctgtctctactaaaaatacaaaaattagctgggcatggtggtgggcacctgtagttccagctactcaggaggctgaagcaggagaatctcttgaacccaggaggcggaggttgcagtgagccaagattgtgccactgcactccagtctgggtgagggagcaaaactctaacaacaacaaaaaatgcctaggaccagaagtgtttcagatttcagattttttcagattttggaatattgcattatatttaggttgagcatctctaatctggaaatctgaaatgcttcagtgagcatttcctttgaatgtcatgttggcactcagaaagtttccaattttggagcattttagatttcagacttttggattagggatactcaacctgtacctccagttgttttcaggaattagagaagaaagatgaatatacatgacagtgagttaatttcccattcctcaatgtaggcagctacaaactgccaggaattaattgctctgtatccagcatgagtgatgtatatagattacttggaccagaaacttgaatgggtggtggtgtgggggtaaggtaatcactgtatagaaaaattaaccattcatagtggcttttagcacatttccttgcatttaataagttggaacaatgattaaagccttagaaatgtcaaaaaaaaaaaagctacagaagtaaaaggaactttattaacaagtttagaaatagaaatgttttcttaattttttgaaaatgacagtcatttttaaaaaagaacgttcttcatttaacttttaatatcaatattcacaagtaacttggtgagctctattggaaaatattatctactgagttgttcagcagtggtggagtcagtaaagcttcttaaagtcctcaaggcccccaacaaaattgaaatttatctatatgataaatgttttcaggttacccatgtagacagcttttgtgcagaagctgggtaagagaattaaaggagtttgctttgacacatacagattgttcctagaaaagaatgttaaaaattttaacttatatttattatggattggagctatttttttccccagaaaatataagttacatagcggtccataagaaaacagggtttaagataccagttttcactttcatgattgcacctaatgggtttaggatggtgaaggtcagactggattttaaagtaggagagaattctatcaacttgaacagttaggtagttcttatcactcttcttttaaaggtaaatagaattaaccaatgttgatgtgttcactgtaaaagtgctttgattattgtttattgtttttgtagcttttgggcaacttcaaggataaggaacgcaccacaattgcacagcaagtcaaagggaagaaggtctggataggaatcaagaagttactaatgctgatcgagatgtccctacaggtaaggtacttcgttctccgtatgactcagacagaacaaagcttcaggacacaccaagagggttcagtatttcctttgccaaggttttaattaatttaagttttgattttcttatattatttccaaacttaatttggtattagtagcctgcttctgagattgatcacttaacaatactttttaacttcttaaaattcaaaaatggaaggaaagattataaagttagttttcatttagggagccactaggtcttagaactagaaaagacttcaaagagcagtcgttcttctgccccctcattttggagatgaggatactatgtgagccacaggctgtcagtgaattatccaagatcacatcaccaggttattgatggagaagggatggtgttgcacctcaagtcagtaagcgactgcacatataccaaacggtgtctgggagactgctttaagggacaagttaattaagttgtgcagtctagacttgggatctgtatatttgtccctggctgggctcctagaaatttcatgcaaactactgtagggttgaagcatccagaatcacatagaaaactgagccccagggtgctgcctgggcaaagacagatgaaacttctttgggactttctcatatctcctggcaacttacctttcttcattttagaactccacccttccatgtgcccatgctgtgtcttcttgtccttatctgacatactaggtagctgataaatacctccctatcaagccctatgagttcagagaccttggctcttactattgagtccacagcccctggaacagagccaacacatatgaaggtgctcagtaaacttttattattattattattattttgagacagggtctcgctctgtctcccaggccggaatgcagtgccatgatcatggcttactgcagttttgacctcgcaggctcaggcgttcctcccgtctcagcctcccaagtagctgggactaccagcgtgtgctaccacactcaactaatttttgtattttttgtagaaacatggtttcactatgttgcccaggctggtcttgaactcccgagctcaagtaatccgtctgcctcagcctcccagagtgctgggattacaggcatgcaccactatgcctggccctcggtaactttttttctttttttttcttttgagacggagtctcgctctgttgcccaggcttgagtagtggcatgatctcggctcactgcagcttccacctcccgggttcaagggattctcctgcctcggcctcctgagtagctgggattacaggcgcccacccaccatgcctggctaattttttgtatttttagtagagatggggtttcaccatgttggccaagccggtctcgatctactgacctcaggtgatctgcccgcctcggcctcccaaaatgttgggattacaggtgtgagccactgcgcccggccagtaaacttctgttggatgaataactgtaaattcattttacagttaggtaaatggacagagtggctgtattctaggcatcatgtgttactaggtgttactaggtccatctaggtggacagagtggctgtattctaggcatcatgtgttacttactgatggtcctgcattctgctagtgtgggcagtgagcggcagaggtgaagtttctgtttcacagttacatctgaaataggctcttggaccaataacaaattggaaacgtgaagtgaatgctttttaatcttttctggtaaatttatctgaaaataaaatttttttgactttcagaaatctaatttaatctactgagctttcagatggactatttttaagtcaattaatttattttccattatgagccataaattaaagtcacagactaaccactttgtttagacttattcttggtaaaagtgcaaatacaggtgtattggctctttccttgaaaaaaagataaatctgtcagattgtcagcttctttttttttaagtttcagtataattttttttcaataattgcatagaagaaactatgtggattttttccccaaccctcatccctttcccttcctttgatgcctgcaggtcagtgatcaagttaatgcttcttatgcatgtgggatagagagtgagagtggggcactcaggcctgatcttcagcgactgacatttcataggcctctgagtttgaaccccttcatgtcaaatggatttcgtgcagctgagtgaattctctttagatctgccttagagaggctgaacctaagtgaagaggcatgtagttttgcagaatataagtcgtggtacctctctgttcactacatgctattctgttaaaacttgcacagagctgaggatctgctctgactggatgtcacctgagggaataaagtcatttatctagattacttttttcctccctttctcctgacttttaattccatagctacaggcaagtcagtaagttgttgctcacacatattaaatatatttaatgggcaaagaactgcaagtaccaactacaactgcgctccagccagttcttttttttttttttttttttaagaacttgacaattgattcatatgtaattctattcccaaaaaggaaaaatgtttcttttgttagctattcacactttttcttagtcctttgtagtctgacctcttacctttgatacatttgaaacttctgttcagtgtttttctgggatagaagaaatcttaaaaaaaaaagaaagaaaagaaaaaaaaatccgtggttggagtgggagtccaattgcacatctccccacagctgcactgagcatttgaaagttattcctggagggcagggagttccctcttgggaaacagactcctgctctgaaacatattttaaaagttaggtgtgtttcttacaataaaaattcatcttcaggaactaaagatgtttttaacgattgttttctagataacttcgtatctcctgtgggcctacgagaataaagtacatttaacgagttagtataaatatgaatagaaaatgaaaaccagtcgagatagctaataataacgacctgaacgaagcacctgaaacaaagttgcgccatcttttcttagactcatgacacattcgcagtcacaggagacccagattcatctggagatgatttcaggaatcagcagtactcttcatttttttagttttagcacaactttgttactacaaagaagaaactatatgacggatactgaggctaagaaaagctacatggttggttatgtagagttaataagctattttttagttgttgaattaacctcaacttggtatcttctactttgctgtgactttagtagccttttacaccttcaacaggtgaattggttgtcatttgaactctgatgaatggccctgtccagtctcacagcgatgcctcacaggcatcagcacagggcacgcctggcccaagtgcctatgatggccagcgggcttgggtcttttggaacccagtgtacatagttctggaaaaccccattcacttcctccaaatgatgtgatctgctttgttttgtgtgagaatgctggtcaaggagcaggtaacacattcagtgacctagcagagcattgatgaagtgtgaaaccgaacactgccttctcatgaagcaagtgcagagttgttagaaggtaccattaacccatcttcatttcttctgatgtatttagatggatcctgaataccgtgtgagaaaattcttggccctcttaagagaagaaggagcgtaagtacatacaacatttaatgaccatcaaccaaacttaccaccctgttaaatccctgtgcctattctaagagttgctttcctagataagtttgtttccatttatttgaattcttcgctgtgttgtaggtccgagagaccaagcaaggaagttggttgtactgttggtttgctctccctgtcctgcttcgcaaaacttccttgtcacaatgcaggaaaaacttaatggtacatatttattggaacctgcttttacatgcatggagctgtgaccattttcttttgtgaagtgctcatctaatagcaaatgcatagtgggaaatgtaggataaccattaagaagcttttagtgatttttttttttttttttttgatgaatagttttttacggaccctcatctgtttttttgtgttttggtatttcttttgcagtagcccccttgattttgattgaaaatgaactatttgaaacacacagtgaccaagggaagtgaccaaggtgaagatggcctaggatcttcactgtcttactcaagatactggactaagtggaacgttctctaccttcaacatgtgctcgctctgcatgattagtgcaataaaactcccttccttatgcatactgagatagcttagtgtctcgtggaaggtgtcaatttggtttagaatgctgcgcttaccttcccatgcaggctaaagtgattccttcttgctcagtccctctgggtgggaaccatccagtacttgtggacactacacgtttcaacctctctactagcaccatcacccttgaaaactctcagtcagtgtcatgaatgttgcatgacaacagttggccgattagaaggcagactttctacatgcaaatctggcttagtaaatcgaggtgtgggccagagatcctctgacagctgtcctgagctaacactaaaagtcactgggtatttggttaaaggtctcccacaagactggtattctctttgcctgaagaaacaaggcattgaatctctaaaatgctgttctcaatcattgtcagagatgttttcaagttgcagtcagaagatctttcttaatagaaagtcagatgactaccgtgttggttgtgacttccccttaagtataactaatttgctctgtggtaagagatatgctcattattaccacttagaagatgttgttaaaaacatgtgaaagataggtatggaaaaagcatacacccccaaacagaaaggagttattaaagtaatttacaaacctctcagcactaattagtgtccaactccaagtgggtcaattccttagtataatattaaggcttactagtatcactgctttttccttagcttaatgacttacttagaatttatcctttattttaaatgatctgtactatctagtgtctaaaacactattctccagaaaaatcaatcattttctagccctctccctcagtcctttattgtccattccaatacattgaacacatttcctttaccctccacacacttcttccaaaaggaagcacccgttgagtccttttgagggtgatttgtcttacaactgactgacttagcaggaatttaattaggtcatatttggtgatgagacttatggagtgtgcctctctctcccaactgctgcttaaaatgcaaggacaagcaattagaagccatcctaaggtgcttacctcacacgccacccatgaggcttgtggccacagtggcacttgggtgtggctcctctgttatttgtcctcatgtgagaaagcagatcatctccaaatcttgccatttgtatacttttggtggagacttggatgtcatatcttctttgttttgggttttcttccctagcttattttgtggcttttaaagaagtggattgtattgtgagatcctgtgattcctggtggccagtatcctggattcctctaagatcttgcctctttcctcctcatgaaagcagcacacattgtgttaacttatgtctcttgttaaatgagcttaatgtctttgtgttttgtccaaaactgtattgaaaaaatattgtttaatgcaaatgaaggaatgcaataaagagtaaatatacttgaaaatgttctgtagaccagtgtttcatatagaacgacatgaacagctgataggaatggaggaagaaggagggggctcaggaaagaaacctctccgtgttttgttacaagtagcataacatgagggatgatttttattttaaaaatctcttatttagaaagtatagttatttaaaaacatcattagagtatcagaaaaagttaatatacaaccatctttatgctttatacttattttatcttactaaaaaaaaaaaatgcctggcacggtggctcatgcctgtaatccgagagggaggctgaggtgggtggatcacttgaggtcagtagttcaaaaccagcctggccaacatggtgaaaccctgtctctactaaaaatgcaaaaaacagccgggtgtggtggcacatgcctataatcccagctactcaggaggctgaggcaggagaattgcttgaacctgggaggcagaggttgcagtgagccaggatcacgccacttgcactcagcctgggcaacagagcaatactttgtctcagaaaaagaaaaaaaaaaaatcaactcaggtacctaagccacaaacaaggttagtaataaaccagaaaggagggttgccactcaattagaattactcctttctgtgaaatgtacaaaccaaggaacttcaaggctctcagtgagattgcttcacatggttcacttttgtatcctccatagttttttacatttttctgagctatcagatctcttaacctcctaaaccttgatccttagcattggctcagtttaggacaggaggcagctcagaaagtccacaaggccctgtggggaagaggccagcttcaagaacttccacaacgggagttcctgggaggaggaccctgaggccgacctggtccctgcatagccttgagaaggtgggttcttgaagctgcccaaatattcttcaaagccagtgctgtacagcagagcgtatgagattacagaacggcctgtgaagaagcaaaggaggctccagctagctgctgccttaggtttcttcatctataggcgaattgttaaccggctatttttttgtcataagatgtttttgagatcaaaacctcaaaagaggaggttattttatcctttctaaatttgtacatcttcactgggacactttttttcaatgtcacacagaaaaattgcataattgtggttaaagtcagaaatatgtttttactttaaggctgtcttttcatatcctaaaaattgcagcctcccctttaaaagtttcagcaacaagtcacaaaatcatggagtagattgaagtgtgtacaataatcaaatcctgatcaacagacttgttgaaacagtgagtcagctataaacaaacaccccagcccaaacacagaaggtgaaagcaggatttcattttccttgcctgacaacttggtccatagcctctttaaagaagtgactgggggcagccgggcgcagtagctcacacttgtaatcccagagctttgggaggctgaggcgggcaatcacctgaggtcaggagttcgacgccagcctgaccaacgtggtgaaacaccgtctctactaaaaatacacaattagccgggcatggtggcacatgcctgtaatctcagctacttgggaggatgaggcaggagaattgcttgaacctgggaggcagaggttgcagtgagccaagatcacaccactgcactccagcctgggcaacgagcaaaactcttgtctcgaaaaataaaataagtgactggggaagggtgtgtatgagagttcaagaaagcaggtaagttgcagaatttattgcaaaatgatatagagtttctcatcagctggcaagccgtactgagactgggtcctggagacgagcccacaagggtgtgtgctggacgggcaccatggcataaagatgcgggagatagcgcctgtgattggcaagcatcccaagtgggtgaagacaaaatatccaaggagggatcatgtttgaaattttcccagcgtagacgccatgcaacttctgtctcactattttgggagtataagattaatggtaagaaatttttgcctcctagaaggttctctattaaactaggagaaacagtggcagtgtagcagcaatgcgtagctgcactgacttcactcgagtgtgcagaccagccacacacacaagaacatgtccctatgcccagggccaccaggggagacggcattaggtaacaccaagaatcatgtcgccatcatgtttccttgcttttctttttccctaccttctttccttccacctttctttgtacctcatcccctcatccttgaactgtctcacatgctttccttcccttctttcttcataaaataatattgctttgaaagatatcttctaattatgtcgtctctttcagatttttaaacaacgtcctcttgtgtttagacgtttgtaagtacttatacataaggagaaactacatgttcaagcacagctatcaactgtattctccttaaccatcaaataagactgggcagggtgtgatggctcacccagtaatcccaacactttgggaggctgaagtgggaggaccccctgaacccaggagtttgagaccagtgggcaacacagcaagaccccatctctacaaaagattttatttttaattaccatagtagagtgcgcctgagtcctagttacttgggaggctgaggaggatcatttgagcccagggggtcaaggctgtgttgagccatgatcatgccactgtactcctgagtgacatagacacttgtctcttaaaaattaaaaactaatcatacgattacaaatggtcttcattagtatgaatagggaccatttaaatatttggcaatcttattgattgaaaaagtactggccaggcagggtggctcatgcctgtagtcccaatgctgagaggctgaggtgggagatcatttgaggctaggagttcaagaccagcctgagcaacatagcaagacctcatctctaaaaaaaaaaaattaaaaaattagctgggcatggtgacacatgcctatggtcccagctacacgggagcctgaggtaggaggtcacttgagcccaggaggtcaaggctgcagtgagccatgatcacaccactgtactccagcctgggcaacagaggaagaccctatctcaaaaaaaaaaaaaaaaagaaaaaaaaaggaaaaagtacctagaattctgggatagataagttcagtcgagcatccctaatctaaaaatccaaaatctgaaatgctctaaaatctaaaacttttcagcaccgacaggatgccacaagtggaaaattccacacctgaccttgtgtgacaggtggcaatcaaaattcaaaatgcagtctaaactgtttcatgcacaaaattatttaaaaatttcataaaattaccttcaggctatgtgtgtaaggtgcatatgaaatcaatgaatttcgtgtttagacttgggtcccatccccaagatacctcattgtatatatgcaaatcttccaaagtctgaaatatttctggtcccaagcatttcagaaaaggtgtagtcaacctgcattagctttatgcaaaagaaaaataaaaagtcgaaatgaaataaaaatgaccagactgtaagatgtagaggagatctgtatcctgtacgtgtccgattcgttgtatggctgaagtgtaacagtttttgtggtttcagcttttcaggggctaaagacacatcatggacaaaacagagtgcatcaacttctggtggctattcctaacctcaggtcacaggtctgaatacagcgcagagcagcccgcctccaccataggcggctcatggctttattttcctggtttttttttgtttgtttttttttttttttgagatggagtctcgccttgtcacccaggctggagtacagtggtgcgatctcagctcattgcaacctccgcctcccaggttcaagtgattctcctgcctcagcctctcaagtagctgggactacaggcatgcaccaccatgcccagctgctaatttttgtatttttagtaaaaacgggctttcaccatgttggccaagctggtctcgaactcctgacctcaagtgatccacccacctcggcctcccaaagtgctgggattacaggtctgagccaccccacccagcctgttctcattatttctcttcgtagtgaggtaagatttgttcctaaatgaggtaggtcaggagaaataaaaagaaaaaacatttttgttattctctgaaataatgtgctgaataaaccaaaggtgacattttatgggtaggtctgaaaactaaaggattgtctgttgtcataaaaccaacttgtggcatctcattgttgagaaggcataacctgtgagcttccagtgggtcctgtgaagtggcgatctgagagggtgcccatccccagagcatgcccactggcaggccctttctacccaaacccaaacccaacttcaaatgacaattgttccagacagcccacagcccagggcacacgctttcttcttgtagaccagcctacctccctctacggcttagctctcacagtggagctagcaggggacagacaattttcagtcaagtttcattttcaatagagaaaatcctattttcccattaaatggagttgaaaacgtggtgaggaggggattaaggcagtggccacccctgcggtctgctggccttgggccacatcttttaggagtgcctgtgacattaatttatacattgaaaatacttgagtctgtgaaatgaattagtacacaagttgttgttttctaaaactggaaattcattgttagaagttaacttagaacaaaagaagcctttaaaaatgtactgtggtgtatcagacccactgtccgtgacatctctgatgatcttgcttagaaaacagaggaaataaccttcacttggtcatttaattagctgaggccaccatgttcagaatctcgtatccttgacctcctgagcattaatctggaaactccacacagtgtacaatgtatccattttaggtttgtttaccttctctttaatgacttaacagaaaaaaactgcatgatgaaatatattttctccaaatatatatatatttatataatatataatcttagttaactcaaaggtatatacattgtataataaataatatttataaaaagagactttttgaatataaaatcaaaaagatcaacaacttctacaactttttacaaaactttggatacagcaggttggtaggaaatttcggttggatactattacctgactacggcgagaatcattacaatgcactcatgtactattattaaataattacttgtcagctacttgaatacgccccagaaacatgactttatcacttttaatatagaatacatagatatgaaaagattgttttgaaaattcgtatccattctgctgaagtattctcacataaagcaagtattatccagttgacatgatttaaaacttttcagtctaaggtgagatggggaggggcatttcagacttggcggagggggtgagatgtgtatctttagcagggcttgtggccagcagatttagaagtgaaggcgggctcctggacgaccatcttggcaagcccacctgcaccagctgggagatcgctgccctggtattttaggtcagggttaggtagaccccagagagaagggggagaaagaaaaatctttgttctgctcattcccctgctgcatctcttctttctgattctccctaagacagttgttgaaccaattcatactgtgaaatccatgtgcctcccttttgctagctttctctaggacgctcagctggaccagtatgcctcagggagaactcagccgtgagatgcttcacctaagggagtaggtgactgctggttcccctttgaacttctaatccagatccttgggaactgcatggatggaagctatctcagcatgcaggtgagggaggaagagctgggggaaagaactctgtgtctgtgtttactcacattggccccagagaggaaaggacacagtaagatgggtccgtattggagaggaagcaaagggatggttttcatcctccccatctgctagtcacaaagttggaatttcaggaattgatggctactccctcacggaccctttgtctaacttatactaaggtgacctggagtccaactgctctacctggagttatttgtacagagaatctgcaggtgagcagggctgggaaggactgaatggccccttctgaagataccgcttatttatttaggaagccatttgagctagagaagacttgcccccttacatagcctatttacaaggtccactaccaccaaaaaaaaaaaaaaaacaaaaaaacaaaaaaaaaactgcattgacggtggaaactgcagaatggtagaaaaagattttgagatctgactgcccctcgtgcagaacagggttatagagaaaatgagactgagaagaacacatggctgctcttcaaacggctgaccaggccaccctgagctgccagttcttccaaactccaaatcctactctaacaactgccacggaccttcctaccacttcatcctagctaaacctatggcttttatcagaatgagaaattagctcaaatttgaatgggagtggaccaagaaaaggagactgcaggggtgtgtcctacttcctgactcccaccctccaggcgtcttggaatgtcaccagaagcagcagtttggaaacagaaccttgcccatgctgatgtcttgactgccaggctgagagctcacattagcccagcctgttctgttggagtcaaattttttttcatttttattttctttaacatgtgcaaagataagcctcaggtctgttcctatcagaccctagagaactaaaaagaaagcccccttctttaaaaaccacacaccatccagagtagggtgagaaatgtaagatgagagagagggagagcctccccgtccacaggcgagttgggtctgggtcatttaccacgcgtgcggctggtgacagttccttgctgtctgacgctgagggctgtgcccggctctaggtcctgcttcccatgagacttcgctgaatccgcccagccacacacttcaccccttcccagcgcccttggggaaaatcaagaggaagaattagaaacataattccattcccagagaccacccattggggttcaaagatcagaggctgctgatggatctgaacgtgtccctggtgctcagaggtgatgaggacttgggtggtttctccacgctctcctctgtgctttgggcctgctgttgagggaggtcgtatgagtcacaggagcagtaaggctttcgagtccacagaatgggatcgaaattctacctcccccacctctagctgagggccttgggcaacaggaagcccaggagcaggtcactcaggatgggagaaacggtgcctggccgagggcccagtccccaactccaagtcaactgctgtgctgggctcacgccaggcatgcactgtgtttttgtaccgcaccaaatagcttgataatgagctgtccaaatgggagagagcctacttaattacgaacaattccttcccattggagcagcagtgtgttcattttactcatttgcatagtcatatctcacaaagggtttgaggcattcccagtcaacccccagctcttctagggggctgacaaggccaagataagactactttacagaggcagaaacaggctcagccagattgaagggacacatccaaggtctctcagcaaggcagtaacagatccaggacttgggcgcagccaggccactcgactcttgccagaacctttccagctccagctcaccatgttcacaacagcagagtgacgaggaataaatctggcacttgtaaggcaccaaatcaatggttagccagagacactgggtaaaagctacaaaaagctacagaaaaggtgttttccccacaaaggaaggacacaagccatttgacaggcgctctctcctcaccgtgtggagggcccggggcctgctctgcgactcccttctctctcctgcctgcactgccaagactgtcagggaagacaagagaacagctaacgactctgtcccctgccatccctgccagtgcatcccgcaggctcccgtcttgcctagcggagtctcggccgagcctgggcccattgctccagagcaggcggctctcgcctggggaggtggctctgggaggtcagctctgcttggcccaggagcctctgtggctgccctgtgagcagctgggtcctgggccaggcccttcatgtgcagggtctccagtccacaggacaaccctacacagaacacagttctcatccccagttcacaaatgaagaagccagggctcagcgaggcagaagagctggcctgggagtgtttatcagaagggcaccatgttgggagagtgtcctccactggtcacagagtgaggcctccagagcttccacagagaaggggttccgggtaggaaccacttggacacagcatcttgaaaccatatctatgtagcactttacataagattgaggaaaaaaaacactcattgtccatttcagaaatggggagaaagagggctgatgaagagtactgattctggccgggcgcggtggctcacgcctgtaatcccagcactttgaggggccaagacgggtggatcacttgaggtcaggagttcaagaccagcctggccagcatggcgaaacccgtctctactaaaaataaaaaaattagccgatcgtggtggcgggcacctataatcccagctactcaggaggctgaggcaggagaatcgcttgaacccaggtggcggaggttacagtgagccgagattgcgcacttcactccagcctgggcgacaaagagagactcagtctcaaaaaaaaaaaaaaagttctgctgggctcccattgtcaccaccactgaacagaggaggaaactggcgctcccaggccagacagctgagtggacgagtggaggcgctggattcaccttcgtcctctcccactccccacactgcttttgttcagataccgacaaaggtagtgccacctgctgcctttctggactgtccccaccaggacagaacttgagctacaccgaggggcttcctagatgggctgagtgagtcgcccctcagccagagctcttctccatgacgtcaagtacctcccatatctcagagaggcccgtccacttccctcccctactccctatggcacagacatgtgccagtagctcagaggtgccctgtggaactgcaggaagagggggcactctaccctttcacaggctgctctcgcccagcagcaccccagacaacaatgacccagcagggaagtgcttcccaattaaccaagccctgtcctcggtgtcctttcatttgtccctcacagcatctctggggaggatgacagatgaggaaccaggtctatgaagaatttcttgcttgggtcacacggttggcaagtggtaggagctggagcagggcagggcctaattccaacacccatgctcatgcctcgacacactaggctccttctcaggggacagaaaaggaagaaagggcaccccagccttaaaaccttccaccccgggggtccaggaccactcctcatccatgctgacctatcccggggtgctgtggaacccagggccagtgcatagcgcctcccatgcaggccacctctgggaagcttgggaacaaaatccacccgcctttgatccctcgattactcatcccagccactctgaacttgaatccctcctgctccccgtcatcatccataaactcggtgagagtgctccccactccacccaagcttcagatctgtcaggatatgggcttatatgccgcttccccccacccacctccctgaggttggtacgatttatgcttgtgcaggaacttgccctctaagttcaaggtggatgcacactgac

SEQ ID NO: 527 - DNA, 2512 bp, Homo sapiens
aggccagtactaaagtggaagtggacatggagaaagcagaaagcctgcaagtgatgagaggagacttccttgcttctttggagaatgatatcaaaccagcctttggcacaaaccaagaagattatgcaagttacattatgaacggtatcatcaaatggggtgacccagttactcgagttctagatgatggggagctgctggtgcagcagactaagaacagtgaccgcacaccattggtcagcgtgcttctggaaggccctcctcacagtgggaagactgctttagctgcaaaaattgcagaggaatccaacttcccgttcatcaagatctgttctcctgataaaatgattggcttttctgaaacagccaaatgtcaggccatgaagaagatctttgatgatgcgtacaaatcccagctcagttgtgtggttgtggatgacattgagagattgcttgattacgtccctattggccctcgattttcaaatcttgtattacaggctcttctcgttttactgaaaaaggcacctcctcagggccgcaagcttcttatcattgggaccactagccgcaaagatgtccttcaggagatggaaatgcttaacgctttcagcaccaccatccacgtgcccaacattgccacaggagagcagctgttggaagctttggagcttttgggcaacttcaaggataaggaacgcaccacaattgcacagcaagtcaaagggaagaaggtctggataggaatcaagaagttactaatgctgatcgagatgtccctacagatggatcctgaataccgtgtgagaaaattcttggccctcttaagagaagaaggagctagcccccttgattttgattgaaaatgaactatttgaaacacacagtgaccaagggaagtgaccaaggtgaagatggcctaggatcttcactgtcttactcaagatactggactaagtggaacgttctctaccttcaacatgtgctcgctctgcatgattagtgcaataaaactcccttccttatgcatactgagatagcttagtgtctcgtggaaggtgtcaatttggtttagaatgctgcgcttaccttcccatgcaggctaaagtgattccttcttgctcagtccctctgggtgggaaccatccagtacttgtggacactacacgtttcaacctctctactagcaccatcacccttgaaaactctcagtcagtgtcatgaatgttgcatgacaacagttggccgattagaaggcagactttctacatgcaaatctggcttagtaaatcgaggtgtgggccagagatcctctgacagctgtcctgagctaacactaaaagtcactgggtatttggttaaaggtctcccacaagactggtattctctttgcctgaagaaacaaggcattgaatctctaaaatgctgttctcaatcattgtcagagatgttttcaagttgcagtcagaagatctttcttaatagaaagtcagatgactaccgtgttggttgtgacttccccttaagtataactaatttgctctgtggtaagagatatgctcattattaccacttagaagatgttgttaaaaacatgtgaaagataggtatggaaaaagcatacacccccaaacagaaaggagttattaaagtaatttacaaacctctcagcactaattagtgtccaactccaagtgggtcaattccttagtataatattaaggcttactagtatcactgctttttccttagcttaatgacttacttagaatttatcctttattttaaatgatctgtactatctagtgtctaaaacactattctccagaaaaatcaatcattttctagccctctccctcagtcctttattgtccattccaatacattgaacacatttcctttaccctccacacacttcttccaaaaggaagcacccgttgagtccttttgagggtgatttgtcttacaactgactgacttagcaggaatttaattaggtcatatttggtgatgagacttatggagtgtgcctctctctcccaactgctgcttaaaatgcaaggacaagcaattagaagccatcctaaggtgcttacctcacacgccacccatgaggcttgtggccacagtggcacttgggtgtggctcctctgttatttgtcctcatgtgagaaagcagatcatctccaaatcttgccatttgtatacttttggtggagacttggatgtcatatcttctttgttttgggttttcttccctagcttattttgtggcttttaaagaagtggattgtattgtgagatcctgtgattcctggtggccagtatcctggattcctctaagatcttgcctctttcctcctcatgaaagcagcacacattgtgttaacttatgtctcttgttaaatgagcttaatgtctttgtgttttgtccaaaactgtattgaaaaaatattgtttaatgcaaatgaaggaatgcaataaagagtaaatatacttgaaaatgttctgt

SEQ ID NO: 528 - protein, 274 aa, Homo sapiens
MEKAESLQVMRGDFLASLENDIKPAFGTNQEDYASYIMNGIIKWGDPVTRVLDDGELLVQQTKNSDRTPLVSVLLEGPPHSGKTAAKIAEESNFPFIKICSPDKMIGFSETAKCQAMKKIFDDAYKSQLSCVVVDDIERLLDYVPIGPRFSNLVLQALLVLLKKAPPQGRKLLIIGTTSRKDVLQEMEMLNAFSTTIHVPNIATGEQLLEALELLGNFKDKERTTIAQQVKGKKVWIGIKKLLMLIEMSLQMDPEYRVRKFLALLREEGDLDFD

SEQ ID NO: 529 - DNA, 2097 bp, Homo sapiens
aggccagtactaaagtggaagtggacatggagaaagcagaaagcctgcaagtgatgagaggagacttccttgcttctttggagaatgatatcaaaccagcctttggcacaaaccaagaagattatgcaagttacattatgaacggtatcatcaaatggggtgacccagttactcgagttctagatgatggggagctgctggtgcagcagactaagaacagtgaccgcacaccattggtcagcgtgcttctggaaggccctcctcacagtgggaagactgctttagctgcaaaaattgcagaggaatccaacttcccgttcatcaagatctgttctcctgataaaatgattggcttttctgaaacagccaaatgtcaggccatgaagaagatctttgatgatgcgtacaaatcccagctcagttgtgtggttgtggatgacattgagagattgcttgattacgtccctattggccctcgattttcaaatcttgtattacaggctcttctcgttttactgaaaaaggcacctcctcagggccgcaagcttcttatcattgggaccactagccgcaaagatgtccttcaggagatggaaatgcttaacgctttcagcaccaccatccacgtgcccaacattgccacaggagagcagctgttggaagctttggagcttttgggcaacttcaaggataaggaacgcaccacaattgcacagcaagtcaaagggaagaaggtctggataggaatcaagaagttactaatgctgatcgagatgtccctacagatggatcctgaataccgtgtgagaaaattcttggccctcttaagagaagaaggagctagcccccttgattttgattgaaaatgaactatttgaaacacacagtgaccaagggaagtgaccaaggtgaagatggcctaggatcttcactgtcttactcaagatactggactaagtggaacgttctctaccttcaacatgtgctcgctctgcatgattagtgcaataaaactcccttccttatgcatactgagatagcttagtgtctcgtggaaggtgtcaatttggtttagaatgctgcgcttaccttcccatgcaggctaaagtgattccttcttgctcagtccctctgggtgggaaccatccagtacttgtggacactacacgtttcaacctctctactagcaccatcacccttaaggcagactttctacatgcaaatctggcttagtaaatcgaggtgtgggccagagatcctctgacagctgtcctgagctaacactaaaagtcactgggtatttggttaaaggtctcccacaagactggtattctctttgcctgaagaaacaaggcattgaatctctaaaatgctgttctcaatcattgtcagagatgttttcaagttgcagtcagaagatctttcttaatagaaagtcagatgactaccgtgttggttgtgacttccccttaagtataactaatttgctctgtggtaagagatatgctcattattaccacttagaagatgttgttaaaaacatgtgaaagataggtatggaaaaagcatacacccccaaacagaaaggagttattaaagtaatttacaaacctctcagcactaattagtgtccaactccaagtgggtcaattccttagtataatattaaggcttactagtatcactgctttttccttagcttaatgacttacttagaatttatcctttattttaaatgatctgtactatctagtgtctaaaacactattctccagaaaaatcaatcattttctagccctctccctcagtcctttattgtccattccaatacattgaacacatttcctttaccctccacacacttcttccaaaaggaagcacccgttgagtccttttgagggtgatttgtcttacaactgactgacttagcaggaatttaattaggtcatatttggtgatgagacttatggagtgtgcctctctctcccaactgctgcttaaaatgcaaggacaagcaattagaagccatcctaaggtgcttacctcacacgccacccatgaggcttgtggccacagtggcacttgggtgtggctcct

SEQ ID NO: 530 - protein, 274 aa, Homo sapiens; identical to SEQ ID NO: 528

SEQ ID NO: 531 - DNA, 27340 bp, Mus musculus
  misc_feature (1)...(27340): n = A,T,C or G
gggtcttggtgggaaactggagttgactcccgctccccccgccctatcctattgaaaactctttcctgcccgttatctgttaaactcattttatctgggggaacttccaatcttcttatccctttccttgccttcttcctacccttaccctggagatctaagtaatatgaatttgggtaaatgtaaactcattcctcttcacacagaggaatcaagggcctgtggctataactggctacgagtccccaggccaagaaaaagagagtgaagatgaagaaggaagaagaggcagaggcagcggtagcagtggtggcggccgcaagggctagagagagatggctcagcagttatgagtacttgctgctcttctcgaggcctggggttcaattcccactcatctctaattcccacaaccagctgcaacttcagttctacgagatccaatgctttttctggcctccatagacaccagccatgcccacagtacatagacagacatgcaggcaaaacacccatagacataacacaagataataaaaataaatacaggaccaatttctacttctagtctcaaaaaatatttattagtcacagttatggtattttttttccctttggggtggaggtgtttatttgttgttgtagatttgtttttgtttttgtttttttgagaaagggtcccactgtgtgaagtaggcgggtctcaaattcagagatccaccagccctcactgctgagtgcagggattaaagatgtgtacaaccaaggttagtcctatggtgtctgccacctcatctggtcttacagtgttgggacttgaacccacacagctttgtctatgctgaggggcatcttcagtccccaaatcagttgttttaaccagaaacaagggtgtgggggacaaggggagcgaaaacggtggaaggatctagtcttctctttgcttcattcttccctcgagagtacattcacctcccaagaaggcagtaacagtagtgtcccaccactggtggccatttgccttcatcagcagaatcctggcgtcctggaagcactctgataaatgggttttgcacagagtcaaactaactctgactatgctttctggctgaactctgaaatgttgccccacattggagaaaagtcaaaaatatccccagatcatggctgttatctcctggacagaattcggaccttaagctgtgactcccttccattctctcccatcaatccctctggtgggcatcctaaaccagattccagagctgtccccagtttgaatcagggaggctccggtgagcctaagaatttgcatttctcacagggtcccaggtactgctgacaatctccattactgatcagaggatcatctcctcagtgaatcccagcccctcacctcaatgttcaccccgaagacctggttggtatcaattttatacaggaggaaggaagcagggaggatcctgagcactgtacatttgtgcagacccttcaccacacaaggcacgggcaagtaggacaatctcccaccgattatctgtgctctttttatttagtccattaactccatccttattgaaagtcacttcccccaaaacatgttttgcaacggcgagggagcactaggaatttcctgtggctaggcagcccagtgcgggcaggggtggaggcagcgctgagcaatccagtccttcccttggctcgggcagggccacgtgccccaccccctcacttgcacatgtctccgccgccaccgccgcagcagccgggctgtttatgagcgagttgttgtggtagaaatggagcaggctgcacatgcccgtgccatgtgacccgggcagcccgcgtgagcttcaagacagcacaaacacactcggccctgtcctccagtggccggaggaacaggagggaaggaagggggaagaagtgaaaggccactgggccgccttgttatctgctgccctgttttctgcttatgtactttggtctctctcctgaaccaccggtagtgcagtcagcagcaagtaagccagggttctccagcatgctcaccacccaggcagccgtttagcatttacatccacccagagcccaaatcccccccggataacaaagggcctctccgggtcaggagcacagcatctctcaccccagccaccttaaagctgagacctgcttttcctggagcctgggctcatctaaccaggcttccctgtcccctctttctaggaaggacgatgtcacacgtttgtaagaatagtgcccactccaagattagaacaaggagaaaccagcgatttacgagccggggacaggatgctaagaatgtgtttgcagcgggggtctgtggggccaatggattgtaaggggaagtccctttgctagtccgtgttgaggaggcgctggagacctagaaaggctggctgtcacaccgactcctggagaacaagcgacagggtaaaaggacaagtttagctttcatccctcaccgaaacgtcccctcccccgcccacagctcacaggccctgtaaccccagagcccctacttgcagcccacagctcctgccccctgcccactgatgaccctgtttctgcgctgcagggtaagactgctggagtcaggcggacagtaggttagcaggaacaagcaaatgaaatgagagcgacccacatttcctcgcacaccagaaaactttgcagcttctgcattgcagagctggtgctttttattttttttttatttattttattttatttttcaaatctctccactgggcccctacacacgtctgcatttttgcaaccagcacagattttccccccctctcagggtgcagactgtgcattctaatgagccaaagcttcttcctgccgcactgaaaaatctcatcaaaccctgcccctccccccacttagaagagtgggaaggatcctaaatttgtgaagtagcatcttctccctcctccctcccccatcatactgcagaccttccaaccaacagctgcaaccaagggaggaggaccgggaacgtgagccttattccttccacacaagctgagctggcggggcagaggttgcttattctttcacgcccccnnnnnnnnnnnnnnnnnnnnnnnnnnnnnnnnnnnnnnnnnnnnnnnnnnnnnnnnnnnnnnnnnnnnnnnnncccaccccccccccgcagccactgcaccctcctttccctcctcatcctagccagtgtttatgtaagcctcccagaagctacacacggcccccagtgcttgcccaggccccagtttctcccaagtccatccttctcacgaggactgtcatgagcctcgggttccctaagcagctgcacagagatctacagaggcccaaagaacagcggatgcttgatccagagacggtttgaggtgccgcttagaatggagataagaaaggcgcagaggcactctgcctcctcaggcatatacaccccacaagcttctctgcacctcagtccacagtgactctactcacggataaccagggagcaggggcttagaagatggcatcaccagtgagttacaggtgatgaggtacagcaggacaggagaggtcagcgtgacatatactagatgctactgtctccctagttgggaaggtggactctttaccagatcctgggatatgacttagatcctgggctcagagaaggccacccctcctttgagttcccagagcattaaggtacaattgatcctgcctggatcgtggccttaaaggtacacatttctcaggcagataaatggaaaagcctgacatctttcctttagggtcatatcacaatttccgtcctagatggccttccagacttccagcaaaccccagctcgctcattcattcattcattcattcattcatttattcacgtatttattaggatagggtctcactgactggcttagaacacactgtgcagaccaggatgggctggaatccacacagccccacctacctccacctcccaagctccgatcaaaggcaagaacgccatgcctggctctttttttgttttgtttttgtttttgttttgttttgtttgtctttttcaagacatagtttctctgtgtagccctggctgtcctggagctcactctgtagaccaggctggcctcgaactcagaaatctgcctgcctatgcctcccaagtgctgggattaaaggcgtgtgccaccacacccggctcaacccagttttaacacattcctggaaggaagcactgagaggctctgagggccctggcctctccgcccttgttctcattcatcaccagctgaggaccccataattaggggacttgataaagaactcagatggctgcttgagtcccctgcctctgaagcagtccacgaggaaattttgttttttgtttgttttttaaaggctttatttatatggatacactatagttgtcttcagacacaccagaagagggcatcaaatgccgttacagatggttgtgagccaccatgtggttgctgggaattgaactcaggacctctggaagagcagtcagtgctcttaaccgctgagccatctttccagctccctgttttgtgtgtgtgtgtgtgtgtgtgtgttttgtttgtttgttttttaattgctggttggtttggttcttgcatcctactctgggccgttcctaccctctacaaccagataatgggaacataggatggagaaagagtttaagggaagaggaaatgctggagttagaggagaggttctgggaggccaaggctcttgtgtgggaggaagcagacacttctcttggtgctgcacctcccgcccagcacgattgttgcttgggatgtatcctcttcatcgctcagtctccctgggaagggagatctggctagctgaatttctccttcaagcctggcactgaacccccaacatagatcgccatgctgactgacagtgacatgtagtggttgttccaagtgaggctagggagcctcgcccttccaatcccctcgattaatgctgtccttctttggtagtgttctgtaaatacagtttcacgacaaatctcctagtcccttccagcaccatggccaggttaataaatatctctaagtctcagtttcctgatctccaatatataagaatgtgacctactgccctgaaaagctatgaaaaccaaaggagatcacgtgtataaggttcttagcagagtgcctggcatacagttggcacttaatatgaagtttactttctgatttccttggaaagaattgtggtccagtaaaggtgggaaaacacacccattgaacccattcgggcctgcctagatcttgccttatcctttctttcctcaagttttcacaataacaaaattaactcagactttgtgcctcctgtcttgaggttctcccccaatggtaagatttttgggcgagactgggaaaaccagccttttagaaaccaggaaaacgatccagaacgataggaaatgagcctctcttgtaagtcaatagctggttccctgattcaggggcatccccgggttccctgattcaggggcatccccgggtttctgggtttctgtcccaggtttgcatcacctgggccaacaggtttttaacctgggcaatgagtccttggtgagaaaggagggggatgggaaggcacctactgaagcctgacctattttcattagggtcccaccctcaagtcactcagtcaagcagtctgcccaagattgaggccacttgaggtctgcacagggtgttgtcgtgttacccagaacaacctaccgtcaaggagaataggtcttgggtcatacacccacctggccatgtacactcagtgcatacatacacatgtaaaggtgatgtttatattcatgatcataaacccctagcccctcagaagtatacagaggagctcaagtcagagcttagagtcctccatctttccttttgctacttttctttaaaaacaatttttctttcaagacaggatttctctgtgtagccctgactatcctggaactcaccaggctggccttgaactcagaaatccacctgcctctgcctcctaagtgctggggttagaggtgtgtgtcaccaccgcccagcttattatttttttttttaatttttattttaggtgtatgtgtgttttgtctgtctgtctgtctgatgtatatgcaccagatacatgtctggtgtcagaggaaggcagaacagggcatcagatcctcccagaaactggagttacactcagttgtgagccaccatgtgagtgctaggaaccgaaaccaggtgctctgtaaaagcagctagtgttcttagctgctgagccatctctccagctctggttttctatctttgatggcttttccagttcaaagaatcctgggaaaactaaggatatagttgaaaatacaaacacagagaatccaacaaagcctctaaatagtgaggtcacttctcagaatcccagacttcaaagaaaccgagtggaagtacccacactagggttctggggctatactttatggagtgctagtcattgggtctgacctcttgggggctaagactggctttacatacgcgtgtgtgtatgtgtgtgtgtgtctgtgtgtttgtatatgtgtgtatatatgtgtctatgtgtgtctctatgagtttgtgtacgtgtgtgtgtacgtgtgtgtacgtgtgtgtacgtgtgtgtacgtgtgtgtacgtgtgtgtgtgtgtgtgtgtgtgtgtgtgtgtgtgtgtgtgtgttaagctagaatgtctggctggctggtgggaggggaaggatgttgtgtggttgctgtagtagagatctttgatgaattgattgattgattgattgattgagacaagtctcatgctgtcaccaagaatcagtggcctggaactttaagtagcccaggctcactttgaactcatagtaatccccttgcctcagcttctcggtttcttggcttagaggcatgatcagccaccatcctactggctataaggtatgtcttgttttatttttatttaacttaatttttcctttatgtctatgggtattttgtccttgtgtatgtgtgtctctggtgcccacagaagccagaaaactataccagattgtctggagctagagttacagatggttgtgagctgccatgtgggtgctggaaattgatcctctgcaagagcagccattgctcttaactgctgagccagctccctaactcctacacctgttgtctcaagccaaggtttagggcaaagagaggtcacacatccagtcttgtccccaccaccctttgacacatttctttggtggccctggttccctggtttctctgctgttcttccaaggaaaagctctacttttcattttattccctggagaaaacacacacacacacacacacacacacataccacagagtgggaagtgagctcatatgggtatacctacttcaaatggagtctccaaagacacttctttgactgggtgtataggtaacacatctgtaaccccagcacttggacacttggatggcagaaagcaggaagattaaaaatgcaaggccagacaacagaagtagaccctgtctcaaaaaaaaaaaaaaaaaaaaaaaaaagcgctctttgccagggagaaaagaaggagccctatataaagtggagaggaaacaggagttcaatgtaaaggcccctccttcccttcctcccagcttctggcttcatacctcacacagactacaaaacaaccttgctcattgccaagagcagggtcaggctggatgaatttctgggctctagttccctcttctcactagctgtgaactccaggagggagtcttgatctctggcccttccctgatatgaaaactttctcagcaagaggacgtgggcaggaccaccacagttgcaaacagtgctgagggccttggggggacccagagcaactaaagaaagcaggggagtgagcgatattgagaggtagtactgggactaggcggggtggaacgtctagacagcaccaagggaccgattttggattttgagcagtcctcagatacccaggtgggtggggtggggtgggggttgcctggctctgagccaatcaaaggtctcaaagagcaggcagccagggacagagcagcttacctcccagctctccctccacacagttggctgggaggagggagagggagtggaggctgacttcaaaaccaagttttcctgaaaagcctctggccttgtttgtcttagctcctcccagttcctcccatggtgctctgcagcagcttcctagctctggacctaagggccagggcagcgggagaaatgcttgctccccctcttttccaagcccgttaggcacgagggaacagggctaaagtctaaccttcagatgatcagtggttaacccggtcaagatcattgaccttaacattcagctttctttctccttggtacccctaattccagctttgagggtctcatgttgtttaagtctcaaatcactgagctcaaagtggtcctcctggctcagtttccccgtatgcttttctctgactccaaggtagcttgcttcccaggattcccagaactctctggagcttcctaagtgcaagtagagaaagacttaaggttaaaaaaaaaaaaaaaaaagcaccccccctccatccccaagtgtagagattacagaggacttggagataggagcagggtggctggggcttactcgactgcttgaagatacgtgtccatctctctttacaacccaagccccagagaacagaccccttcccccaggcctctgtgtttctcactcctgagatgactgctgctctgagagagatgctaagtgcttcatgtgctcatttatccgccatctcagggacgggacggtcacaagaaataagcagtgaatgcctgaccttgagccagtccctgagatggcggtcccttttcttcttcagtaagaggagggaagatcctcactccctcctcgcttagtaggagcttgctttgcagctcaagtcagcttcaaattcacgacagtcctcctacctcagcctctcaaggacggtgattgcaggcacgagccactacaccctgccaattcggggagttgaggggtgggagttaaatgatcctcatgttctccctaaactgtgggcttcttctgctatcatgaagccctgcagagagcagacccccctctctctatgaggacctcagagcactttccctttgttctcctttttatttcccagacaaagggaaatgactcaccccaaagtcacttgagtgggcagtgtggtgtcatataagcaaacagggagtccctagggatatccccgtgctatgccagtcctacccgtgggggctggggttagggtgaagaagagaaaggggttttatttacactgcttgtcgcccaccttgtcaccatagcaaaagctgcttaagttcttgatttaagggaaatctctcctcccagcttgtctttctccccctagtcaccactaacctcagggtgaggtcagttctccaatcacgtgaagctctcacgtttgctaggtttgcagaaagggccttttagctttgatcttccacggagcagtaaagcttgccaggccctccccaggaattcacatgcccttgccatacaaggctttccaaacacgccaccctgactcttcagaaaaccccaccccagtccactttcagctcctccccgctgccagcaagcacttttgcaaagcagaaaaggaataggcacactccacctacattgtcagtagactacaaatcccaacaatcctggcggtgcgcaggcgcacagatctcaacgtgccggctgctggaaaagtgtgtcactggggcacgaggcgctccctggaatcacatggtacctgctccagtgccgcgtgcggcccgggaaccctgggctgctggcgcctgcgcagagccctctgtcccagggaaaggctcgggcaaaaggcggttgagattggcagagtgaaatattactgctgaggaaacgtagcagggcacacgtctctctttgcgtcctggtgcctcatttctccatcacctacttacttcctggttgcagcttctcttcctttgggacttttgcacccggagctccagattcattaccctgcttcactgcggagccttcaggagtggcatccggtgcactgcagagacccgactctccttgctaccttatagccagaactgctgcaggctgattcttcacacacacactctctgctcttcccatgcaaatcagatctcaggtgcctcagcgtcctacccttctggagggctgcagtatagccaccccaagaccttactgctcagtgcctggaatcctgattgcgaactgcggggctcactcgtctccctcagccattgcccagggggcgagagaggccatcacaacctccagtttgtgtcaaggtccagtttgaatgaccgctttcagctggtgaagacatgacgaccctggactccaataacaacacaggtactgagattcttatctttgctctgtcactgtctccatttccatccaaggcttatgagaggaactttgtaagggattggggattccctctggctggtgtttgttactgtgctaagatgaaagccactaggtaagatttctaaagagggttattacggctgggaatgtgcctaaaacgcatcactagcaccccctgagttcccctcagtccgagaacggatgaaatggagggtggataccagtggcgagtggaagagtttagggagactcagcattttgaagcagtctctggacacgtccccatttgcccactccttgcagctatagtatgcctgtctcttttcccttttctacagttctagcctacttccaggtagtcttgggaagtggggcgatccgggctggtgggtttgcgtgactgggtcagagttcacaggggaatcctcagcggcagtggggagcttcatttgaggagtcgggtgcttgggactcatctccaggcagggcacccacagcgacttagcctggggagggctcacatggctgcagagccgggcccacgtgctgcatttgttttcattcagtagaagccgtggccgccatctcattggtcattgcctcccggcctcgttacataatgagctccgcccctcaagttgccggagcaacgcttgtcgccttctctcctcccctcagttgtcccggcccagcttggttttagggccagcctacgacccaggacgcccgggaggggcggggcgagggcggggttttccttgcgacagaagggaagcggagaaggcggtgcttcgagttccggggttcctcgttggggtgccacgtgcgaggggcacacgtggagtggggacgtgaggccagctgagggccaggctcccgccccgcccttctccgcctagatctgggtgaagctgggctgactcaccgcccccgcctggcttcttttcctctcagactgcctggcccttaccctctatgaccgagacttgagtaatatgggggcacccctgacttgtttggcctcaagtttatacgtcccagctaaacctcacaccagattattcttatacccctttattctaatcatgcctacattcattttctgcattcagactcacttttccatgttccaaagtttactgttctccgagtatgactttgcatgccatgaatgtcttctcccccccaaacaggaataccttagaatcaaggttgacaacgtactactttgtgtcgtcgcccagggttttttccccccactcatagaaaggaaaactgagaccaagagacaagagttgatttcctctatattggaaagctaatcggtagcaatacacatctagatggagagctagggtcttttgagcattgcccatcacttcaaagttggaagacttttttttttagtgactttctcatgccctctttcaggattaactaggtcaagttcatttaggtccacataaataacccatcctccaacccagccgtgaaaccatagccgggtaaccattctgtgacttattttacaggcagggttcaccctgaccaaccttgagctattttaaggttgccctgcctggtttagtgtgtgtcagtgggtgagcaagacatgtgcttctgtcgactcggtggcatggcatgtgtcacctcacacacgtgtctgaggatcctcccctttccccactccacccatggccggccaggctaagtacttggcagaggtgtggcagacaagtggcccttctcttctgtgcataccacaggagccgaatcacctggcccgcaatgtaaccagagggacagagccgctggctgagtggctatagagctaaagttaccaccgggctgagaaggaaggggaattcctaaatccctagaatggatactttgtttctccctttcatctcctgcaactcatctgagtcttatctgtcacatttctaagtctcttgtgactcatctctcagaggccagagccaggctgaacagagagtccttccctgcagtactctatgagaatatgtctttgggtttgaaagcaaggtgtgaccgttttacgtttgtacacctccattttcctcgcactaggctagctacccatcacgctgcagggtccatcactggaaaggtctcagtgtagaactagtggctagttttttttgtgtgtgtgtgtatgaataactgtcagctgtccatctccttcccaagtctaccccccttgtaactaagaccctagctgctgtcagtactccccaggaagcagctagctcaggggttcccatgtatgagatggccactggagttacacctcccacccaaaccagaagcttaatgtattgtgcaaagcaatggccatgggtattttggggccggacttggttatcataagtagcatgtgatggagagtttctaataacgactaggttgaccggccgtgctatatttagtctgtgtgggagaattgcttcttactccaaggttagggggtctaatgttctgatgatgactgtgtgaatgacagacttgatggctgataccctccccttgtgttctcttatttaggtggtgttatcacctacattggctctagtggctcctccccgagccggaccagcccggagtccctctacagtgacagctccaatggcagcttccagtccctgactcaaggttgtcccacatacttcccaccatcacctactggctccctcacccaggaccctgcccgctcttttggcagtgcgccacccagtctcagtgatgatagctccccttcttctgcatcatcgtcatcctcttcatcctcctcctccttctataacgggagccccccaggaagtctacaagtggccatggaagacagcagccgagtgtcccccagcaagggcacaagcaacattaccagtaagtcaatgcccagctgatgtagggggaaaggaagtgagcccagacgtagttgatagagttggtttccatctgagagttactcttggggaggtgggaggggatgggggtctgtgctctggcctttggaatttctcttaagagtttgtgccagctcctatccagtccagtccagtcacctagacgtgagagcccctcagctttcccctcctagaaccttgagcccagaaggagtccgtattaccctctgcctgtctcttcccacagagctgaatggcatggtgctactgtgtaaggtgtgtggggacgtggcctcaggcttccactatggagtgcacgcctgtgagggctgcaaggtgaggcgggttagggttgaggacctgggcaggggatgcatgcacaggctcggcttagatgaagacattcatgcgtcgcccctgccttccagggcttttttcgccggagcatccaacagaatatccagtacaaacggtgtctgaaaaacgaaaactgctccatcgttcgcatcaatcgcaaccgctgccagcagtgtcgcttcaagaagtgtctctccgttggcatgtctagagatggtaaggcagtattcccatatctccttctcgccccattttcttccacccggcttctgccttaatccctccgtttaagaaagagcctcaagttgagaaggatggtactgtgagtgttgtttacatggaggatacccaggtgctaacctcttgggcaaacacacactcttctaccattcatatccccccccacccccaccccctggtcatctcctctcacaccccctgaatgggtgtggctttgctggtttcagttttgatgtggaaccccccaggcttttagggtcttgcttgccctttcgggcggaaggaaggaagagacgcatgtgagtatgtcaggacttcctgacacggttctcgccctgttgcagctgtgcgttttgggcgcatccccaagagagagaagcaacggatgcttgccgagatgcagagcgccatgaacttggccaacaaccaactgagcagcctgtgccctctagagacctcacctactccacatcccacctctggctccatgggcccctcacctcctcctgcaccagcccccacacctttggtgggcttctctcagttcccacaacagctgacaccacccaggtctcccagccctgagcccaccatggaggatgtgatatcccaggtcgcccgggcccatcgagaaatcttcacctatgcccatgacaagttaggcacctcacctggtaacttcaatgccaatcatgcatcaggtagcccttcagctacaactccacaccgctgggagagtcagggatgcccgtctgcccccaacgacaacaaccttttggcggctcagcgtcataatgaagcgctgaatggtctacgccagggcccttcctcctacccgcctacctggccttctggccccacccaccacagctgccaccaacctaacagcaatgggcaccgtctgtgccccacccacgtatattcggccccagaaggggaggcacctgccaacagtctacggcaaggcaacaccaagaatgttctgctggtgagggcatggagccagtgtggagagagcgagggggccttggaagattgggactagagaaagacagccagtgttcctagaggctgggggtggggacttctgtccaggaaaggacattctaccccaaaatctgggttttacctgggaatccttaatcaccattcggcacctgattaccgatttaggtgagagaccccttctcaagggccacagctcttagcccagacagtacttggaaccagtcctgttggggagcccacccagctaacatgtccctccttactccattctcctcttaggcatgtcccatgaacatgtatccccatggacgcagcggccggactgtgcaggagatctgggaagacttctctatgagcttcacgcctgccgttcgggaggtggtagagtttgccaaacacatcccaggcttccgtgacctttctcagcacgaccaggtgaccctgcttaaggctggcacctttgaggtgagcggtacttttatgttccctgctcttgactgtgggagggccccagtagtgtggtgactggagtgggaagggcttcccagagtctttggccctgtgttatctctctgtctgaggagatagaacttgtaacaccgctagctcggcacctcagggtctgtgggaagtctatcctctaggctggtgttgcctccaaactcagtgcatcagagtaaccaaagagacaactctcctctactctaggccggagctggtgaccttcggttaaattacattccagaagtggcgggcactcccacctgcatccctcattgaccaatcagagactgacccccttactgacaatctaaggaaacacccctcaaagttattagcaggctctaggggtcatttggcaaaatgcccctcccatctcactcaaaaaatgtccaccctcccttcaggtgctgatggtgcgctttgcatcgttgttcaacgtgaaggaccagacagtgatgttcctgagccgcacaacctacagtctgcaggagctcggtgccatgggcatgggcgacctgctcaatgccatgtttgacttcagcgagaagctcaactccctggcacttaccgaggaggagctgggcctattcaccgcggtggtgcttgtctctgcaggtgagccaagctctcccctgaccctggaggaggcacacgcagttcaattcaacataccttttatggagaacctactctatgccaggcccagcactgggcactgggctacagacatgattcagacacagtctagcttgggaaacagactcatgcccgactaattataaaacagcgagaagtgtcacacaagaagcatgaaccaagtaagcacagacgactatttctgcccgggagagctggggaaggaggtgacacttgatgtggggcctcaaagggacaagataactgccaggcatagagagggggaagggcatcccaggcagagggaactacagagcaaataacaagggagcttggccacgagtggcatgctcagggtaggagggtgggctcgaggagtgggaggtggccagcctgtggccatgctcccagcgtgtgggcgtggccccgctctagggcagaggccccccagggagaaggagtagcgccctccttctcctttcccgttgccctccgttgccctccgaggggcctcagggagaggctgccttgcctgcctggtcctcgcagacctccgtgtcctccgtgtcagaggaggagctcagggagctcgcctcactgctgtcgtcttccccacagaccgctcgggaatggagaattccgcttcggtggagcagctccaggagacgctgctgcgggctcttcgggctctggtgctgaagaaccggccctcggagacttcccgcttcaccaagctgctgctcaagctgccggacctgcggaccctgaacaacatgcattccgagaagctgctgtccttccgggtggacgcccagtgacccgcccggccggccttctgccgctgcccccttgtacagaatcgaactctgcacttctctctcctttacgagacgaaaaggaaaagcaaaccagaatcttatttatattgttataaaatattccaagatgagcctctggccccctgagccttcttgtaaataactcttcccccacccccaccgccatgctcccatcctcccctatttaaaccactcttgctctctccaccctcctctggcccctcgatttgttctgttcctgtctcaaatccaatagttcacagctgagctggcttctgtgatgtgtgctcgtttggggaattggggtgggggtgggggactactgccaagggggtgtgtggggggggggaagacacctctccatctggtcagcttgtggggtgggtactctgccagcagatgggagaatatggggaaacagcacgcaagtctaagggggggtgcccaagggggttattttcatcatatatttattacataaatatatagtaaaatagacgagcaacaattaccataaaaatatctttctttaaaatcctgacccaaaacacaacggggtgaaaaattcgcacataacagacatactgattgtcaactgtggggcaggaggaggagcccctcaagtcacccctgccggtcccacccatctctggggaaaggacctatctccttccctgtttctagccacaacccctccccccacctcagcaccagcttctcatacattcagtagcgcctctgggtagtgtccccctcctccacccaggagttcctagggcaggaagtaatttcccccttatggatggacggacggtgtccatgtcacacgccctgctctctcccagcccaccgcccggggaaggggtaggggctcctcctcccccaccctccccaagtctgagcagggaggaggctggatgaggtatgtgtgttataagtgatggggggggggaatactgagatggagaggcagtggtagggcagggtagtggtcatggctctggcacccccttgtcctggcctggcccccccaaccttctcccagcaacccacccctcccatcaatactgcacctgctgccccacccggcctgccctagtgccccgggccaacattgggggaaggcatgctaagcacccatgccaaggccatccccccattagcaccaatggcccccaggagagggccctgtcccccacttccatggcagggactgggacagctgcctctctagagcaggtgcgtggcactcctgagtctctctggctcctcccacaacgtagactcactcatccactcacacgaaggaacacacacatacactccacatcactgagggggaggggaagggctgaggggcaggggctcacagctcatatgattggggggaggggggaattcccaagtgcctataagaggccatgcctatggctgagaatgggaatggaggggagtggagtcaggggaagaagggagacagcaggcaggtcaggaactccactgagtccccaggtatgggagggaagtatgagagtattatccatgggactggaggaatacagaaatcagtaccccgggagagagagaaaagaagatagagatgaagatagcacaggtggcccaggggccccaaggagtggggcaggcacatgcacaggtgacaggagatgctcctccaggccctctgcccagttggaacacctgaacagtggcaaaggacactgcctgggaacagcaaagcattgccttccacgtgtgtgtgtgtgtgtgtgtgtgtgtgtgtgtgtgtgtaggggctgtggcaggctgagggtcagagtggggtggcaggttccccactgcttaagacatttttgccccaatagtgcaaagcgcaggaagccctggcacccctcccccgccccctgccccattccccatggcttccggggggcatctatgtccacccatccatccctgccgacatgcagccctgagcccagggccactggtctgctctgttcctcctcctcctcccttcccttccactctgggagggccacctcctccctccctctctctctttctctctctctctgcagaggagtgggctgttagccaaagggaggaggaggaggaggaggaggaggaggaggcagctcacccaagtgcagaccaacagagcactcctcaccaaagggtgggaggtggctcaagccaaagtccctgaattagaaaagaagaggggagaggggttcccaggggcagaggggtggctggcctaaagagcttcaaaaaaaatgggaggagagccaactgtctcctcccctgggccccagctaagtgccactgatagaaacaccccccactgcatgccaacctgccctatgtctggctagcgcatcagtgggagtcaggaaggagagcaaagggagccccgaagacagacaggaaacaagagtcccacaggggtggaggttctgggagacacacatgtccaccccaccccaccccaacagcagcatctggattgtagctaatactgcaggatatgaagagggaaggagcccgggccacagtttttcctgtgtgggtgtcaaggtatggggtggggggacaggaggcccctggggctgggcacttgaaaggggagctgtgtgggcaacagggcaggctggtgaggggccagctggcatccagcgtgagaggtagatggaactcagcgggcacaagtggcagagagcagaagtactggggtgcggtgccaaaggggcacgagggtggggggcaaggcaagggggttgccgggaccctgttgtatcctctcacagctctgggcggcagccctacctctgtaggtctgcctggggcatttctctctgggggtcggaagggcagctctcaaagtgcatgggggtgggaagggcagggttaagggggggggaatccttccccttgggccagcctcagctaataacttaatatcatctctcgctctctcgctctctctctctaacgctctctttttttgtctttttgtttttgttttttgttttttttttctgtctagtttttcttcatttatattctccccttgcttggtttccaaagtgcagttaggatgactaccatttttttttagcctccaggggaggagctaagccaagccaagccaagccaagctgtcctttgcacccaggacccaggtatttggggaagtagagacctgtggcctgaagggaaatctaggccaaggaacttggcagggctctctgtgtgtataggggtgagtaagggcacctgcccctactcctcattcctcctgaccctacagtcaagatggcatgtccctctcaattcttcctacttcccttcccctactttttttagaggttggggtcccagagactctagaacttgggtcctagcctcccatactgcctttcatagcaagttcatttatggccctgtccaagggctggagggtctgagggggctgggcagtgcaggggtgtatgggagctgcatctatccaaggatgggaggaaggagagaagagatgggggttctccctcagcccccagctctgtcccttctctccaggctcctccccaccagctccgcacaccctctggccgcctgaggctttagacttcctgatcctcaaagacctccaggaagagtggggggaagagttcggtggggcactcgactttcatgtggaggaagcggctggcgtggcaggccccgatcatgcggaggtcagtcaccttcatcagcagcttgggccagaagtgcggaatgttgtgtttgcggtggttgacgtagtgctcaaacgccagcaggtaggcctcctgactcttctcgatcttgtccacgcacagcaggccggagcggtctgcagggagcaaagagaggcatgaggcccgaggacaagagggtctaggaaagccgcaggagaaagcatgatgggatactgaggcagagagactgggagggatcaaggggagaaaatagcactgagggacgagggtagtagcaggaggaggtggctggggctcagggagggacactgaggacctgcggccatgaagcaatccataaggaagatagtgaaatcgaaagacggcagagaggagagggaggctggaaacagaaaacgaatgggcagagagaggattggtagtgagaggcaataagtaagcctggaaccaaacaggagggcaaagaaaatggaatagagcataggctagcagggcaggggattgtaggggtcatagagagtcagcctgggagggaaggggtgagacagaacctatgcaaaactaaggagagaggcaagcaagagccctgggaacttgtggcacctctcagccacagcaagatacctgttgacattagcagcacagcctgcagcagagccacttccgtgtcatccaggttaaaggcagagagtgacttgcccagttcaaagatggcgtcagagaccacacccaagccaccattcttgagctgttcccgcttaaccgccatctccccactcagggtcagggtgtcactctcagggtcgtagcggacagctgcccgcagggacatgatctccatgcagcagcccttcaggaggatgatctggtcttcgcaaggcagctgtggaacagcaggatcacagagcacttcagtgcatcctctccacaccccacagtctcccccaccctgtgctgggctgagcccgcccctcctgcactgttgcacttaaacctcacagctatgtctaagggtgtggtcccatcattctcccagtctccttcagaaactgaagtacagaacacgtaggtaacttggccaaggtcccacagctagtacagcagcctgtttctagttagtgctaggcagaatgaagagatgagtcatgctgcctgcagatagaataggagtgtgtgtgtgtgtgtgtgtgtgtgtgtgcatacacgcatgtgctgaatatctatagatctataagaatcactccatgtccagagaacatgagaagaatacccagtgaggctctgtgacctgggaagtgacccgagactctctctaacaagtctctccttccatctgccactcacctcggagaacatgggcagttttttggcaaagtccaccacgcgcgtgatggccggggtgatgatcttggtaaactcgctgaaggcctctaggtctaccttgtctccgtccggcatggagacaataggtgactggccaatgtcatccggctagagggagagagacgagggtcagctggggctgcagacccctttcacccgctcacggagactccctacccaccagggggagctccaaggcagcttggggggggggaaagtcccagcggagcctgctagacagctctgcctctgcctcaaggcttcaacattaggggaagaggatagaccagagccagcatttcagacttactaatgctgataatggtgtggacagtagttaataaattgcaataaaaacacagccgtcatgcctgaaagcatgataccaggctgtaggctggttgcctgctctacatagctccttttggttttttttgtttgtttgttttttcgagacagggtttctctgtatagccctggctgtcctggagctcactttgtagaccaggctggcctcaaactcagaaatcgcctgcctctgcctcccgagtgctgggattaaaggtgtgcaccaccacgcccggctctacatagctccttttaatccttgctgcaaatctatatggaaaacagaatcaccaacacttctgggttcagcatagctcagttgtatggccagagtcacacaacgagtcctttgcaaacacatctgcttggtgttgggtaacttagtgcattttccatcccttagcattctctactagggaaccaggccccgttggcccatctccttccaaactgatcacccacttggcagtcggttctgtgagggttgaatacaacacctggaccctgcaggtgtcccataatactgttatgtgactatgtcctcagtccctgtgggttagccccgccctggaatctagaggattggacccagttctcatggagcaccccattagatgggacaggcaggccctagaaagcaaaggcatgtgtacaagtgtacaaactctaaactgccaacagggacagagtaccagctttgggctgaaccaaaccaaggtttccaagggaattttcaatgcgcatgccttcttaccaggaattttcgcctctgtttccaatggctgccctgggcgttagtgctgcgatgggcctctgtagcaacatgtatcaggtcccactcttcaggagtgggctctggtcgctgctgcagtgagcgaatcatctcctcctttcgcctcctctcccggttctgctcaatcagcttgcgtttggccacccgcttcgaatcatctagaaccactgtttatggaaaaaaaaaaaaaccactttgcatggcaaaccccctcccaagctcagaaattacacactctagtacaaatgtcaagtgacttcccaaatcacttagcaatagggtggcacaatacaaaccatgtttaatcactgggaccaagtcaactccaagtaggttggtccaaggaaagacaggttctgatttgagctgtgggggacttgctaaccaacctacagtcgaggaaagagcccttcctcatttggatgtgccttccctgggaagcaggaaccttactaggctcagcgcacaggagtttttactcaacaactccctttctaaagtcttcaaacggcaagaagcatctagactacacaggaggggctggagagatggcttagcagttaagagcaccatctgctcttccagaggttctgagttcaattcccagcaaccacatggtggcccacaaccatctgtaatgggatctgatgccctcttctggtatacaggtgtacatacagatagagcacttatatatataaaataaattaaaaaaaaaaaaaaaaaaaaagactacacaggacttctatttcttttggtggtatgagggtaccaaatgggatttgggatgaagcctaacctagactggctacccctcggccgctacccctcagcccagctccactgccccacgggtgcctcttacagtccatggccatgcccacagcaatgcacttcttgaagcggcacagctggcactgattccgggtgatcttgtcgatgacacagcagctgtcatacttgcaggaataggtgggatggagattcttctggattgtgcggcgaaagaagccctagggtggaggcatcggaagcagggtgcatcagtaaggcttcctctcctgagccaactacacaggtgactgaggaggggaggggcaagggaagtcagtgtcacctggcatcctcaggtcactgtggggccagaattgctggaccctgccaggccaaagagacccaaagaaacccatgtccttaccctcaggctgcagagggatgagggatgtctatactggcagaagtaagaacagtgagtgtggtagtcagcacggggcctggcctgggctgccgtgggatgcggtgaggccttagaagtctactctaaagaatttgttaaatgtattatgcagggtagtggtgccacaggcctttaatctcagcactcagaaggcagtggcaagtggatctcttatgagctcaaggccagcctgatctacaaagcaagttccagaacagccaaaaccaaaaccaaaaccaaaccaaaataacaacaaaagtagtatatagccgggcaggggtagcacacgcctttcatcccagcacttgagaggcagaggcaggctgatttctgagtttgaggccagcctggtctacagagtgagttccaggacagccagggctatacagagaaactctgtctcggaaaaccaaaaaaaaaaaagcattatatatttttcaagacaaagagcctcacgaagtccaggctgcactcagactcgctatgtagccaagtatgaccttgagcttctgacctctggagtggcaggattgtagacatgtgttatcacagctggtttatgtggtgctggggatggaacccaggctttgtgaactcgaaggaaacagtcaaccatcagcgctacatcgccagccctagaaagtccggttcatatcttggccatcttgcttaatgactctacaggcaatgctgatcccaaaagcattctcatagacaccattttgcctattacccttgcaaatgcaatttataaaatagtattcaagagaatgcagagtgggaacattcattgcttgtaagctttcctcctcttcttcttcttcttcttcttcttcttcttcttcttcttcttcttcttcttcttcttcttcttcttctttttcttcttcttcttcttctactactactactactactactactactactactactactaactactactactactaaattgttgcattagtctttgctttaaaggaagcacttgaagaatcaggatgagagcaaggtgagttcgaatacctgctgaaccttactttgtgatgggcatgtggcacgtgcctttcatgtgtgttaaatttaatctccacgtcaaaactgggctttctctagaagacactgagatctgagagtccagatctagggtgaattaaagttattgtaccaagatacagagtcctggacttcattctaaatttataaaagcaagctctagaagtggagaggggcacctctgtctttggggcatgttcccttgtgacctagctgtctgtccttgaagccgagggttcttgttcttggctatgttgctactatcatttctaggaacatggctatgaaacttgggatctcgactggtttttggtctggctgacattaagagaaacttcaagcttctgcattgtgtgtgtgtatgcctttgtgtgttagtccgagagaggttttttggtttgggtttggttttggttttttgagacagggttttttcctgtgtagccttggctgtcctggaactcactctgtagaccaggctagccccaaactcagagatctgcctgcctctgcctcttgagtgctggaattaaaagtgtgtgccacggggctggagagatggctcagtggttaagagcactgattactcttccagaggtcctgagttcaattcccagcaaccacatggtggctcacaaccatctgtaatggaatctgacgccctcttctggtgtgtctgaagacagctacaatgtactcatataaataaaacttaaaaaaaaaaaagtgtgtgccaccactgctggacttgagagatggtcttatgtagcccaggcataggtttaggatggccttgaacttctaatccttctgcttccatcttctgaatatggggctataggcatgtgccaccatgcctggtctcacttttaaatgatctccttctggaaagacctgtacctgcaggaggtggtggtcccagaaaagccatacaggttgaaacaggttgtatctaataggcttttccaagtctgtggcctttgatcctctgctaaaaagaacctttggcaatcttctcctctatgtccccatcatgacccttcagcacaggtcctagttttttccggatacattgggagctcctgggactcctgttaaaagcagagtcctgggctccaccacaataaggtttggacaaagtaggggacacacacagtttgggaatctgcagtatacttactactgccggtagcccaggaatcttcagtatagagcatatgtgcgtgtgcatgcacagggtgtgtgcctgtgtatgtgcacttggaggccagaggtcaacacctagggtcctcttcaatcattctccacctttcggacctctttttttttttttttaaatatttatttatttatttatttatttattatatgtaaatacactatagctgtcttcagacactcagaagagggagtcagatctcattacagatggttgtgagccaccatgtggttgctgggatttgaactccggaccttcagaagagcagtcgggtgctcttacccattgagccatctcaccagccccggacctcattttttatgtgacacagggtctcactagggagcatatgtgacagacaagctggactggctagccaggaggcctcgggcatcttcctgcttctgtctcacagttttgggtcacggacaggtatgctgccatgctcagctctctgcgtggaagctggggctccgaactcgcatcc
